United States Patent Application Publication US 2010/0190656 A1 - sequence listing, part 2

SEQ ID NO: 939 - DNA, 1599 bp, Homo sapiens
actcttgggaaaactgctgggcaccgtcgtcgcgctgaaggtggttctgtacctgctccgagtgtgcttagcgatggcctggaaatccggcggcgccagccactcggagctaatccacaatctccgcaaaaatggaatcatcaagacagataaagtatttgaagtgatgctggctacagaccgctcccactatgcaaaatgtaacccatacatggattctccacaatcaataggtttccaagcaacaatcagtgctccacacatgcatgcatatgcgctagaacttctatttgatcagttgcatgaaggagctaaagctcttgatgtaggatctggaagtggaatccttactgcatgttttgcacgtatggttggatgtactggaaaagtcataggaattgatcacattaaagagctagtagatgactcagtaaataatgtcaggaaggacgatccaacacttctgtcttcagggagagtacagcttgttgtgggggatggaagaatgggatatgctgaagaagccccttatgatgccattcatgtgggagctgcagcccctgttgtaccccaggcgctaatagatcagttaaagcccggaggaagattgatattgcctgttggtcctgcaggcggaaaccaaatgttggagcagtatgacaagctacaagatggcagcatcaaaatgaagcctctgatgggggtgatatacgtgcctttaacagataaagaaaagcagtggtccaggtggaagtgattttatcttctgctctttcttcttccacacatgcaagggatgaattgtaaaagcaacatcagcttgaccagtataaaattacagtggattgctcatctcagtcctcaaagctttttgaaaaccaacaccatcacagcttgttttggactttgttacactgttattttcagcatgaaaatgtgtgtttttttagggtttctgattcttcaaagaggcacagagccaaattggtagaggaaggatgcaaagtataaatttgtgtaatattactttaacatgcccatattttacttggaaatattaaaagaaagggttctgtaaaatggaaaacttagtttgtgaattgattttgaggagtggtttttcttttcttggacacttaattctgttctgatattaatttatcagattgcttttgtgcattggataacaccaccattcacaagttaagattcttggtatttggatatctgttagatgctactaagaaaatagagatgagctttctttttaaagcttttgatgtggtgtcatagaatagcatgttgtagatacaatcagctgctttgttaccttaaaactaggcatttgtaaatattaaaccttaagatggcaggtgatgtcctgtaaacactcagctgttcagattggacataactgacttagttcttcccttctctctctctcaaaattataggagacttgtagtttagtgtggttttctgtttctaatttgctgctgataatgtatatgaacttaacatgctgtgtaagctgtgtcctagttcttgaacagtttatgcagtgctgctttgccaaataaagttaaaagtaaaagaggc

SEQ ID NO: 940 - DNA, 1222 bp, Homo sapiens
gttttgccagttatgcgaaaacatggctgcggccggtttggcccttctttgtaggagagtttcatccgccctgaaatcttcccgatcgttaataactcctcaggtccctgcctgcacagggttttttcttagtttgttgcctaagagtacaccaaatgtgacatcctttcaccaatatagattacttcataccacattgtcaaggaaaggactagaagaattttttgatgacccaaaaaactgggggcaagaaaaagtaaaatctggagcagcatggacctgtcagcaactaaggaacaaaagtaatgaagatttacacaaactttggtatgtcttactgaaagaaagaaacatgcttctaaccctagagcaggaggccaagcggcagagattgccaatgccaagtccagagcggttagataaggtagtagattccatggatgcattagataaagttgtccaggaaagagaagatgccctaaggcttcttcagactggtcaagaaagagctagacctggtgcttggagaagagacatctttggaagaatcatctggcacaagttcaagcagtgggttataccttggcacctaaataaaagatacaataggaaacgattctttgccttgccttatgtggaccattttctcagactggaacgtgagaaacgagcccgcatcaaagcacggaaggaaaatttagagagaaagaaagcaaaaattcttttaaaaaagtttccacatcttgctgaagcccaaaagtcaagtcttgtctaagatgtctgaactattaaatttaccattttgtttttcttgaatagtctgtgtacaggagtaaatatgttaagtggtttataaagaaattctgtttttagtcaagtgactttactaatcagttgttctaagtgtgaatatggcatgctaattagctaatttggtagaagctaatttgcttctaaaaatcaggtataaagttcagatgagattcccactttataaattctgacatttaagcaggctttaaatgtcacctgctaccttagagtgtgaaggtgatggtaactgccacagcaaaggcaataccgtagtttttgaatttgaataatagttttacctctgttgttaataggctatgaagaggatgtgggtattgctgttaataaacggaggactttgattcaaaaaaaaaaaaaaaaaaaaaaaaaaaaaaaaaaaaaaaaaaaa

SEQ ID NO: 941 - DNA, 1076 bp, Homo sapiens
gttttgccagttatgcgaaaacatggctgcggccggtttggcccttctttgtaggagagtttcatccgccctgaaatcttcccgatcgttaataactcctcaggtccctgcctgcacagggagcagcatggacctgtcagcaactaaggaacaaaagtaatgaagatttacacaaactttggtatgtcttactgaaagaaagaaacatgcttctaaccctagagcaggaggccaagcggcagagattgccaatgccaagtccagagcggttagataaggtagtagattccatggatgcattagataaagttgtccaggaaagagaagatgccctaaggcttcttcagactggtcaagaaagagctagacctggtgcttggagaagagacatctttggaagaatcatctggcacaagttcaagcagtgggttataccttggcacctaaataaaagatacaataggaaacgattctttgccttgccttatgtggaccattttctcagactggaacgtgagaaacgagcccgcatcaaagcacggaaggaaaatttagagagaaagaaagcaaaaattcttttaaaaaagtttccacatcttgctgaagcccaaaagtcaagtcttgtctaagatgtctgaactattaaatttaccattttgtttttcttgaatagtctgtgtacaggagtaaatatgttaagtggtttataaagaaattctgtttttagtcaagtgactttactaatcagttgttctaagtgtgaatatggcatgctaattagctaatttggtagaagctaatttgcttctaaaaatcaggtataaagttcagatgagattcccactttataaattctgacatttaagcaggctttaaatgtcacctgctaccttagagtgtgaaggtgatggtaactgccacagcaaaggcaataccgtagtttttgaatttgaataatagttttacctctgttgttaataggctatgaagaggatgtgggtattgctgttaataaacggaggactttgattcaaaaaaaaaaaaaaaaaaaaaaaaaaaaaaaaaaaaaaaaaaaa

SEQ ID NO: 942 - DNA, 1170 bp, Homo sapiens
aaggctattattaccaccactgagtggcttaaataatcctgtcaacagcaatcgcccatttccaaagccatggtgaaacatctctgtgctaatttcttttgttttgtttcctaattttttttttttggcaggtggtgggaaataatctttgtcttctttggagtaaaccttcaacaccggattttttcttttaattatggatgtaaaccccaatatccccataatttacattgggtctcgaccaattgcctaattataagaggatatatttaggctcttatttcatccacacaaaaacttgtgtaacaggtagttggaaacatctgaggcaccactttgattctgttttggatggtcatgttttttctcctccgtttccccagcatgtctgccaccatcctcatgcactgcttccaagtgcctgggagcctttatgagcgtccctaaacctaaaagaatccagaggcggggctcggatgaaccctcgagataagcaagtgagccgcttctcccctctaaaggatgtttacacgtgggtggcactcgctggaatccagcgctcgggcagccctgggaggacgcgctcagctgcgaggaggatggagagcaatacatcatcatctttggagaatttagcgacggcgcctgtgaaccagatccaagaaacaatttctgataattgtgtggtgattttctcaaaaacatcctgttcttactgtacaatggcaaaaaagcttttccatgacatgaatgttaactataaagtggtggaactggacctgcttgaatatggaaaccagttccaagatgctctttacaaaatgactggtgaaagaactgttccaagaatatttgtcaatggtacttttattggaggtgcaactgacactcataggcttcacaaagaaggaaaattgctcccactagttcatcagtgttatttaaaaaaaagtaagaggaaagaatttcagtgatgtttatactaataagtttgctagtacagtgtcagttatttaaagtggtaatgcccgataatgtcttttaaatgtttgaggatgttttaaatacatgcattgtcttcacgaagaagatgtaaaaataatgaacaataaattgcggtggaaacctaaaaaaaaaaaaaaaaaaaaaaaaaaaaaaaaaaaaaaaaaa

SEQ ID NO: 943 - DNA, 735 bp, Homo sapiens
gcggtgtccggcagtagagctcgctgcagatccgggctctgaccatgatttggcgccgcgcggcgctggcggggacgcggctggtttggagcaggagcggctcggcaggctggcttgacagggcggcgggagctgcgggagctgcggcagctgcggcctctgggatggagagcaatacatcatcatctttggagaatttagcgacggcgcctgtgaaccagatccaagaaacaatttctgataattgtgtggtgattttctcaaaaacatcctgttcttactgtacaatggcaaaaaagcttttccatgacatgaatgttaactataaagtggtggaactggacctgcttgaatatggaaaccagttccaagatgctctttacaaaatgactggtgaaagaactgttccaagaatatttgtcaatggtacttttattggaggtgcaactgacactcataggcttcacaaagaaggaaaattgctcccactagttcatcagtgttatttaaaaaaaagtaagaggaaagaatttcagtgatgtttatactaataagtttgctagtacagtgtcagttatttaaagtggtaatgcccgataatgtcttttaaatgtttgaggatgttttaaatacatgcattgtcttcacgaagaagatgtaaaaataatgaacaataaattgcggtggaaacctcaaaaaaaaaaaaaaaaaaaaaaaaaaaaaaaaaaaaaaaaa

SEQ ID NO: 944 - DNA, 2830 bp, Homo sapiens
aattcggcacgaggagagctggttgcgtgagtctcctcagctctgcttaccggtgcgactagcggcagcgacgcggctaaaagcgaaggggcgagtgcgagtcccctgagctgtacgaacgcggtcgccatggaccgcccagatgaggggcctccggccaagacccgccgcctgagcagctccgagtctccacagcgcgacccgcccccgccgccgccgccgccgccgctcctccgactgccgctgcctccaccccagcagcgcccgaggctccaggaggaaacggaggcggcacaggtgctggccgatatgaggggggtgggactgggccccgcgctgcccccgccgcctccctatgtcattctcgaggagggggggatccgcgcatacttcacgctcggtgctgagtgtcccggctgggattctaccatcgagtcggggtatggggaggcgcccccgcccacggagagcctggaagcactccccactcctgaggcctcgggggggagcctggaaatcgattttcaggttgtacagtcgagcagttttggtggagagggggccctagaaacctgtagcgcagtggggtgggcgccccagaggttagttgacccgaagagcaaggaagaggcgatcatcatagtggaggatgaggatgaggatgagcgggagagtatgaggagcagcaggaggcggcggcggcggcggaggaggaagcagaggaaggtgaagagggaaagcagagagagaaatgccgagaggatggagagcatcctgcaggcactggaggatattcagctggatctggaggcagtgaacatcaaggcaggcaaagccttcctgcgtctcaagcgcaagttcatccagatgcgaagacccttcctggagcgcagagacctcatcatccagcatatcccaggcttctgggtcaaagcattcctcaaccaccccagaatttcaattttgatcaaccgacgtgatgaagacattttccgctacttgaccaatctgcaggtacaggatctcagacatatctccatgggctacaaaatgaagctgtacttccagactaacccctacttcacaaacatggtgattgtcaaggagttccagcgcaaccgctcaggccggctggtgtctcactcaaccccaatccgctggcaccggggccaggaaccccaggcccgtcgtcacgggaaccaggatgcgagccacagctttttcagctggttctcaaaccatagcctcccagaggctgacaggattgctgagattatcaagaatgatctgtgggttaaccctctacgctactacctgagagaaaggggctccaggataaagagaaagaagcaagaaatgaagaaacgtaaaaccaggggcagatgtgaggtggtgatcatggaagacgcccctgactattatgcagtggaagacattttcagcgagatctcagacattgatgagacaattcatgacatcaagatctctgacttcatggagaccaccgactacttcgagaccactgacaatgagataactgacatcaatgagaacatctgcgacagcgagaatcctgaccacaatgaggtccccaacaacgagaccactgataacaacgagagtgctgatgaccacgaaaccactgacaacaatgagagtgcagatgacaacaacgagaatcctgaagacaataacaagaacactgatgacaacgaagagaaccctaacaacaacgagaacacttacggcaacaacttcttcaaaggtggcttctggggcagccatggcaacaaccaggacagcagcgacagtgacaatgaagcagatgaggccagtgatgatgaagataatgatggcaacgaaggtgacaatgagggcagtgatgatgatggcaatgaaggtgacaatgaaggcagcgatgatgacgacagagacattgagtactatgagaaagttattgaagactttgacaaggatcaggctgactacgaggacgtgatagagatcatctcagacgaatcagtggaagaagagggcattgaggaaggcatccagcaagatgaggacatctatgaggaaggaaactatgaggaggaaggaagtgaagatgtctgggaagaaggggaagattcggacgactctgacctagaggatgtgcttcaggtcccaaacggttgggccaatccggggaagagggggaaaaccggataagggttttccccttttggggatcacctctctgtatcccccacccactatcccatttgccctcctcctcagctagggccacgcggccccacattgcacttctggggggtgaccgacttcgtacacgggtttaaagtttatttttatggtttagtcattgcagagttcttattttggggggagggaaagggggctagtccccttcttttggccctccgcccccgcaggcttctgtgtgctgctaactgtatttattgtgatgccttggtcagggcccctctacccacttctcccagtcagttgtggccccagcccctctccctgtgctgtgtggagtggacaccctgacccccgaagcggggagggccgctgtggccttcgtcacagccgcgcagtgcccatggaggcgctgctgccaccttcctctcccaagttctttctccatccctctcctcttcccgccgcgccgctagcccgcctcggtgtctatgcaaggccgcttcgccattgcggtattctttgcggtattcttgtccccgtcccccagaaggctcgcctctccccgtggaccctgttaatcccaataaaattctgagcaagttcaaaaaaaaaaaaaaaaaaa

SEQ ID NO: 945 - DNA, 2994 bp, Homo sapiens
gcctcggaggcgtgggtgacgcaggcgcagcgcgggctgcgcgcgctactgcccatccccggttgtcccacttttgttcgcctctcttcggccctctactcaagagctccgtctccgtctcgccctcctcgaagtcctcgtcgcgcgcccgcgacccaggtcgccctgaaatctagcccgtccgagcgcgagtccaacgccgcggccgcaccaaggccccctcagaccgtgccatgggtgacagtgatgacgagtacgatcgaaggcgcagggacaagttcagaagagagcgcagcgactacgaccgttcccgcgagagagatgaaagacgtcgaggggacgattggaatgacagagagtgggaccgtggccgtgagcgccgtagtcggggtgaatatcgggactatgaccggaatcggcgagagcgcttctcgccacctcgccacgaactcagcccgccacagaagcgcatgaggagagactgggatgagcacagctctgacccataccacagtggctatgagatgccctatgctggggggggtgggggcccaacttatggcccccctcagccctggggccaccctgacgtccacatcatgcagcaccatgtcctgcctatccaggccaggctgggcagcattgcagagattgacctgggtgtgccgccgcccgtgatgaagaccttcaaggagtttctcctctccctggatgactcggtggatgagacggaggccgtcaagcgctataatgactacaagctggatttccggaggcaacagatgcaggatttcttcctggcgcacaaagatgaggagtggtttcggtctaagtaccacccagatgaggtggggaagcgtcggcaggaggcccggggggccctgcaaaaccgactgagggtcttcctgtccctcatggagactggctggtttgataaccttctcctggacatagacaaagctgatgccattgtcaagatgctggatgcagccgtgattaagatggaaggaggcacggagaatgatcttcgcatcctggagcaggaggaggaggaggagcaggcaggaaagcctggggagcccagcaagaaagaagaaggacgggctggagcaggcctaggggacggggagcgcaaaaccaacgacaaggatgagaagaaggaagacggcaagcaggctgagaatgacagttctaatgatgacaaaacaaagaagtcggagggtgatggggacaaggaagagaagaaagaagactccgagaaggaagccaaaaagagtagcaagaagcggaaccggaagcacagtggtgacgacagctttgacgagggcagcgtgtcagagtctgagtcggagtcagagagcggccaggctgaggaggagaaggaggaggccgaagaagcgctcaaggagaaggagaagcccaaggaagaagaatgggagaagcccaaggacgccgcggggctggagtgcaagccgcggccgctgcataagacctgctccctcttcatgcgcaacatcgcgcccaacatctcccgggccgagatcatctccctttgtaaaaggtacccaggctttatgcgggtggcgctctcagagccccagccagagaggaggtttttccgtcgtggctgggtgaccttcgaccgcagtgttaacattaaagagatctgttggaacctgcagaacatccgtctccgggagtgtgagctgagccctggtgtgaacagggacctgacccggcgcgttcgcaacatcaacggcatcacccagcacaagcagattgtgcgcaacgacatcaagctggcggccaagctgatccacacgctggatgacaggacacagctttgggcctcagaaccagggacgcctcccctgcccacgagcctgccctcgcaaaacccgatcttgaagaatatcaccgactacctgatcgaggaagtaagcgccgaggaggaggagctgctggggagcagcgggggcgctcctcctgaggagcctcctaaggaagggaacccggcagagatcaacgtggagcgggatgagaagttgattaaggtcttggacaagctcctcctttacctgcgcatcgtgcattccttggattattacaacacctgtgagtaccccaacgaggacgagatgcccaatcgctgtgggatcatccacgttcgggggcccatgccacccaaccgcatcagtcacggggaagtgctggagtggcagaagacttttgaggagaagctcacgccgttgctgagtgtgcgggagtcactctcagaggaagaggcccagaagatggggcgcaaagacccagagcaggaagtggagaagttcgtcacctccaacacgcaggaactgggcaaggataagtggctgtgtcctctcagtggcaagaaattcaagggtcctgagtttgtgcgcaaacatatcttcaacaagcatgcagagaaaattgaggaagtgaaaaaggaagtcgcgttttttaacaacttcctcactgatgctaagcgcccagctctgcctgagatcaagccagcccagccacctggccccgcccagatactccccccaggtttgaccccaggactcccctacccacaccagactccccagggcctgatgccctatggtcagccccggcccccgatcttgggctatggagctggtgctgtccgccctgcagtccccacaggaggccctccatacccccatgccccgtatggtgctggtcgagggaactatgatgccttccgaggccagggaggttatcctgggaaacctcgcaacaggatggttcgtggagacccaagggccattgtggaatatcgggacctggatgccccagacgatgttgatttcttttgagccgtcccccgttcctcagtcctgtatcatccatacttgtactaccttgtcctatgaagctctgagaattttttgtacgatcagccttactgctaataaaagcacttccacagggaaaaaaaaaaaaaaa

SEQ ID NO: 946 - DNA, 3065 bp, Homo sapiens
gcctcggaggcgtgggtgacgcaggcgcagcgcgggctgcgcgcgctactgcccatccccggttgtcccacttttgttcgcctctcttcggccctctactcaagagctccgtctccgtctcgccctcctcgaagtcctcgtcgcgcgcccgcgacccaggtcgccctgaaatctagcccgtccgagcgcgagtccaacgccgcggccgcaccaaggccccctcagaccgtgccatgggtgacagtgatgacgagtacgatcgaaggcgcagggacaagttcagaagagagcgcagcgactacgaccgttcccgcgagagagatgaaagacgtcgaggggacgattggaatgacagagacagggtctccctctgtcacccgggctgagtgcactggtgcagtcgaagcttgctgcagccgcgacctgcccagagtgggaccgtggccgtgagcgccgtagtcggggtgaatatcgggactatgaccggaatcggcgagagcgcttctcgccacctcgccacgaactcagcccgccacagaagcgcatgaggagagactgggatgagcacagctctgacccataccacagtggctatgagatgccctatgctggggggggtgggggcccaacttatggcccccctcagccctggggccaccctgacgtccacatcatgcagcaccatgtcctgcctatccaggccaggctgggcagcattgcagagattgacctgggtgtgccgccgcccgtgatgaagaccttcaaggagtttctcctctccctggatgactcggtggatgagacggaggccgtcaagcgctataatgactacaagctggatttccggaggcaacagatgcaggatttcttcctggcgcacaaagatgaggagtggtttcggtctaagtaccacccagatgaggtggggaagcgtcggcaggaggcccggggggccctgcaaaaccgactgagggtcttcctgtccctcatggagactggctggtttgataaccttctcctggacatagacaaagctgatgccattgtcaagatgctggatgcagccgtgattaagatggaaggaggcacggagaatgatcttcgcatcctggagcaggaggaggaggaggagcaggcaggaaagcctggggagcccagcaagaaagaagaaggacgggctggagcaggcctaggggacggggagcgcaaaaccaacgacaaggatgagaagaaggaagacggcaagcaggctgagaatgacagttctaatgatgacaaaacaaagaagtcggagggtgatggggacaaggaagagaagaaagaagactccgagaaggaagccaaaaagagtagcaagaagcggaaccggaagcacagtggtgacgacagctttgacgagggcagcgtgtcagagtctgagtcggagtcagagagcggccaggctgaggaggagaaggaggaggccgaagcgctcaaggagaaggagaagcccaaggaagaagaatgggagaagcccaaggacgccgcggggctggagtgcaagccgcggccgctgcataagacctgctccctcttcatgcgcaacatcgcgcccaacatctcccgggccgagatcatctccctttgtaaaaggtacccaggctttatgcgggtggcgctctcagagccccagccagagaggaggtttttccgtcgtggctgggtgaccttcgaccgcagtgttaacattaaagagatctgttggaacctgcagaacatccgtctccgggagtgtgagctgagccctggtgtgaacagggacctgacccggcgcgttcgcaacatcaacggcatcacccagcacaagcagattgtgcgcaacgacatcaagctggcggccaagctgatccacacgctggatgacaggacacagctttgggcctcagaaccagggacgcctcccctgcccacgagcctgccctcgcaaaacccgatcttgaagaatatcaccgactacctgatcgaggaagtaagcgccgaggaggaggagctgctggggagcagcgggggcgctcctcctgaggagcctcctaaggaagggaacccggcagagatcaacgtggagcgggatgagaagttgattaaggtcttggacaagctcctcctttacctgcgcatcgtgcattccttggattattacaacacctgtgagtaccccaacgaggacgagatgcccaatcgctgtgggatcatccacgttcgggggcccatgccacccaaccgcatcagtcacggggaagtgctggagtggcagaagacttttgaggagaagctcacgccgttgctgagtgtgcgggagtcactctcagaggaagaggcccagaagatggggcgcaaagacccagagcaggaagtggagaagttcgtcacctccaacacgcaggaactgggcaaggataagtggctgtgtcctctcagtggcaagaaattcaagggtcctgagtttgtgcgcaaacatatcttcaacaagcatgcagagaaaattgaggaagtgaaaaaggaagtcgcgttttttaacaacttcctcactgatgctaagcgcccagctctgcctgagatcaagccagcccagccacctggccccgcccagatactccccccaggtttgaccccaggactcccctacccacaccagactccccagggcctgatgccctatggtcagccccggcccccgatcttgggctatggagctggtgctgtccgccctgcagtccccacaggaggccctccatacccccatgccccgtatggtgctggtcgagggaactatgatgccttccgaggccagggaggttatcctgggaaacctcgcaacaggatggttcgtggagacccaagggccattgtggaatatcgggacctggatgccccagacgatgttgatttcttttgagccgtcccccgttcctcagtcctgtatcatccatacttgtactaccttgtcctatgaagctctgagaattttttgtacgatcagccttactgctaataaaagcacttccacagggaaaaaaaaaaaaaaa

SEQ ID NO: 947 - DNA, 3697 bp, Homo sapiens
cccaagactgtccccgctggaggcggtagagggatccagaagtaatgagatgctaatgagtcgcgaataaagcccgggcggcgccccgcgcccctcgcggaagcccacactccgcgcgactccaggcgcacgccccgggccgccccgcatcccagcatccccgcccgatctcggcgtttccgcccccgcccccgcccccgccctcccacccgctcagacctggttgccagcccaacaggaagcggcccctcccggcttcggagccgccgccactcgtctctgcccagctgctgccctccccaggaggcctccatggcttcacctacctccaccaacccagcgcatgcccactttgagagcttcctgcaggcccagctgtgccaggacgtgctgagcagcttccaggagctgtgtggggccctggggctggaacccggtggggggctgccccagtaccacaagatcaaggaccagctcaactactggagcgccaagtcactgtggaccaagctggacaagcgagcaggccagcctgtctaccagcagggccgggcctgcaccagcaccaagtgcctggtggtgggtgctggaccttgcgggctgcgggtcgctgtggagctggcgctgctgggggcccgagtggtgctggtggaaaagcgcaccaagttctctcgccacaacgtgctccacctctggcccttcaccatccacgacctgcgggcactcggtgctaagaagttctacgggcgcttctgcaccggcaccctggaccacatcagcatcaggcagctccagctgcttctgctgaaggtagcattgctgctgggggtggaaattcactggggtgtcactttcactggcctccagccccctcctaggaaggggagtggctggcgtgcccagctccaacccaacccccctgcccagctggccaactatgaatttgacgtccttatctcggctgcaggaggtaaattcgtccctgaaggcttcaaagttcgagaaatgcgaggcaaactggccattggcatcacagccaactttgtgaatggacgcaccgtggaggagacacaggtgccggagatcagtggtgtagccaggatctacaaccagagcttcttccagagccttctcaaagccacaggcattgatctggagaacattgtgtactacaaggacgacacccactactttgtgatgacagccaagaagcagtgcctgctgcggctgggggtgctgcgccaggactggccagacaccaatcggctgctgggcagtgccaatgtggtgcccgaggctctgcagcgctttacccgggcagctgctgactttgccacccatggcaagctcgggaaactagagtttgcccaggatgcccatgggcagcctgatgtctctgcctttgacttcacgagcatgatgcgggcagagagttctgctcgtgtgcaagagaagcatggcgcccgcctgctgctgggactggtgggggactgcctggtggagcccttctggcccctgggcactggagtggcacggggcttcctggcagcctttgatgcagcctggatggtgaagcggtgggcagagggcgctgagtccctagaggtgttggctgagcgtgagagcctgtaccagcttctgtcacagacatccccagaaaacatgcatcgcaatgtggcccagtatgggctggacccagccacccgctaccccaacctgaacctccgggcagtgacccccaatcaggtacgagacctgtatgatgtgctagccaaggagcctgtgcagaggaacaacgacaagacagatacagggatgccagccaccgggtcggcaggcacccaggaggagctgctacgctggtgccaggagcagacagctgggtacccgggagtccacgtctccgatttgtcttcctcctgggctgatgggctagctctgtgtgccctggtgtaccggctgcagcctggcctgctggaaccctcagagctgcaggggctgggagctctggaagcaactgcttgggcactaaaggtggcagagaatgagctgggcatcacaccggtggtgtctgcacaggccgtggtagcagggagtgacccactgggcctcattgcctacctcagccacttccacagtgccttcaagagcatggcccacagcccaggccctgtcagccaggcctccccagggacctccagtgctgtattattccttagtaaacttcagaggaccctgcagcgatcccgggccaaggaaaatgcagaggatgctggtggcaagaagctgcgcttggagatggaggccgagaccccaagtactgaggtgccacctgacccagagcctggtgtacccctgacacccccatcccaacaccaggaggccggtgctggggacctgtgtgcactttgtggggaacacctctatgtcctggaacgcctctgtgtcaacggccatttcttccaccggagctgcttccgctgccatacctgtgaggccacactgtggccaggtggctatgagcagcacccaggagatggacatttctactgcctccagcacctgccccagacagaccacaaaaaggaaggcagcgatagaggccctgagagtccggagctccccacaccaagtgagaatagcatgccaccaggcctctcaactcccacagcctcgcaggagggggccggtcctgttccagatcccagccagcccacccgtcggcagatccgcctctccagcccggagcgccagcggttgtcctcccttaaccttacccctgacccggaaatggagcctccacccaagcctccccgcagctgctccgccttggcccgccacgccctggagagcagctttgtgggctggggcctgccagtccagagccctcaagctcttgtggccatggagaaggaggaaaaagagagtcccttctccagtgaagaggaagaagaagatgtgcctttggactcagatgtggaacaggccctgcagacctttgccaagacctcaggcaccatgaataactacccaacatggcgtcggactctgctgcgccgtgcgaaggaggaggagatgaagaggttctgcaaggcccagaccatccaacggcgactaaatgagattgaggctgccttgagggagctagaggccgagggcgtgaagctggagctggccttgaggcgccagagcagttccccagaacagcaaaagaaactatgggtaggacagctgctacagctcgttgacaagaaaaacagcttggtggctgaggaggccgagctcatgatcacggtgcaggaattgaatctggaggagaaacagtggcagctggaccaggagctacgaggctacatgaaccgggaagaaaacctaaagacagctgctgatcggcaggctgaggaccaggtcctgaggaagctggtggatttggtcaaccagagagatgccctcatccgcttccaggaggagcgcaggctcagcgagctggccttggggacaggggcccagggctagacgagggtgggccgtctgctttcgttcccacaaagaaagcacctcaccccagcacagtgccacccctgttcatctgggctgcctggcagagagccttgctgtttacaattaaaatgtttctgccccaaaaaaaaaaaaaaaaaaaaaaaaaaaaaaaaaaaaaaaaaaaaaaaaaaaaaaa

SEQ ID NO: 948 - DNA, 561 bp, Homo sapiens
aatcatgtctgactccctggtggtgtgcgaggtagacccagagctaacagaaaagctgaggaaattccgcttccgaaaagagacagacaatgcagccatcataatgaaggtggacaaagaccggcagatggtggtgctggaggaagaatttcagaacatttccccagaggagctcaaaatggagttgccggagagacagcccaggttcgtggtttacagctacaagtacgtgcatgacgatggccgagtgtcctaccctttgtgtttcatcttctccagccctgtgggctgcaagccggaacaacagatgatgtatgcagggagtaaaaacaggctggtgcagacagcagagctcacaaaggtgttcgaaatccgcaccactgatgacctcactgaggcctggctccaagaaaagttgtctttctttcgttgatctctgggctggggactgaattcctgatgtctgagtcctcaggtgactggggacttggaaccctaggacctgaacaaccaagactttaaataattttaaatgcaaaaactcagaaaaaaaaaaaaaaa

SEQ ID NO: 949 - DNA, 849 bp, Homo sapiens
ggggaaggcggcggcggcggtggcctttggggccgaagtgggcgtgcggctcgcgctgttcgcggccttcctggtgacggagctgctccccccgttccagagactcatccagccggaggagatgtggctctaccggaacccctacgtggaggcggagtatttccccaccaagccgatgtttgttattgcatttctctctccactgtctctgatcttcctggccaaatttctcaagaaggcagacacaagagacagcagacaagcctgcctggctgccagccttgccctggctctgaatggcgtctttaccaacacaataaaactgatcgtagggaggccacgcccagatttcttctaccgctgcttccctgatgggctagcccattctgacttgatgtgtacaggggataaggacgtggtgaatgagggccgaaagagcttccccagtggacattcttcctttgcatttgctggtctggcctttgcgtccttctacctggcagggaagttacactgcttcacaccacaaggccgtgggaaatcttggaggttctgtgcctttctgtcacctctactttttgcagctgtgattgcactgtcccgcacatgtgactacaagcatcactggcaaggaccctttaaatggtgaaaatgggcagatgaatagcaataagtggacctttgttactcttctgagttagaaaaattctaatttagtacactctgaacaaagcttattatacttacttaagatgtgttttgatttggtgttcagaaagcaacctgacaatgataatactgtaactatgataaaattgagaataaaaagattttatttagaaaaaaaaa

SEQ ID NO: 950 - DNA, 2794 bp, Homo sapiens
aggagccttaggaggtacggggagctcgcaaatactccttttggtttattcttaccaccttgcttctgtgttccttgggaatgctgctgtgcttatgcatctggtctctttttggagctacagtggacaggcatttgtgacagcactatgggactgagtaacattctctttgtgatggccttcctgctctctggtgctgctcctctgaagattcaagcttatttcaatgagactgcagacctgccatgccaatttgcaaactctcaaaaccaaagcctgagtgagctagtagtattttggcaggaccaggaaaacttggttctgaatgaggtatacttaggcaaagagaaatttgacagtgttcattccaagtatatgggccgcacaagttttgattcggacagttggaccctgagacttcacaatcttcagatcaaggacaagggcttgtatcaatgtatcatccatcacaaaaagcccacaggaatgattcgcatccaccagatgaattctgaactgtcagtgcttgctaacttcagtcaacctgaaatagtaccaatttctaatataacagaaaatgtgtacataaatttgacctgctcatctatacacggttacccagaacctaagaagatgagtgttttgctaagaaccaagaattcaactatcgagtatgatggtattatgcagaaatctcaagataatgtcacagaactgtacgacgtttccatcagcttgtctgtttcattccctgatgttacgagcaatatgaccatcttctgtattctggaaactgacaagacgcggcttttatcttcacctttctctatagagcttgaggaccctcagcctcccccagaccacattccttggattacagctgtacttccaacagttattatatgtgtgatggttttctgtctaattctatggaaatggaagaagaagaagcggcctcgcaactcttataaatgtggaaccaacacaatggagagggaagagagtgaacagaccaagaaaagagaaaaaatccatatacctgaaagatctgatgaagcccagcgtgtttttaaaagttcgaagacatcttcatgcgacaaaagtgatacatgtttttaattaaagagtaaagcccatacaagtattcattttttctaccctttcctttgtaagttcctgggcaacctttttgatttcttccagaaggcaaaaagacattaccatgagtaataagggggctccaggactccctctaagtggaatagcctccctgtaactccagctctgctccgtatgccaagaggagactttaattctcttactgcttcttttcacttcagagcacacttatgggccaagcccagcttaatggctcatgacctggaaataaaatttaggaccaatacctcctccagatcagattcttctcttaatttcatagattgtgtttttttttaaatagacctctcaatttctggaaaactgccttttatctgcccagaattctaagctggtgccccactgaatcttgtgtacctgtgactaaacaactacctcctcagtctgggtgggacttatgtatttatgaccttatagtgttaatatcttgaaacatagagatctatgtactgtaatagtgtgattactatgctctagagaaaagtctacccctgctaaggagttctcatccctctgtcagggtcagtaaggaaaacggtggcctagggtacaggcaacaatgagcagaccaacctaaatttggggaaattaggagaggcagagatagaacctggagccacttctatctgggctgttgctaatattgaggaggcttgccccacccaacaagccatagtggagagaactgaataaacaggaaaatgccagagcttgtgaaccctgtttctcttgaagaactgactagtgagatggcctggggaagctgtgaaagaaccaaaagagatcacaatactcaaaagagagagagagagaaaaaagagagatcttgatccacagaaatacatgaaatgtctggtctgtccaccccatcaacaagtcttgaaacaagcaacagatggatagtctgtccaaatggacataagacagacagcagtttccctggtggtcagggaggggttttggtgatacccaagttattgggatgtcatcttcctggaagcagagctggggagggagagccatcaccttgataatgggatgaatggaaggaggcttaggactttccactcctggctgagagaggaagagctgcaacggaattaggaagaccaagacacagatcacccggggcttacttagcctacagatgtcctacgggaacgtgggctggcccagcatagggctagcaaatttgagttggatgattgtttttgctcaaggcaaccagaggaaacttgcatacagagacagatatactgggagaaatgactttgaaaacctggctctaaggtgggatcactaagggatggggcagtctctgcccaaacataaagagaactctggggagcctgagccacaaaaatgttcctttattttatgtaaaccctcaagggttatagactgccatgctagacaagcttgtccatgtaatattcccatgtttttaccctgcccctgccttgattagactcctagcacctggctagtttctaacatgttttgtgcagcacagtttttaataaatgcttgttacattcaaaaaaaaaaaaaaaaaaaaaaaaaaaaaaaaaaaaaaaaaaaaaaaaaaaaaaaaaaaaaaaaaaaaaaaaaaaaa

SEQ ID NO: 951 - DNA, 2781 bp, Homo sapiens
ggaaggcttgcacagggtgaaagctttgcttctctgctgctgtaacagggactagcacagacacacggatgagtggggtcatttccagatattaggtcacagcagaagcagccaaaatggatccccagtgcactatgggactgagtaacattctctttgtgatggccttcctgctctctggtgctgctcctctgaagattcaagcttatttcaatgagactgcagacctgccatgccaatttgcaaactctcaaaaccaaagcctgagtgagctagtagtattttggcaggaccaggaaaacttggttctgaatgaggtatacttaggcaaagagaaatttgacagtgttcattccaagtatatgggccgcacaagttttgattcggacagttggaccctgagacttcacaatcttcagatcaaggacaagggcttgtatcaatgtatcatccatcacaaaaagcccacaggaatgattcgcatccaccagatgaattctgaactgtcagtgcttgctaacttcagtcaacctgaaatagtaccaatttctaatataacagaaaatgtgtacataaatttgacctgctcatctatacacggttacccagaacctaagaagatgagtgttttgctaagaaccaagaattcaactatcgagtatgatggtattatgcagaaatctcaagataatgtcacagaactgtacgacgtttccatcagcttgtctgtttcattccctgatgttacgagcaatatgaccatcttctgtattctggaaactgacaagacgcggcttttatcttcacctttctctatagagcttgaggaccctcagcctcccccagaccacattccttggattacagctgtacttccaacagttattatatgtgtgatggttttctgtctaattctatggaaatggaagaagaagaagcggcctcgcaactcttataaatgtggaaccaacacaatggagagggaagagagtgaacagaccaagaaaagagaaaaaatccatatacctgaaagatctgatgaagcccagcgtgtttttaaaagttcgaagacatcttcatgcgacaaaagtgatacatgtttttaattaaagagtaaagcccatacaagtattcattttttctaccctttcctttgtaagttcctgggcaacctttttgatttcttccagaaggcaaaaagacattaccatgagtaataagggggctccaggactccctctaagtggaatagcctccctgtaactccagctctgctccgtatgccaagaggagactttaattctcttactgcttcttttcacttcagagcacacttatgggccaagcccagcttaatggctcatgacctggaaataaaatttaggaccaatacctcctccagatcagattcttctcttaatttcatagattgtgtttttttttaaatagacctctcaatttctggaaaactgccttttatctgcccagaattctaagctggtgccccactgaatcttgtgtacctgtgactaaacaactacctcctcagtctgggtgggacttatgtatttatgaccttatagtgttaatatcttgaaacatagagatctatgtactgtaatagtgtgattactatgctctagagaaaagtctacccctgctaaggagttctcatccctctgtcagggtcagtaaggaaaacggtggcctagggtacaggcaacaatgagcagaccaacctaaatttggggaaattaggagaggcagagatagaacctggagccacttctatctgggctgttgctaatattgaggaggcttgccccacccaacaagccatagtggagagaactgaataaacaggaaaatgccagagcttgtgaaccctgtttctcttgaagaactgactagtgagatggcctggggaagctgtgaaagaaccaaaagagatcacaatactcaaaagagagagagagagaaaaaagagagatcttgatccacagaaatacatgaaatgtctggtctgtccaccccatcaacaagtcttgaaacaagcaacagatggatagtctgtccaaatggacataagacagacagcagtttccctggtggtcagggaggggttttggtgatacccaagttattgggatgtcatcttcctggaagcagagctggggagggagagccatcaccttgataatgggatgaatggaaggaggcttaggactttccactcctggctgagagaggaagagctgcaacggaattaggaagaccaagacacagatcacccggggcttacttagcctacagatgtcctacgggaacgtgggctggcccagcatagggctagcaaatttgagttggatgattgtttttgctcaaggcaaccagaggaaacttgcatacagagacagatatactgggagaaatgactttgaaaacctggctctaaggtgggatcactaagggatggggcagtctctgcccaaacataaagagaactctggggagcctgagccacaaaaatgttcctttattttatgtaaaccctcaagggttatagactgccatgctagacaagcttgtccatgtaatattcccatgtttttaccctgcccctgccttgattagactcctagcacctggctagtttctaacatgttttgtgcagcacagtttttaataaatgcttgttacattcaaaaaaaaaaaaaaaaaaaaaaaaaaaaaaaaaaaaaaaaaaaaaaaaaaaaaaaaaaaaaaaaaaaaaaaaaaaaa

SEQ ID NO: 952 - DNA, 3843 bp, Homo sapiens
ccgccgcgcggccggggcttctcactctgacgggcccgcgcgcacgatggccggcgccgcgccgcgggtccgctacctggcgggcttctgctgccctctcgggggcctggcggcgggcaagccccgcgtgctgtgccatgaggcagaggtcttcctgtccaccgggagcgagctcgtctacgtgtacgaccaggagggcgggctgctgaccgcggcgttccggttccccgaccaggtgtggcacctggagctgctggcgccgcgcaggttgctgtacgcgctgtgcgcccggaggggcctctactgcctgtcgctggaccacccgggcaggagcaggtgagggcgggcccgcggcctccctcccgcacactcctgctgcccccggactgcttcagagcgagcagccccacctcatcgcgcttggggacccgggctgccgccagctctgaagcctcggccgccatccctgcccgattatctggagcccctgcccccagcactctttctgcaagtgtcttgctcacagtccttagtctacgagccaggatgacagggacagcgaggacggtgaccagccttcccccgtgatccctgtggaccccgatgcctgcatccttcccgatgctgcgctgtgcgcgttcaccttgctggacagtgtgctggtcaccctggtgcagggccctgcccgatggaagatgcagctgtttgagcagccctgtcctggggaggacccccggccaggaggccagatcggtgaggtggagctgtcctcctacacgcccccagccggggtcccaggaaagcctgcagccccccacttccttccagtgctgtgctctgtgtcaccatcaggctccagggtcccgcacgacctcctcgggggctccgggggcttcacgctggaggacgccctcttcgggctcctctttggagctgatgccaccctcctgcagtcacctgtggtcctctgtggtctccctgatggccagctctgctgtgtgatcctgaaggccctggtcacctccaggtcagcccctggtgacccaaatgcccttgtcaagatcctccatcacctggaggagcccgtcatcttcataggggccttgaagacagagccacaggctgcagaagctgcagagaattttctgcctgacgaggatgtgcactgtgactgcctggtggcctttggtcaccacggccggatgctggccatcaaggccagctgggatgagtccgggaagctggtgcccgagctgcgggagtactgcctcccaggccctgtgctctgcgctgcctgtggcgggggtggccgcgtgtaccacagcaccccttctgacctctgtgtggtggatctgtctcggggaagcaccccgctgggccctgagcagcccgaagaaggcccgggaggcctgccccccatgctgtgcccagccagcctgaacatctgcagtgtcgtctcgctgtccgcgtctcccaggacgcatgaaggtggcaccaagctcctggccctgtccgccaaaggccgcctgatgacctgcagcctggacctggactctgagatgcctggcccagccaggatgaccacagagagtgcaggtcagaaaataaaggagctgctgtctggaattggcaacatctctgagagagtgtcttttctaaagaaggcggttgaccagcggaacaaggcactgacaagcctcaacgaggccatgaacgtgagctgtgcactgctgtcaagcggcacgggccccagacccatctcctgcaccaccagcaccacctggagccgcctgcagacacaggatgtgctcatggccacctgcgtgctagagaacagcagcagcttcagcctggaccaggggtggaccctgtgcatccaggtgctcaccagctcctgtgctctcgacctggactcggcctgctccgccatcacctacaccatccccgtggaccagctcggccccggtgctcggcgggaggtgacgctacccctgggccctggtgagaacggcgggctcgacctgcccgtgaccgtgtcctgcacgctgttctacagtctcagggaggtggtgggcggggcccttgccccctcagactctgaggacccctttctggatgagtgcccctccgacgtcctgcccgagcaagagggtgtttgcctgcccctgagcaggcacacagtggacatgctgcagtgtctgtgcttccctggcctggccccgccacacacacgggccccctccccactcggccccacccgagaccctgtggccacttttctggaaacttgtcgggagcctggcagccagccagcaggacccgcctccctgcgggccgagtacctgcccccatctgtggcttccatcaaggtgtcggcggagctgctcagagctgccttgaaggacggccactcaggcgtgcccctgtgctgtgccaccctgcagtggctccttgctgagaatgctgctgtggacgtcgtgagggcccgagcactatcttccatccagggagtggcccctgatggcgccaacgttcacctcatcgtccgagaggtggccatgaccgacctgtgcccagcagggcccatccaggccgtggagattcaagtggaaagctcctctctggccgacatttgcagggcgcaccatgccgttgtcgggcgcatgcagacgatggtgacagagcaggccgcccagggctccagcgctcctgatctccgtgtgcagtacctccgccagatccacgccaaccacgagacactgctgcgggaggtgcagaccctgcgcgaccggctctgcacggaggatgaggccagctcctgtgccaccgcccagaggctgctacaggtgtaccggcagctgcgccaccccagcctcatcctgctgtgaccaggcgggcctgcccctgggctctggccacgcttccagcctctgtcacagcccccccaggcctcatgggttagagggaaaccgagctggcctggccagagccgtcagggaaggtaggacctggccacgtaggagcagaacgctcatgaaagtgcttggaggccgtggagcacaaagcagattctgattgggagcaaccgaggcgggctctgaacctggccggtccagcttcgcgtcctctgctggtgtctctccttctctgaccgcggccgcagcccctgcactcgccttcctcactgctgggcagccttcccaccaccgcagcagcccctgaggccaggaggcagtgcagggcattctggacccggagggccagagaaacaggatttctggggtttggacttggggtgagtttgtaactgttgctgccacaccaccaggagcaccggctgcccctctgggtggcactaccaggtgccccacggtacccttgtcacactgttcacacctgcccggctgcccactctgggaccccgaggtaggagggtgctccctgagaccaaagcacaaaacagcatgcagggagctcctgcaagtgcccgtggtctcgtgccacaccaaggaagggccagcgggtggcctgtggccggaatgctcaacaactaggtgcctccggccggggcagtacccagcactgtgcactattttcagggccactcagggtggcgctgtggcccgggggggggccctgagccccagcccccagcctcctccctcagcctgggctacggcccacctcctggtgctggtgttttcatctggggagggtgctcgcgccgctcccgctgcaggcactgtccgcgatgagtgcgggtaggagccgtgaggtgcttctctgctgtgacaaacgaccctgtctgtccgtgaaccttcaaaaaaaaaaaaaaaaaaaaaa

SEQ ID NO: 953 - DNA, 1336 bp, Homo sapiens
gtcagtcgcgagcgaacgaccaagagggtgttcgactgctagagccgagcgaagcgatgcctaaatcaaaggaacttgtttcttcaggctcttctggcagtgattctgacagtgaggttgacaaaaagttaaagaggaaaaagcaagttgctccagaaaaacctgtaaagaaacaaaagacaggtgagacttcgagagccctgtcatcttctaaacagagcagcagcagcagagatgataacatgtttcagattgggaaaatgaggtacgttagtgttcgcgattttaaaggcaaagtgctaattgatattagagaatattggatggatcctgaaggtgaaatgaaaccaggaagaaaaggtatttctttaaatccagaacaatggagccagctgaaggaacagatttctgacattgatgatgcagtaagaaaactgtaaaattcgagccatataaataaaacctgtactgttctagttgttttaatctgtctttttacattagcttttgttttctaaatgttctccaagctattgtatgtttggattgcagaagaatttgtaagatgaatacttttttttaatgtgcattattaaaaatattgagtgaagctaattgtcaactttattaaggattactttgtctgcccaccacctagtgtaaaataaaatcaagtaatacaatcttaactgttgtggccttttttgatcataagagttggtactgtttaaggccaaaagtaacagtttttatagatcttttagtttcaactcagcttttacaataaaaaggatttgtattgcattgagtttataaacttttggtttgtgaacttcatatttgatcttttctcttccaatcaaatgtctaggcttgtttgacttccacccccaatggtttttcactctttttatttacttcattttcctttaataacttaatctcttcatgttcagtttttacttcactctttattcttttctttgattatggtatgcttatttggaaagtcagtgaaactgtcaaaatgttatctcaataagatacttatatgagaactacaatcaccgaatctactgtattcaatattagcagatctaatttgataaacaacatggcttgtgtgaaaactgagcaggtgtttgtttacccatagtgttctgtgtagttattgcttagtctgcagaaaataatgacttagatgagatgtctgacttgctttcacttattaaacatgttcaccatgggatgatgtctgtaacatcagatattgttcaactagactaggatttaataaaaattgtgaaagcttaaaaaaaaaaaaaaaaaaaaaaaa

SEQ ID NO: 954 - DNA, 4446 bp, Homo sapiens
cgcaccgccgccgaggacgcgcgcccgagcctagtccccacgccgcggcgcgcccgggctccctgctgatcccagaacaatcaaccatgacgaccgaatctggatcagactcggaatccaagccggaccaggaggccgagccccaggaggcggcgggggcgcaggggcgcgcgggggcgcccgtgccggagccgcccaaggaggagcagcagcaggccctggagcagttcgccgccgctgcagcgcacagcaccccggtgcggagggaggtcactgacaaggaacaggagtttgctgccagggctgcaaaacagctcgaatatcagcaattagaagacgataaactttctcagaaatcatctagcagtaaactctctcggtctccattaaagattgtcaaaaagcctaaaagcatgcagtgcaaagtgatacttctcgatggatcagaatatacctgtgatgtagagaaacgctccagaggacaagtgctgtttgataaagtgtgtgaacacttgaacttgctagagaaagactactttgggcttacgtatcgagatgctgaaaaccagaagaattggttggaccctgctaaggaaataaaaaaacaggttcgaagtggtgcttggcacttttcatttaatgtgaaattttatccaccagaccctgcccaactatctgaagatatcaccaggtactacctctgcttgcagttgcgagatgacatcgtgtccggaaggctgccctgctcctttgttaccctggccttgctgggctcctacactgtccagtcagagctcggagactatgacccagatgaatgtgggagcgattacattagtgagttccgctttgcaccaaaccacactaaagaactggaagacaaagtgatcgagctgcacaagagccacagaggaatgacgccagcagaagcagagatgcatttcttggaaaatgccaaaaaattatcaatgtatggggtagatttacatcatgctaaggactcagaaggggtagaaattatgttaggagtttgtgcaagtggtctgttgatatatcgcgaccggctgcgaataaacagatttgcctggcccaaggttctaaagatttcatacaaacggaacaacttttacattaagatccggccgggagagtttgaacaatttgaaagcaccattgggtttaagctgccaaaccatcgagctgccaagcgtttatggaaagtatgtgttgagcatcatacatttttcagactactgttaccagaagcacctcccaagaaattcctaaccttgggttccaagtttcgttatagtggcaggacacaagcgcaaacgagaagagccagtgcgttgatagatcgcccagcaccttactttgaacgctcatccagcaaacgttataccatgtctcgcagcttggatggagaggttggtactggccagtacgccacaacaaaaggcatctctcagaccaacttgatcaccactgtgactccggagaagaaggctgaggaggagcgggacgaggaagaggacaaacggaggaagggggaagaagtcacgcccatctcggccatccggcacgagggaaagtcacctgggcttggcactgactcatgtcccttgtcacccccatccacccattgtgcccccacatctcccacagagctccgtaggaggtgtaaggagaatgactgcaaactgccaggttatgagccgtccagagctgagcacctgcctggagagcccgccttggactctgatggcccagggaggccttacctaggggatcaagatgtggcttttagctacagacagcaaactggcaaggggaccaccctgttctccttctccttgcagctccctgagtcattcccctccctcctagatgatgatggatacctctctttccccaacctttctgaaaccaacctcctgccccagagcttgcagcattacctcccgatccgctcaccgtcccttgtgccctgtttcctcttcatctttttctttctgctgtctgcctccttctcagtgccatacgctctcactctctccttccctctggctctgtgcctctgctacctggagcccaaggcggcctccttgagcgcctccctagacaatgacccgagtgacagttcagaggaagagactgacagtgagcgcacggacaccgcagccgacggggagaccaccgccactgagtcggaccaggaggaagatgcagagctcaaggcacaggagctagaaaaaactcaagatgacctgatgaaacatcaaaccaacattagcgagctgaaaagaaccttcttagaaacctcaacagacactgccgtaacgaatgaatgggagaagaggctttccacctcccccgtgcgactggccgccaggcaggaggatgcccccatgatcgaaccacttgtccctgaagagactaagcagtcttctggggaaaagctcatggatggctctgaaatcttcagtttattagagtctgcgcgaaaaccaacagaattcataggaggggttacttctacttctcaaagctgggttcagaaaatggaaaccaagacggagtccagtggaatagagacggaacccaccgtgcaccacctgccgcttagcactgagaaggtggtgcaggagaccgtgttggtggaggagcggcgtgtggtgcacgcgagtggggatgcttcttactcggcgggagacagcggggatgctgcagcacagcccgcattcacaggcattaaagggaaagagggctctgccttgacggagggggctaaagaggaaggaggggaggaggtcgctaaagctgtcctggaacaggaagagacagccgctgcttcccgtgagcgacaagaggagcagagtgcagccatccacatttcagaaactttggaacaaaaacctcattttgagtcctcaacggtgaagacggaaaccatcagttttggcagtgtttcaccgggaggagtaaagctagaaatttccacgaaggaagtgccagtagttcacaccgaaaccaaaaccatcacatatgaatcatcacaggtcgatccaggcacagatctggagccaggcgtgctgatgagtgcacagacgatcacatctgaaaccaccagtaccaccaccactacgcacatcaccaaaactgtgaaagggggcatttcagagacaagaattgagaagcgaatagtcatcacgggggatgcagacattgaccatgaccaggcgctggctcaggcaattaaagaggccaaagagcagcaccctgacatgtcagtgaccaaagtagtggtccataaagagacagagatcacaccagaagatggagaggattgaccagaggaataacttagcttgcacatgaatgcagtcatgcaaaccgttaggaaaaccagagcctatatggagttccctcttctaacccaactgacttgtatctgtccgtggaaaatttcagtccagaagaattgaccttgaccattaataaagacactggcagagagatcttcccataataaagcaatctgattcagcatcactaaaccgataatgcatgaagcaacgataaaattacaaaagagcagcatttttaattttcacaaaatgtctcagttttcagctatacctgcacgttcataaccaacaatataaaccgtggtctcatgtaacacataaacaattcatgcctttcatagtttattattattaaagtctaaacaaaattgcaatttcttaggtaaccttatatttacaataaatgaagattaccctcaaatgctagaagctgtctaggtccgtccggtgtgtcagattttcctcagattagatgtgccaataaccaagtttattcagtaaacaacttgtacttgtttcatctggttttattactctcacccataaacagtaatgactctctgaccctctggaaatatgtaatgcttccaatcttgctttgtgtatctcatttaatttgttataaggtagtactgattttagcatattaatgcgatttcttccttgttgtttgctttggtctgtgttcaatccagagagcttaaattgtcattattttgggaagaaaacctgtatttttgttagtttacaatattatgaaatttcacttcaggagaaactgctgggcttcctgtggctttgttttcttagttactttttccgtgccgtgtattttttaattgatttttcttcttttacttgaaaagaaagtgttttattttcaaatctggtccatatttacattctagttcagagccaagccttaaactgtacagaatttccactgtaattaaaactatttagtgttagttataaatagccttcaaaaagagagattctccattacacgatcacctgcatcacagcccatggtgaatgtatgtttctgcatagcgaaataaaaatggcaaatgcactg

SEQ ID NO: 955 - DNA, 3198 bp, Homo sapiens
ggagggcttaaggaagtaaaatggcggacctggcgaacgaagaaaagcctgccattgctccgcccgtctttgtgtttcagaaggataaaggacaaaagtcccctgcagagcaaaaaaacttgtcggattcgggagaggagcctcggggggaggctgaggccccccaccatggcacgggtcaccccgagtcagctggcgagcatgccctagaacctcctgcccctgctggcgcctcagccagcactcctccgcctcccgctcctgaagcccagcttcctccttttccgcgagaactggcagggaggtcagctggcggctccagtcctgaaggcggagaagattctgacagagaagatggaaattactgccctcctgtcaagcgagaaagaacatcctctttaacccagttcccaccctcacagtcagaggaaaggagcagtggcttccggttgaagccaccaacgctgatccacggccaagcccccagcgcaggtctgccaagccagaagcccaaggagcagcagcggagcgtgcttcgcccggcagtgttacaagctccgcagccaaaggcgctgtcccagactgtccccagcagtggcaccaacggggtcagcctcccagcagactgcacgggggcagtgcccgcagcatcccctgacactgctgcatggagaagtccttccgaagctgccgatgaggagaaagagccccagaaaaatgagtccagcaatgcctctgaagaggaagcctgtgagaaaaaagaccccgccacacagcaagcctttgtatttgggcagaacttgagggacagagttaagctgataaatgagagcgtggacgaagccgacatggagaatgctggacaccccagcgcagacacgccaaccgcaacgaactatttcctccagtatatcagttccagtttagagaactcaaccaatagtgccgacgcctccagcaacaaatttgtatttggccagaacatgagcgagcgagttttgagccccccaaaattaaacgaggtcagttcagatgccaacagggaaaatgcagctgccgagtcagggtctgagtcctcgtcccaggaggccacccctgagaaagggtccctggctgagtcggcagccgcctacaccaaggcaacagcgcggaagtgtttgttggaaaaagtggaagtcatcaccggggaggaggcggagagcaatgtgttacagatgcagtgcaagctgtttgtctttgacaagacctcacagtcctgggtggagagaggccgggggctgctcagactcaatgacatggcgtccaccgatgacggcacactacagtcccgactagtgatgcggacccaggggagcctgcgactgatcctcaacaccaagctgtgggcccagatgcagatcgacaaggccagcgagaagagcattcgcatcacagccatggacaccgaggaccagggcgtgaaggtcttcctgatctcggccagctccaaggacacaggtcagttgtatgcagccctgcaccaccgcatcctggccctgcgcagccgcgtggagcaggagcaggaggccaagatgcccgcgcctgagcctggggcagccccatccaacgaggaggacgacagcgacgatgacgatgtcctggctccttcaggggccaccgcagctggtgctggtgacgaaggggacgggcagacgaccgggagcacatagcggccgggagcccggctgcacaccaggctgctgctttgtccgtctatccacccgcccacccgcccccaccccaccggcagcgtccaggtgcggggccgggaaccacacaccccactgggccggccacagtctggacccgcacgtcctgttcaaaagcagactcgggaactgcctgaatgtggtttgggacacgagacctcatcatattgatgagcgaacaaacaagaacatttcctccctcccctcctttgaattgaaatggcacattaagacttgtcacggcttctcactgggactggagacctcgttccttcaccccgcgtgtcgccagcctctgggtccagccagagcccctggcttctccgccacccacacccttcccaccctgctgtggggccctgcctttgtggggagcagccagccctctgcccctgcccagggctccccaactataggcctgggacccccgcccagcttggggggctgctcgtacgagtgtagacactgggcccattggacgtgctgttaactactatcttcatttcccacttcccctctctgattgggggtgtatattttacatctttttttctttttattttcgaaggctttgttttggtttcttaggttaagatgctctcgagcgttgagcaggcacagctctgtcgaggtccctgtcccccacctgtggttctggcctctgaggttgggggactacttgtttcccaccccaggttcctccaggccaagtcatggggtgatgaggagttggggccctgtctgtcctaggcctggagagtgcctgtctgggaaaaggtcactggacctggaagggtccccagggtcccctgactcccgtctccatctgtcacgtggttcaccatcatcaggcaccaggcgcaaactgcttcccgctgttggccatcccttccccagccacaggtgtccctgcccccaggacagtccagggccaggggcttctgtgagaggcagagggggaccctcaccaaatcttggtggaagagcccaggggctggtcccagaacaggcagtctcacaagcacgcagcacactggagtggacgcctgtgcccacccgagcctggagcatggccaagagccagcttgcaccacccacctgggaggccgaggaggaggtcccctgggcacagggcctctttgggacttcagaggaaatctcccagtcccactctcggagggttaagagaaggcctcctgcagctgtgccgtccacacctctaggtcgccagagccctgcccccagcccccagcaagcctgagcccgggaagaaccagaggccctcccgagagacccagtcacacgtctctgctttaagccttagccagctagtgacgagtacaacgagataacgcccatgtgttttggaacatttatgtaagattgtcatatgaaatgtatttgggaactacattaaacttttaactaaaaaaaaaaaaaaaaaaaaaaa

SEQ ID NO: 956 - DNA, 1868 bp, Homo sapiens
ggagggcttaaggaagtaaaatggcggacctggcgaacgaagaaaagcctgccattgctccgcccgtctttgtgtttcagaaggataaaggacaaaagaggtcagctggcggctccagtcctgaaggcggagaagattctgacagagaagatggaaattactgccctcctgtcaagcgagaaagaacatcctctttaacccagttcccaccctcacagtcagaggaaaggagcagtggcttccggttgaagccaccaacgctgatccacggccaagcccccagcgcaggtctgccaagccagaagcccaaggagcagcagcggagcgtgcttcgcccggcagtgttacaagctccgcagccaaaggcgctgtcccagactgtccccagcagtggcaccaacggggtcagcctcccagcagactgcacgggggcagtgcccgcagcatcccctgacactgctgcatggagaagtccttccgaagctgccgatgaggtgtgtgcacttgaggagaaagagccccagaaaaatgagtccagcaatgcctctgaagaggaagcctgtgagaaaaaagaccccgccacacagcaagcctttgtatttgggcagaacttgagggacagagttaagctgataaatgagagcgtggacgaagccgacatggagaatgctggacaccccagcgcagacacgccaaccgcaacgaactatttcctccagtatatcagttccagtttagagaactcaaccaatagtgccgacgcctccagcaacaaatttgtatttggccagaacatgagcgagcgagttttgagccccccaaaattaaacgaggtcagttcagatgccaacagggaaaatgcagctgccgagtcagggtctgagtccccgttccaggaggccacccctgagaaagagtccctggctgagtcggcagccgcctacaccaaggcaacagcgcggaagtgtttgttggaaaaagtggaagtcatcaccggggaggaggcggagagcaatgtgttacagatgcagtgcaagctgtttgtctttgacaagacctcacagtcctgggtggagagaggccgggggctgctcagactcaatgacatggcgtccaccgatgacggcacactacagtcccgactagtgatgcggacccaggggagcctgcgactgatcctcaacaccaagctgtgggcccagatgcagatcgacaaggccagcgagaagagcattcgcatcacagccatggacaccgaggaccagggcgtgaaggtcttcctgatctcggccagctccaaggacacaggtcagttgtatgcagccctgcaccaccgcatcctggccctgcgcagccgcgtggagcaggagcaggaggccaagatgcccgcgcctgagcctggggcagccccatccaacgaggaggacgacagcgacgatgacgatgtcctggctccttcaggggccaccgcagctggtgctggtgacgaaggggacgggcagacgaccgggagcacatagcggccgggagcccggctgcacaccaggctgctgctttgtccgtctatccacccgcccacccgcccccaccccaccggcagcgtccaggtgcggggccgggaaccacacaccccactgggccggccacagtctggacccgcacgtcctgttcaaaagcagactcgggaactgcctgaatgtggtttgggacacgagacctcatcatattgatgagcgaacaaacaagaacatttcctccctcccctcctttgaattgaaatggcacattaagacttgtcacggcttctcactgggactggagacctcgttccttcaccctgcgtgtcgccagcctctgggcaaaaaaaa

SEQ ID NO: 957 - DNA, 2672 bp, Homo sapiens
tctagaaagatcacttgtaacttgacccacgagccctggaaagttcctttaaagagaggctgtctgagcagggaggttgggacccctgactgtgagcgtcgtgtgttcagaaaagtgggcagtggtggcacgggagcaggctaggcggggtgcatcgggcgggctccatgcccagcagtagcgcacttggttcagcctgtctgtccttcatgttctggcccccacataccacagtgttcgccccagttagcagggtggctgcattccagcggcgcgctgctagtgagccggctgctagtgaggctgccggggatgctgcacagggcagggcacatgcaagggtccttgtcccatctgcctttggcagagggacttcctcagcatggctgttttgaaaaacaggtgcaaaatgtgcctgtacgtgaccccacaccgagtcctgagcctccaggtagctgcctgtgaatgcactgctctcctcccacagtctccacttgactgttgagtctgccggcgccccgccacgttactgtgctaactggattaattcacaggcgtcggtcactgggagtttcatgtaatcacatgtaaaaataacagtagccagatctcctggccagctgttaaaaaaagacctcaagtttttaaaaaagtgcttccctgcaaagtctagcctgcaaggggcatgaaatgggatgccaggggtcagtctctgaagcgcctgggggcaggcaggggtccacgggcactgggaaggccgccttctgttcctaggtctgccaagccagaagcccaaggagcagcagcggagcgtgcttcgcccggcagtgttacaagctccgcagccaaaggcgctgtcccagactgtccccagcagtggcaccaacggggtcagcctcccagcagactgcacgggggcagtgcccgcagcatcccctgacactgctgcatggagaagtccttccgaagctgccgatgaggtgtgtgcacttgaggagaaagagccccagaaaaatgagtccagcaatgcctctgaagaggaagcctgtgagaaaaaagaccccgccacacagcaagcctttgtatttgggcagaacttgagggacagagttaagctgataaatgagagcgtggacgaagccgacatggagaatgctggacaccccagcgcagacacgccaaccgcaacgaactatttcctccagtatatcagttccaggtgtgtgtctcggtgtcagcggccagcctggcatggcgatgcaggtggccgcgagggcttctgccagagaggggtctgtggtccccgtgcccgactcaggcccagaatccaggttgctctcaggcccctctctctcattccccactctgggcacaaccttgggtgggccagggtggtgggccttgtcctgggattcactggacgcctgagacaggaccagagttctgtggggttgtccaggggcccatggaggctacagcccagcccttggagtgtgccctctgtcttgtggacctcatgcccagagcagaacagacgaggccagaggcgactcaggcgcccccttattctgggtttgggcacctggggcaaagacctcatcatgtccttgactgacatggctgggggtaaagctacccacggaccagctgcccctccaggtgtctcagaagaaagcgtgtcccgactgggagatgggcgggtagagcaggtggaaggtggcttccctcatgctgtggggcccctccatcagggcgagctaagggttaatgttttcaatggcacagggaggtgtgtggcttcctgcctctgacacgccaccccgtgcacagtggcggaggcccctccactgtgccctctgtgtcagtgtgtgctccatgggtacccatacatttgcctggccacgttcccacgtgacgcccacactcattgcacatcttctcttcagtttagagaactcaaccaatagtgccgacgcctccagcaacaaatttgtatttggccagaacatgagcgagcgagttttgagccccccaaaattaaacgaggtcagttcagatgccaacagggaaaatgcagctgccgagtcagggtctgagtcctcgtcccaggaggccacccctgagaaagagtccctggctgagtcggcagccgcctacaccaaggcaacagcgcggaagtgtttgttggaaaaagtggaagtcatcaccggggaggaggcggagagcaatgtgttacagatgcagtgcaagctgtttgtctttgacaagacctcacagtcctgggtggagagaggccgggggctgctcagactcaatgacatggcgtccaccgatgacggcacactacagtcccgactaggtgagctgccgacggcgggggctgtggccgggtccccatggggagggctggggactatgcaattccaaagggaatgaagcgggggagatcctgaccctacccttgtgagagtcaaggcacagagtcggtctcccatgagagccgccccccaaacccccctccctgcacccagccctcaacaccaccctcacacactggctccagctgccagctcgtccgtgaccctcttagtgtcaaaatggacaaaagtctatggaagtttttaagctgattttctgacaaagtggcaggtttatgataaaaaaaaaaaaaa

SEQ ID NO: 958 - DNA, 2439 bp, Homo sapiens
aggaagtaaaatggcggacctggcgaacgaagaaaagcctgccattgctccgcccgtctttgtgtttcagaaggataaaggacaaaagtcccctgcagagcaaaaaaacttgtcggattcgggagaggagcctcggggggaggctgaggccccccaccatggcacgggtcaccccgagtcagctggcgagcatgccctagaacctcctgcccctgctggcgcctcagccagcactcctccgcctcccgctcctgaagcccagcttcctccttttccgcgagaactggcagggaggtcagctggcggctccagtcctgaaggcggagaagattctgacagagaagatggaaattactgccctcctgtcaagcgagaaagaacatcctctttaacccagttcccaccctcacagtcagaggaaaggagcagtggcttccggttgaagccaccaacgctgatccacggccaagcccccagcgcaggtctgccaagccagaagcccaaggagcagcagcggagcgtgcttcgcccggcagtgttacaagctccgcagccaaaggcgctgtcccagactgtccccagcagtggcaccaacggggtcagcctcccagcagactgcacgggggcagtgcccgcagcatcccctgacactgctgcatggagaagtccttccgaagctgccgatgaggtgtgtgcacttgaggagaaagagccccagaaaaatgagtccagcaatgcctctgaagaggaagcctgtgagaaaaaagaccccgccacacagcaagcctttgtatttgggcagaacttgagggacagagttaagctgataaatgagagcgtggacgaagccgacatggagaatgctggacaccccagcgcagacacgccaaccgcaacgaactatttcctccagtatatcagttccagtttagagaactcaaccaatagtgccgacgcctccagcaacaaatttgtatttggccagaacatgagcgagcgagttttgagccccccaaaattaaacgaggtcagttcagatgccaacagggaaaatgcagctgccgagtcagggtctgagtcctcgtcccaggaggccacccctgagaaagagtccctggctgagtcggcagccgcctacaccaaggcaacagcgcggaagtgtttgttggaaaaagtggaagtcatcaccggggaggaggcggagagcaatgtgttacagatgcagtgcaagctgtttgtctttgacaagacctcacagtcctgggtggagagaggccgggggctgctcagactcaatgacatggcgtccaccgatgacggcacactacagtcccgactagtgatgcggacccaggggagcctgcgactgatcctcaacaccaagctgtgggcccagatgcagatcgacaaggccagcgagaagagcattcgcatcacagccatggacaccgaggaccagggcgtgaaggtcttcctgatctcggccagctccaaggacacaggtcagttgtatgcagccctgcaccaccgcatcctggccctgcgcagccgcgtggagcaggagcaggaggccaagatgcccgcgcctgagcctggggcagccccatccaacgaggaggacgacagcgacgatgacgatgtcctggctccttcaggggccaccgcagctggtgctggtgacgaaggggacgggcagacgaccgggagcacatagcggccgggagcccggctgcacaccaggctgctgctttgtccgtctatccacccgcccacccgcccccaccccaccggcagcgtccaggtgcggggccgggaaccacacaccccactgggccggccacagtctggacccgcacgtcctgttcaaaagcagactcgggaactgcctgaatgtggtttgggacacgagacctcatcatattgatgagcgaacaaacaagaacatttcctccctcccctcctttgaattgaaatggcacattaagacttgtcacggcttctcactgggactggagacctcgttccttcaccccgcgtgtcgccagcctctgggtccagccagagcccctggcttctccgccacccacacccttcccaccctgctgtggggccctgcctttgtggggagcagccagccctctgcccctgcccagggctccccaactataggcctgggacccccgcccagcttggggggctgctcgtacgagtgtagacactgggcccattggacgtgctgttaactactatcttcatttcccacttcccctctctgattgggggtgtatattttacatctttttttctttttattttcgaaaaaaaaaaaaaaaaaaaaaaaaaaaaaaaaaaaaaaaaaaaaaaaaaaaaaaaaaaaaaaaaaaaaaaaaaaaaaaaaaaaaaaaaaaaaaaaaaaaaaaaaaaaaaaaaaaaaaaaaa

SEQ ID NO: 959 - DNA, 1828 bp, Homo sapiens
gcggccgcatgagccgcgcgcgtggggcgctgtgccgggcctgcctcgcgctggccgcggccctggccgcgctgctgttactgccgctgccgctgccccgcgcgcccgccccggcccggacccccgccccggccccgcgcgcgcccccgtcccggcccgctgcccccagcctgcggcctgacgacgtcttcatcgccgtcaagaccacccggaagaaccacgggccgcgcctgcggctgctgctgcgcacctggatctcccgggcccgccagcagacgtttatcttcaccgacggggacgaccctgagctcgagctccagggcggcgaccgtgtcatcaacaccaactgctcggcggtgcgcactcgtcaggccctctgctgcaagatgtccgtggagtatgacaagttcattgagtccgggcgcaagtggttttgccacgtggatgatgacaattatgtgaacgccaggagcctcctgcacctgctctccagcttctcacccagccaggacgtctacctggggcggcccagcctggaccaccccattgaggccaccgagagggtccagggtggcagaactgtgaccacggtcaagttctggtttgctactggtggggccgggttctgcctcagcagaggccttgccctcaagatgagcccatgggccagcctgggcagcttcatgagcacagctgagcaggtgcggctgccggatgactgcacagttggctacatcgtggaggggctcctgggcgcccgcctgctgcacagccccctcttccactctcacctggagaacctgcagaggctgccgcccgacaccctgctccagcaggttaccttgagccatgggggtcctgagaacccacataacgtggtgaacgtggctggaggcttcagcctgcatcaagaccccacacggtttaagtctatccattgtcttctgtacccagacacggactggtgtcccaggcagaaacagggcgccccgacctctcggtgacaccaaccaccccgacccagggctgcctggctctgtcccaggcgcggggaaccagagccccctatgggctcagtgggctccctcaggtgccacggccacaccagtgagatgcaggcacctggcagaccctctggctagcctgcagccccccctctcccagcccctggtgggctgcggtgatgggtgttttgggagaacgaagacagccaggctgatggccagggccgcagtgcccctccccccgacccagccccaaggttgatcccacgggaacaggcttccaccccagcacttgcgcacctgggagggagctgccatccgggctccattacctgttgctgaaggcgggtgctaggctggctgggtgtcaaggagcaggctccaggccaaggtcctggcccagccacggccattgcaagggctcagcctggcaggctttgtgggggacgccgccctctctgccgcaggctgggtgcacggccgggcaccacagtgggactcaggcccgggaaggtcatgttctcgaccagagctttgctcccagtccaggcgcctcattcggaggcctcttgactgggaccacagagatgttttctccgctctgacttgtggctcaggactactttctgggtcgtgctcctgccccactgtgcctgggcccataaacaacaggagccttttgttccgctgacctgcccatcccagcagacccacctccccgcctggtgccttccatggagggaaatgggacaggggccgtcatctcccctctgcctcctgctttgctgttgccgagcacgagtaaagcttttgttcttacttca

SEQ ID NO: 960 - DNA, 831 bp, Homo sapiens
ccatcttccggtctcctcagaagtcgcttagctcttcggtggttgtcccacgtccggaggcctagccgtcgcttacctaggatgccgcgtggaagccgaagccgcacctcccgcatggcccctccggccagccgggcccctcagatgagagctgcacccaggccagcaccagtcgctcagccaccagcagcggcacccccatctgcagttggctcttctgctgctgcgccccggcagccaggtctgatggcccagatggcaaccactgcagctggcgtggctgtgggctctgctgtggggcacacattgggtcacgccattactgggggcttcagtggaggaagtaatgctgagcctgcgaggcctgacatcacttaccaggagcctcagggaacccagccagcacagcagcagcagccttgcctctatgagatcaaacagtttctggagtgtgcccagaaccagggtgacatcaagctctgtgagggtttcaatgaggtgctgaaacagtgccgacttgcaaacggattggcctaatgaagaagttcaacctggagagatggaaaatcagctctcataactaagttaatttagtataaaaatagaattgatagtgagggtataaagtgtaaccatcagttaaacctctcctgtcattcctggcttccttgcttcagaattgaaatggaagtgggggtgtccctactctgtagaatctgggactgggcaaatgtttgtgtggcctccttaaactagctgttatgttatgattttattctttgtgagttaattagaataaagtcattttcttccaaaaaaaaaaaaaaaaaa

SEQ ID NO: 961 - DNA, 609 bp, Homo sapiens
atggcggcgccttggaggcgatggcccacggggctgctagccgtgctgcggcccctgctcacctgccggcccctgcaaggcacgacgctgcaacgggatgtgctgctctttgagcatgatcggggccgcttcttcaccatcctcgggctgttctgcgcgggccagggcgtcttctgggcttccatggctgtggcagccgtgtcccggcccccggttccggtgcagcctctggatgcggaggtcccaaatcgtggccccttcgacctgcgctccgcgctctggcgctacggtctggccgtcggctgcggcgccatcggagccctcgtactcggtgctggtcttctcttctctctccggtctgtgcgctcagtggtgcttcgagctggagggcagcaggtgaccctcaccactcatgccccctttggcttgggggcccatttcacagttcctttgaagcaggtatcttgcatggcccaccggggtgaagtccctgccatgctacctctgaaagtcaaaggccgacgcttctatttcctcttggacaaaactggacacttccctaacacaaaactctttgacaatactgtgggtgcctaccggagcttgtga

SEQ ID NO: 962 - DNA, 609 bp, Homo sapiens; identical to SEQ ID NO: 961

SEQ ID NO: 963 - DNA, 668 bp, Homo sapiens
gcagcaagatggcggcggtctcaatgtcagtggtactgaggcagacgttgtggcggagaagggcagtggctgtagctgccctttccgtttccagggttccgaccaggtcgttgaggacttccacatggagattggcacaggaccagactcaagacacacaactcataacagttgatgaaaaattggatatcactactttaactggcgttccagaagagcatataaaaactagaaaagtcaggatctttgttcctgctcgcaataacatgcagtctggagtaaacaacacaaagaaatggaagatggagtttgataccagggagcgatgggaaaatcctttgatgggttgggcatcaacggctgatcccttatccaacatggttctaaccttcagtactaaagaagatgcagtttcctttgcagaaaaaaatggatggagctatgacattgaagagaggaaggttccaaaacccaagtccaagtcttatggtgcaaacttttcttggaacaaaagaacaagagtatccacaaaataggttggcactgactatatctctgcttgactgtgaataaagtcagctatgcagtatttatagtccatgtataataaatacatctcttaatctcctaataaattggacctttaaactacaaaaaaaaaaaaaaaa

SEQ ID NO: 964 - DNA, 3686 bp, Homo sapiens
ttcagaggctgcgtctttcaggaggccagccaccattggttcaggcaatcttcagcggtgatccagaggagatccggatgctcatccataaaactgaagatgtgaatactctggattctgagaaacgaacccctcttcatgtggccgcatttctgggagatgcagagatcattgaactcctgattttgtcaggagctcgtgtaaatgccaaggacaacatgtggctgactccactgcaccgggctgttgcttccagaagtgaagaagcagtacaggttttgattaagcactcagctgatgtcaatgcaagggacaagaactggcagacccctcttcatgtggcagcagccaacaaggctgtcaaatgtgcagaagtgatcattcccctgctgagcagtgtcaatgtctccgaccgaggggggcgcacagccttgcaccatgcggctctgaacggccacgtggagatggtcaatttactcttggccaaaggggcaaatatcaatgcatttgacaagaaggaccggcgtgctctgcactgggcagcatacatgggccacttggatgttgtagcattgctcattaaccatggcgcagaagtgacctgtaaggataagaagggttatacccctctgcatgctgcagcctccaatggacagattaatgttgtcaagcatctcctgaacctgggggtggagattgatgaaatcaatgtctatggaaatacagcgcttcacatcgcctgctacaatggacaggatgctgtggttaacgagttgattgactacggtgctaacgtgaaccagccaaacaataatgggttcacccctttgcattttgctgctgcctccactcatggtgctttgtgtcttgaattgttagtaaacaacggggcagatgttaacattcagagtaaagatggcaaaagtccactgcacatgacagctgtccatggaaggttcacacggtcacagaccctcattcagaatggaggtgaaattgactgtgtggataaggacggcaacactcctctccatgtggctgcaagatacggtcatgagcttttgattaacaccttaagaaccagcggagctgacacagccaagtgtggaatccatagcatgttccctttacatttagctgccctaaatgctcactctgactgctgcagaaagttgttatcatcgggctttgaaatagacaccccagataaatttggaagaacgtgccttcatgctgctgctgcaggaggtaatgtggaatgtataaaactcttgcagagcagcggagcagatttccataaaaaggacaagtgtgggaggacccctttgcactatgcagctgcgaattgtcatttccactgtattgagacattagtgaccacaggggccaacgttaatgaaacagatgactggggacgcacagctttgcattacgccgctgcatcagacatggatagaaataagactatcttaggaaatgcccatgataattcagaagaacttgaaagagccagggagctgaaggaaaaggaagccacactatgtctagagtttctgcttcaaaatgatgcaaatccatctatccgggacaaggaaggttacaatagcatacattatgctgccgcctatgggcacaggcagtgtctggaattgcttttggaaagaacaaacagtggatttgaagaatcagattctggtgctactaagagtccactccacttagctgcctacaatgggcaccatcaagccttggaagtccttctgcagtcgttggtggacctggacatcagggatgagaaaggccgcactgctctggatctggctgcctttaaaggacacacagaatgtgtggaagcgcttatcaatccgggcgcatccatctttgtgaaagacaatgtaaccaaaagaaccccacttcatgcctcagtaattaatggtcacacactgtgtttacggctgttgctagaaattgcagacaacccggaggcggtcgatgtgaaagatgccaaaggacaaacaccactgatgcttgcagtagcatatggacatattgacgctgtttcattgttacttgaaaaggaagccaacgtagacactgttgacatcctaggatgcacagctttacacagagggattatgacaggacacgaggaatgtgtgcaaatgctgctggaacaagaagtgtcaattctctgtaaagattccagagggaggacgcccttgcactatgcagctgctcgtggccacgccacgtggctgagcgagctgctccaaatggctctttctgaggaggactgttgtttcaaagataaccaaggctacacgccgctgcactgggcttgttacaatggtaatgaaaactgtatagaggtacttttggagcaaaaatgttttcgcaaatttatcggtaatccctttactccactgcactgtgcaataatcaatgatcatgggaattgtgcatcattgctgcttggggccatagattccagtatcgtcagttgtagagatgacaaaggcaggacaccccttcgtgcggcagcatttgctgatcatgtggagtgcttgcagcttcttctgagacacagtgctccagtgaacgcagtagataattcagggaaaacagcactgatgatggctgctgagaatgggcaggcaggcgctgtggatattttggtgaacagtgcccaggctgatctgactgtaaaggataaggacttgaatacacccttacatttggcttgtagtaaaggtcatgaaaaatgtgccttgttaatacttgacaagatacaagacgagagccttattaatgaaaaaaataatgcactgcagacgtaagtgtaactactaaagttggacttgaacccagggtcatagtcatttattcaataagtattaagagcctgctgtgtgccagactagctctggggagcacagtggtgaaagatgcagtcctggcttcccctgcatgaaggtgacagtcacatacctacaagtgctgaccaagctgggcagttttagttagaatcctccttttgatatgtcttcatttaattttgtgaagtctctgtttttctttgctgatatttctggggtaatattataaatttagtgggctgttagaaaaattttatggactgacatatttggggaaactatttgtattatgtattagcattatgtattctgactggaaaatgacagttttgcaaatcaggttcccagaatacatttgaagagtttctaagctatttgtcttgattatattttaatataattcagtgtaacccttggtgtgaaagatctaaaagctgtttcattttccgctttaggaaattatttatgcatttgttttaaaggcaaaggaatttttttcatttaagattcttaagccgggcgtggtggctcatgcctttaatcccagcactttgggaggccgaggcagttggattacttgaggccaggagttcatgacccgcctggccaacatggtgaaaccccgtctctactaaaaatacaacaacaacaaaattagctgggcatgatggtgggtgcctgtaacctcagctacttgggaggctgaggcaggagaatcacttgaacctgggaggtggaggttgctgtgagctgagatcgtgccactgcaccactccagcctgggcaacaagagcgagactgtccccccac

SEQ ID NO: 965 - DNA, 3377 bp, Homo sapiens
gtcggaagatcctagaggtcccaaggtagctgacctgcgaagctgaggctccagccgagggctccaggcctctgaccggcccagcagtgagcgcggctgcccgacgcttcagggccgggagcagggagcgtgagtcgccatggcgacgccggcgggtctggagcgctgggttcaggacgagctgcactcggtgttggggctgagcgagcggcacgtcgcccagtttctgatcggtaccgcacagcgctgcacctctgccgaggagttcgtgcagcgcctacgagacactgataccttggatctcagtgggccggcccgggacttcgccctgagactctggaacaaggtaccacgaaaggcagtggtagaaaagccagctcgggcagcagagcgagaggcccgggccctgctggagaagaaccgatcttataggttactggaagacagtgaagagagcagtgaggagactgtgagtagggctggaagcagcctccagaagaaacgtaaaaagcggaaacacctcaggaagaagcgtgaggaagaagaggaggaagaggcttctgagaaagggaagaagaaaacaggggggagtaaacagcagacagagaagccagagtcggaagatgagtgggaacggacagagcgtgaacgccttcaggacctggaggagcgtgatgcctttgctgagcgggttcgacagcgggacaaggatcggactcgaaatgtcctggaacggtcagacaagaaggcttatgaagaggctcagaagcgcctcaagatggccgaggaagaccggaaggccatgatccctgagctgcggaagaaatctcgccgagagtacctggctaagcgggagcgagagaagcttgaggacctggaggcggagctggctgatgaggagttcctttttggggacgtggagctgagccggcacgagcggcaggagctcaaatataagcggcgagtgcgggatctcgcccgggagtaccgggcagctggggagcaggagaagctggaggccaccaatcgctaccacatgcccaaggaaacccgaggacagccagcccgagctgtggatctagtggaggaggaatcaggagcccctggggaggagcagcggcgctgggaggaggcgcggcttggggcagcgtccctgaagtttggggcccgagatgctgcctctcaggagcccaagtatcaactggtgctggaggaggaggagaccattgagtttgtccgggccactcagctccagggtgatgaggagccgtcagctccacccacttcaactcaggcccagcagaaagagtccatccaggccgtccgccgcagcctcccggtgttcccatttcgagaggagctcctggctgctattgcaaatcaccaagtcctcatcattgaaggcgagacaggctcagggaagaccacccagatcccgcagtatctctttgaggagggttatacaaacaagggtatgaagattgcctgcacccaaccccggagagtggctgccatgagtgtggccgcccgagtggcccgggagatgggtgtgaagcttgggaatgaggttggctacagcatccgctttgaggactgcacatcagagcgaactgtcctccgctacatgacagatgggatgcttctccgggagttcctctctgagcctgacctggcgagttacagcgtggtgatggtggatgaggcacacgaaaggaccctacacacagacattctctttggattgatcaaggatgttgctcgcttccgacctgagctcaaggtcctggtggcttcagccacaatggacactgcccgtttttccaccttctttgatgacgcccctgtgtttcgaatccccggacgcaggtttcctgtggacatcttctacaccaaggctccagaggctgactacttggaagcttgtgtagtatctgtgttgcagatccatgtgacccagccccctggggatatcctggtgttcctgacaggacaggaggagattgaggctgcctgtgagatgctccaggatccctgccgccgcctgggctccaaaatccgggagctcctggtgctgcccatttatgccaatctgccctctgacatgcaggcccgtatcttccagcccacaccacctggggcacgaaaggtggttgtggcaacgaacattgctgagacatcacccaccattgagggcatcatttatgtgctggatccagggttctgtaagcagaagagctacaacccccgcacaggcatggaatcgctcactgtcacaccctgcagcaaggcctcagccaatcagcgagctggcagggcaggtcgggtggctgcagggaagtgcttccgcctgtataccgcctgggcctatcagcacgagcttgaggaaaccacagtgcctgagatccagaggaccagcttgggcaatgtcgtgttgctgctcaagagcttagggatccatgacctaatgcactttgatttcctggaccctccaccatatgagacactgctgctgactttggagcagctgtatgctctgggagccctcaaccaccttggggagctcaccacgtctggtcgaaagatggcagagctgccggtggaccccatgctgtccaaaatgatcttagcctctgagaagtacagctgttcagaggagatcctgacagtggctgccatgctctctgtcaacaactccatcttctaccgaccaaaggacaaggtcgtccatgctgacaatgcccgtgtcaacttctttctccctggcggtgaccacctggttctgctaaatgtttacacacagtgggctgagagtggttactcttcccagtggtgctgtgagaactttgtacagttcagatcgatgcgccgagcccgggatgtgcgggaacagctggaagggctcttggaacgtgtggaagttggtctcagttcctgccagggggactatatccgtgtacgcaaggccatcactgctggttacttttaccacacggcacggttgactcggagtggctaccgcacagtgaaacagcagcagacagtcttcattcatcccaactcctccctctttgagcaacagccacgctggctgctctaccacgaacttgtcttgaccaccaaagagttcatgagacaggtactggagattgagagcagttggcttctggaggtggctccccattattataaggccaaggagctagaagatccccatgctaagaaaatgcccaaaaaaataggcaaaacacgagaagagctagggtaagagaaggacgcaaacagaacctgacaccagctccttttccttctatacattatttaatacctattaaataatattatttttggaataaagcttgtgggaacatttgggatct

SEQ ID NO: 966 - DNA, 1893 bp, Homo sapiens
attagacagcacactgctgactgttttcagttgtttctgtaacagcagaaagtgcactcactaggagtagtcagaattcaaaatgctcaagagaaagccatccaatgtttcagagaaggagaaacatcaaaaaccaaagcgaagcagcagttttgggaatttcgatcgttttcggaataattctttatcaaaaccagatgattcaactgaggcacatgaaggagatcccacaaatggaagtggagaacaaagtaaaacttcaaataatggaggcggtttgggtaaaaaaatgagagctatttcatggacaatgaagaaaaaagtgggtaaaaagtacatcaaagccctttctgaggaaaaggatgaggaagatggagagaatgcccacccatatagaaacagtgaccctgtgattgggacccacacagagaaggtgtccctcaaagccagtgactccatggatagtctctacagtggacagagctcatcaagtggcataacaagctgttcagatggtacaagtaaccgggacagctttcgactggatgacgatggcccctattcaggaccattctgtggccgtgccagagtgcatacggatttcacgccaagtccctatgacactgactccctcaaaatcaagaaaggagacatcatagacattatttgcaaaacaccaatggggatgtggacaggaatgttgaacaataaagtgggaaacttcaaattcatttatgtggatgtcatctcagaagaggaagcagcccccaagaaaataaaggcaaaccgaaggagtaacagcaaaaaatccaagactctgcaggagttcctagagaggattcatctgcaggaatacacctcaacacttttgctcaatggttatgagactctagaagatttaaaagatataaaagagagtcacctcattgaattaaatattgaaaacccagatgacagaagaaggttactatcagctgctgaaaacttccttgaagaagaaattattcaagagcaagaaaatgaacctgagcccctatccttgagctcagacatctccttaaataagtcacagttagatgactgcccaagggactctggttgctatatctcatcaggaaattcagataatggcaaagaggatctggagtctgaaaatctgtctgacatggtacataagattattatcacagagccaagtgactgaacacgcattcccaactatatatctacagatgcattccattttaactcttcttgagctaaaacgtcaaataggagaggaagataagataaatatttgtaaataaaacctaaagtttaaatgttttaatctgaataattgtacataaaattttgtatctctaacattccaaattactgtcaataaaatatatatttattattttaaatgctatgtgttaatatttcacttgcttgtattagaaaggcaaaatgtaagactttggtatgtgtgacatatgctttatttggctttattttacaagtacagtatctgcaaaaaacaaagtaaccttttttcatacctgccagttttgaatttatatatgttattgaacaaatagtaatagaggattcgctgttgaaacaagttgtccaagcaatgttatattcatttttatacttattgggaaagtgtgagttaatattggacacattttatcctgatccacagtggagttttagtaattatattttgttgatttcttcattttgttttctggtataaaagtagagataatgtgtagtcacttctgatttagtgaaaccaattgtaataattgtggaaatgttttgtctttaagtgtaaatattttaaaatttgacataccctaatgttaataataaaaagaactatttgcatattgcaaaaaa

SEQ ID NO: 967 - DNA, 3285 bp, Homo sapiens
ctagaattcagcggccgctgaattctagacccggatgaagagtaacgccattaccgcccgagccgccgagagccttagccgacggaaactggacactggaccggcagcgccatgagactcctcccccgcttgctgctgcttctcttactcgtgttccctgccactgtcttgttccgaggcggccccagaggctcgttagcagtggcacaagatcttacagaggatgaagaaacagtagaagattccataattgaggatgaagatgatgaagccgaggtagaagaagatgaacccacagatttggtagaagataaagaggaagaagatgtgtctggtgaacctgaagcttcaccgagtgcagatacaactatactgtttgtaaaaggagaagattttccagcaaataacattgtgaagttcctggtaggctttaccaacaagggtacagaagattttattgttgaatccttagatgcctcattccgttatcctcaggaccaccagttttatatccagaatttcacagctcttcctctgaacactgtagtgccaccccagagacaggcaacttttgagtactctttcattcctgcagagcccatgggcggacgaccatttggtttggtcatcaatctgaactacaaagatttgaacggcaatgtattccaagatgcagtcttcaatcaaacagttacagttattgaaagagaggatgggttagatggagaaacaatctttatgtatatgttccttgctggtcttgggcttctggttattgttggccttcatcaactcctagaatctagaaagcgtaagagacccatacagaaagtagaaatgggtacatcaagtcagaatgatgttgacatgagttggattcctcaggaaacattgaatcaaatcaataaagcttcaccaagaaggttgcccaggaaacgggcacagaagagatcagtgggatctgatgagtaaatgttcctttgtgcaacaattcggtctttacttaacctgccctaatatttttcggcctgatgggaattagtgcagagaagccagtcaccatagaaggcaactcctacttgtgtgtggactgagcaatcagagtctgtggcgataatattgctgaaaatgcactgcattcatttttctaaagtaacaaatttggtttttttttaaaccattaaaatctatgtgtgtgcgtgtgtatgtatgtgagcagttggtcttaccagaatcattgttgaactacctgaaacaagtctttagaatactaaatataatgctgttgtctcttcctttttgacattttctgattttttcccccaaaactcagttaatatttacccactatgattattgatgtcctgccttgaacagttttaaagaaaacaatttttggaatagctcaaatttcaattgatggcacaaatcagcattttgttgttgttactgtattacaattagtattctaaaggcagaagcagaagtagctgctttttagcaatagaattgtttcagtattttgctgctgtttaatgcgcatcttcagaaaacttcccagtggcttcaaggaatttggggatctctctggcaacaaattgtgaaacatgaaatttctgctgactttaatatatgaaacctaatcctacccccttttttaacaaaaagaaactagtacatttgtgaaaattgtgttgtgttgtccattgttgctctagttctgacccagaggtagctctggagtgattttagacctactcactcagttgtgtgtaggtttttttgttttgttttgagagagaatttttctctccttaatagaagcatcctttttaaagagaagttgccttggtccacacactaagcagaaaaccaagttatcaggacagagatatttcccagttactcctaatcaatgaagaaagtgagttggatatttttaaagcagttaactaattttttcttacctaatcttttgggagttttgcttgttgatataacctttttagttaacctgaaagattccaaaaattgttcttaagtgcttgagactggaaccaaaattaaattgtacttcataaaatcctcttatagagttactcttgccctagattgtaaattaagtttggcattattgtcagactggatggagggtgaagtaaaatagtatgaacaattaagaggctctccccctcttgtctttaagccatattctcctacatgtattttataagaaaatgttaagtcaaattttagtggctctttaattcctgacctcttcattctccttttcagtataacctcccctatgctcatgcccacacagacaaaaaaacaaaacgaaatacacacagaaaaaagtctttccaaactgtttaagtatttaaacatctgagccaaagcagatagaagttattgtataattgttaatcactttgcaaataggggctatcaaattacctatattggcattgctggattataaactctatatctgtaatataaagtgtttgagtttttaattgggctgttatgatcagtaattgattttgagaaagctctatgagctctaagtaactgcatggttttttgtttaatgtaatataggagacccttcacattcccaaggaatatattccaaaacatttttgtgaatatctaagtttgtgaaactactagggcatgatacagtaaggtgtaattacagaatttacgaaatgtaaatggcctctacagagttttatggaatacctggtactaacgtaggcagctgcaaaaccacactgagttacagctgtcagccctcctcattcctaaataacttgccttacatatcagccctcccacttctgaagttcaaattagtgcctcggaaatgtagaatttattatttgtcattttttttttttagcatagattgagaacagttgaactcttaaatcctcagatgccaggggtctgctctagcatcagtaagtatttagcagaaactaactccgtaatgaatggaattcaattccacacatggtttgttcaagcacacttaataagtagcctattttttaaatgtctttttaaaatgtaaatatttggatgaagtttttctttgttttgatatattcatttgctacaccaactatgttttcagaattcatcttttgaacaacttggtttcagaatatgtaaaatgactttaaggatcttgtgtatcaaacctatccccggatgtgtgagaataatgtgttcataaagcatggatctcgtaaaaaaaaaaaaaaaaaaaaa

SEQ ID NO: 968 - DNA, 4560 bp, Homo sapiens
ggcggaggctccgggacggcgagcggcgggcggcggaggaggagacggcaggtcgggcattaaaaaatatttaatcattcatgtgttgagactcattcttgagttatggatgacaaggcttctgttggaaaaatcagtgtctcttcagactcagtatctactcttaatagtgaagattttgtcttggtttccaggcaaggagatgagacaccatctacaaataatggaagtgatgatgagaaaacaggactcaagattgtagggaatggaagtgaacagcagctgcaaaaagagctagcagatgtactgatggatcctccaatggacgaccagccaggggaaaaggagcttgtgaaaaggtcacaactggatggtgaaggagatgggcctctttctaatcagctctccgcttcatccaccattaaccctgtgccattagtagggctccaaaaaccagagatgagcctaccagtgaaacctggacaaggagattctgaagcttcaagtcctttcacaccagtggccgatgaggacagcgtagttttcagtaaactgacttacttaggctgtgcctcggtaaatgctcccaggagtgaagtggaagccttaaggatgatgtccatcttaagaagccagtgtcagatttcactagatgttaccctttcagtgccgaatgtgtctgaaggaattgtgagactcttagatcctcagacaaacactgaaatagcaaactaccctatctacaaaatcctcttctgtgtcagagggcatgatggaactcctgagagtgactgttttgctttcactgaaagtcattacaatgcagagctcttcagaatacacgtcttccggtgtgaaatacaagaagctgtaagccggatactttacagttttgccactgccttccgccgttctgccaagcagaccccactttcagccactgctgcaccccagactcctgacagtgacatctttaccttctctgtgtctttagaaataaaagaagatgatggtaaaggttattttagtgcagttcccaaagataaggacagacagtgctttaaactacgccaaggaattgataagaagattgtcatctatgtgcagcaaacaactaataaagaacttgccattgaaaggtgttttggtcttctccttagtccaggaaaagatgtacgaaatagtgacatgcacttattagatttggaatctatgggcaaaagttcagatggaaagtcgtatgttattacggggagctggaatccaaaatccccacattttcaagttgtaaatgaagaaactcctaaagataaagtcctgtttatgaccacagctgtagatttggtaataacagaagtacaggagcctgttcgatttctcctggagacaaaagtccgcgtttgctcacctaatgaaagattattctggcccttcagcaaacgtagtactactgaaaatttctttttgaaactaaaacagataaagcaaagggagagaaagaataatactgacactttatatgaagttgtatgcttggaaagtgaatcagaaagagagaggaggaaaactacagccagtccttcagttcgcctgccacagtctggatcgcaaagttcagtgataccttctcctccagaagatgatgaagaggaagataatgatgaacctctcctgagtggatctggtgatgtatccaaagaatgtgcagaaaaaattcttgaaacatggggagaactgttgtcaaaatggcatctcaacttgaatgtgagaccgaagcagttgtcatccttagtaagaaacggtgtccctgaagctcttcgaggagaagtctggcagctgctagcaggctgtcataacaatgaccacctggtagagaaataccgcattcttatcacaaaggagtctccccaggacagtgctatcacccgggatattaaccgaacattcccagcccatgactactttaaggacacaggaggagatggacaagattccttatataaaatatgcaaggcttattctgtgtatgatgaagagattggttattgccagggccagtcatttcttgctgctgtgctccttctccatatgcctgaagaacaggcattcagtgttctggtcaagatcatgtttgactatgggctcagggaacttttcaagcaaaacttcgaagatttgcattgcaaattttaccagttggagcgcctcatgcaggaatacattcctgacctgtacaaccacttcctggatataagccttgaagcacacatgtatgcctcccagtggtttcttactcttttcactgcaaaattccctctctacatggtcttccatatcatcgacctgcttttatgtgagggaataagtgttatttttaatgtcgcccttggattattaaagacttcgaaagatgacctgctgttgacagactttgaaggtgccttgaagttctttagggttcagcttcctaagagataccgctcagaagaaaatgcaaaaaaactaatggaattagcctgcaacatgaagattagtcagaagaagttgaaaaaatacgagaaagaatatcacaccatgagggaacagcaggcccagcaagaagaccccatcgagcgatttgagcgggagaataggcgtctacaagaagctaacatgaggttggaacaggaaaacgatgacttagcccatgagctggtgaccagcaagattgcactacggaaggacctggataacgctgaggaaaaggcagatgctctgaataaggagctgctgatgaccaaacagaagttgattgatgcagaagaagagaaaagacggttggaagaagagtctgctcagttaaaagaaatgtgccgtcgggaactcgacaaggcagaatctgagattaaaaaaaacagttctatcattggtgactataagcagatttgttctcagttgagtgaaagattggagaagcagcagacagccaataaggtggaaattgagaaaattcggcaaaaagtggatgactgtgagcggtgccgggaatttttcaacaaagaagggcgtgtaaaaggcataagctcaaccaaggaggttttagatgaggacacggatgaagagaaagagacgctcaagaaccagctgagagaaatggagctagaactggcacagaccaaactccagctggtggaggccgagtgtaagatacaggacttggaacaccatttagggcttgccctcaatgaggtgcaggcagccaagaagacgtggtttaaccgaacactgagctccataaagacagcaaccggggttcaagggaaagagacttgctgagagcagctgccgcctcccgacaccttcagaaaacacgacaccttttgttgccttctttggccagatgtgtgattctgtgacttgtcccaggaccagaatgtacctaagtcagatccatagacgcatgttggtaggtcactggaccagagcttgtgaagcaggcaacctctggggtaagactactgatactaacaggcctgctagctcagccgacgctctggacactctagaaatcactcctcagtgtgacctcccaggcctcttccccgtgtacgtcaacacctcacccagcctaaaggctgagtttacatgatcagagttaggggatccttcagtctgttgattttttttctaaaccttttttttttaatatacatatatatatatatatatatatatatatatatatatatatatatatatatatatatatatatagtgggggtggggcaagggatcagaaattcaaataattcttttctgcttcaatgccagcagaaggtcccccaggtagacatggagaagcactttgttttaaataggagggtttcatagttgcatctgaagccacctggttctgttaaactgtatcgtgcaggttttgggtttggcattattcatgtttctgatcaattctatgcaactctcatagttcctgttactttttagcattagctgccaaatgacttcaaaaggctggggtgggtgacttgactgtgagactggattataacatggacaaatcttattttgcttaatgtgtttgtgtgtgtgtgtgtgtgtgtgtgtgtgtgtgtgtgtgtatgtatatatatatatataaatatctttcccaatatgccccgttgacagtgtttaaattccagactaggactgctgatctgcacaatttaattatgtggttattcgagcacttaatttcactcaaggttcattgggctctgctctcctccctgccattacgggagctgtggacagagctccctcacttcaagattcctagtgtttttgcacaacaggttgtccaagtgagaaagactgagttgcgtgtctgtaaatgtctgcgcagggtgcacatgctgcgaggtctccatcctccgggcctgtccctcccagatgggctgggcctttgggccctcctcagagtatgcctgggtacaaacctcactgttcagatgggctgtaagttctcacttcaaagctatggaatggattttagcacctttaaaaaaaaaaaaaaaaaaa

SEQ ID NO: 969 - DNA, 2236 bp, Homo sapiens
cccttctgaaaaatggtttcacccgctccgtctctagaacgggtcgggccgctaccactgtccggcccggaggggaactgttttctccggaagtgacaacacgctgactaggaaaaggaggaggcggggcagtggggccttcggcggcgactatggaaggagccggctacagggtggtgtttgagaagggcggagtgtacctgcacaccagcgctaagaagtatcaggaccgagactctctcatcgctggtgtcatccgtgtcgtggaaaaggacaatgacgtcctcctgcactgggctcctgtagaggaggctggagattccacccaaatcctcttctccaagaaggactccagtgggggtgactcatgtgcttctgaggaggaaccaacctttgaccccggctatgaacctgactgggctgtcatcagcactgtgcggccacagccctgccactcagagcccacgagaggtgcagagcccagctgcccccagggctcctgggccttctcagtgagtctgggggagctaaagtccatccgccgctccaagccaggcctcagctgggcctacctggttctggtgacccaggctggaggttccctgcccgcactgcacttccaccgcgggggcacccgcgccctgctccgcgtcctcagccgctacctgctgttggccagctccccgcaggactcccgcctctaccttgtcttcccccacgactcctctgctctctccaactccttccaccacctgcagctctttgaccaggacagctccaatgtggtgtcacgcttcctccaggatccctactccaccaccttcagcagcttctcccgagtgaccaacttcttccggggtgccctgcagccacagcctgagggagccgcctccgaccttcccccgccacccgacgatgagcccgagcctggattcgaggtcatttcctgtgtggagctggggcctcggccaaccgtggagcggggccctccagttacagaggaggagtgggcacgccacgtgggccctgaaggtcgcctgcagcaggtccctgagctgaagaaccggatcttctcggggggtctgagccccagcctgcggcgcgaggcctggaagttcctcctagggtacctcagctgggaaggcacagctgaggagcacaaggcccacatacgcaagaaaacggatgagtatttccgcatgaagctgcagtggaaatctgtgagccctgagcaggagcggagaaactcacttctgcatggataccgcagcctcatcgaaagggatgtgagccgcactgacaggaccaacaagttctacgagggtcccgagaacccggggctgggcctgctgaacgatatcctcctcacctactgcatgtatcacttcgacctcggctacgtccagggcatgagtgatcttctctccccgatcctctacgtcattcagaacgaggtggatgctttctggtgtttctgtggcttcatggagctcgtgcaagggaactttgaagagagccaggagaccatgaagcggcaactcgggcgactgctgctgctcctgagggtgctggaccccctgctctgcgacttcctggattcccaggactccggctctctctgcttctgtttccggtggctgctcatctggttcaagagggaattccccttcccggatgtccttcggctgtgggaggtgctgtggacagggctccctggccccaatctgcacctgctggtggcctgcgccatcctggacatggagagggacaccctcatgctgtccggcttcggctccaatgagatcctcaagcacatcaacgagctgactatgaagctgagcgtggaggacgtgctgacccgcgccgaggccctgcaccgccagctaaccgcctgccccgagctgccccacaacgtgcaggagatcctggggctggccccgcccgcagagccccacagcccctcgcccaccgcctccccgctgcctctgtcgcccacccgggccccgcccaccccgccgccctccacggacacagccccgcagcccgacagcagcctggagatcctgcccgaggaggaggacgagggcgccgactcctaaccccgccaggcagcctcgttctgcacaggcactttagcccgagccaggcacacctgcgagggggcaggtgtgctccgccgccctgctgataagctggcttcattaaactgacacttctcaaaaaaaaaaaaaaaaaa

SEQ ID NO: 970 - DNA, 2097 bp, Homo sapiens
gccttggggacatttagggcagagcctcgagtgacaggtcctgggacagtgggagccaagggcaagtgctagagttgcagtgaatttagagcaaagcctcagctaagtgacacatcccagggcagtaggggatctatctaggttcgtgctgggcctcaggtaagtgacaggccttaggacaatgggggctgtggcatgcgtcaggttacctgccttgatatgggatcgtgacaggcccctccctatgtgcaggagacaagcagcccaagaaacaggagaaaaacccagtgttggtgtccccagagtttgtggatgaagctctgtgtgcgtgcgaggagtaccttagcaacttggcccacatggacatcgacaaggacctggaggccccgctgtacctcacccccgagggctggtccctcttcctccagcgctactaccaagtggtccacgaaggggcagaactcaggcacctcgacactcaggtccagcgctgtgaggacatcctgcagcagctgcaggccgtggtaccccagatagacatggaaggggatcgcaacatctggatcgtgaagccaggagccaagtcccgtggacgaggcatcatgtgcatggaccacctggaggagatgctgaagctggtgaacggcaaccccgtggtgatgaaggacggcaagtgggtggtgcagaagtatattgagcggcccctcctcatctttggcaccaagtttgacctcagacagtggttcctggtaactgactggaacccacttaccgtgtggttctaccgcgacagctatatccgcttttccacgcagcccttctccctgaagaacctggacaactcagtgcacctgtgcaacaactccatccagaagcacctggagaactcatgccatcggcatccactgcttccgccagacaacatgtggtctagccagaggttccaggcccacctgcaggagatgggtgccccaaatgcttggtccaccatcatcgtgcctggcatgaaggatgctgtgatccacgcacttcagacctcccaggacaccgtgcaatgtcggaaggccagctttgagctctatggcgctgacttcgtgttcggggaggacttccagccctggctgattgagatcaacgccagccccacgatggcaccctccacagcagtcactgcccggctctgtgctggcgtgcaagctgacaccctgcgcgtggtcattgaccggaggctggaccgcaactgtgacacaggagcctttgagctcatctataagcagcctgctgtggaggtgcctcaatatgtgggcatccggctcctggtagagggcttcaccatcaagaagcccatggcgatgtgtcatcggcggatgggggtccgcccagcagtccctctgctgacccagcgaggctctggggaagcccgtcaccacttccccagcctccacaccaaggcccagctgccttctccccatgtactccgacaccagggccaggtcctcagacgacagcacagcaagctggtgggcactaaggccctgtcgaccacaggcaaggccttgaggactctacccacggctaaggtcttcatttccctcccaccgaaccttgatttcaaggtggcacccagcatcctgaagccaagaaaggtgggcctcgacctgtgactcacacccagtggacagtgctgagcacggggtcagggctggagggcacaggcagagggcagctcccaggctggctggcaccccaagggaagagctggtctccctcagaagccccttcctccacagacttctgatcatctccctcttctcccctcctttcacaccgaggctcctgctctcctgtgcctccgaggcccccagctggaagtgccttgttgcctctgccctttgaagtcggaacaattcctagcacctgtcggaaggtcaaggccaaaggcaaattcaaggccagactgtgacaaacccagggctgaggcctgccccatgaagaggctgagccccctgaaacccctgccccttgttggtacattccagaggcgcaggggcctgggggatatgaagctagggaagcccctgcttcgattccccactg

SEQ ID NO: 971 - DNA, 4184 bp, Homo sapiens
ttttttttttttttttttttttttttttttttttttttttttttttttttttttttttttttttttttttttaatgtttctaaggtaaccttttagcagatttattacagtacaatagattatgagggggaattctatacatacaaataatatacaaacacaattacctaatttattaatttacaaaacccaaaaagttaagccaactaaaaatttatcagtatcaccatcagaacatcttttcttttttttcttttttttttgagacagagtctcactctgttgcccaggctggagtgcagtggcgcggtcttggctcactgcgggctccgcctcccgggttcccgccgttctcctgcctcggcctcccgagtggctgggactgcaggcgcccgccatcacgcctggctgattttttgtatttttagtagagacggggtttcactgtgttggccgggatggtctcgatctcctgacctcgtgatccatccgcctcggcctcccaaagtgctgggattgcaggcgtcagccaccgtgaccagcctgaaacaggagcaagttctaaactcaggctctagagtcagaaaaggtagagtcaggttctggatccaaaatggggcaagtcatgatcaggttctggaaccagaacaggcctcaagcctaggggctgagcagggtatcccctggcctgggagcagaggacttctggctgactgctgcccgcaacgttctcaagctggtggtgaagtctgagtggaagtcataccctattcaggcagtagaggaagaggcctcaggtaagtactgtggttaccgccactctcccacccatttatcctccacccatccgcccttccacctatctgcccttctacctatctattcatccacgcacctactggttcatccacacatctgtgtatgattcacatctacccatctatccatccatccaccagccatccacccactcatccacccacgtattcacccactctctgatctaccgattcacccacccacccttccactcatccttccatcctcccacctgtcacccattgttaatctcttcattcatctacctgatgtcagctccatactccccatccatctatccactccctgcctacctatccttccacagatccacctacccatctatctacctgctattccattctcccatctactacctatctgttcttcaggccatccactcatccattcttctgtcccaggtacctagacacttgtcttcccatccgtttgttagttgatccactcctcattcagccctcccatgggcctggcacgtagccgagcaccctggagagggcagactaagaagacatggtccgtccctgcctgtgaggagttcaggtctctgaggaggaggaagcagtgaaactgggctttacacatggcctgagaacagcttaggcctgaacataaggaacagcttggagtggagggacacagaggaccctcactatcatgcatgccaacccaaccaactgcctgccctttcccttctggatttagctcgtgtctccaggctcctagtcctgtaatccagggacccatcagcgagggattcagggaagcagaggcagctctccaggaaggaggaaaatccctgcctcttccagagagactcccccattgctgtctcttgtgtgtgtcatgcacaaggaaggcttggttgtgtgccaggataaggggcacaagggcctcgggtgtggccagagaccccatgcttaagcttttatggtataggtcaggctgcaggggtttgagggcctcagttgtatatcagaatcttcagagcactgcgatgttcaggggtgagtcaggtctgtagatgtgcacggggtcttctgaagggtcagtttctgtaatcactttcaggtgtgtcagggccttgtgcagtaacagtgcacacagaagttagtgtttctgtgggctaagggttgtagctctgtatcaggattctgggagtgggtctggatttctggtgtgtggacttaagaagctgtgtcagacttgggggaggggcgttcatgtataactgggttcacataggccaagactcccaggtgcattttaggcagagcctcaggtgtgttagaggtcccaggggcagagaggctataggtgctgtcagaggccttggggacatttagggcagagcctcgagtgacaggtcctgggacagtgggagccaagggcaagtgctagagttgcagtgaatttagagcaaagcctcagctaagtgacacatcccagggcagtaggggatctatctaggttcgtgctgggcctcaggtaagtgacaggccttaggacaatgggggctgtggcatgcgtcaggttacctgccttgatatgggatcgtgacaggcccctccctatgtgcaggagacaagcagcccaagaaacaggagaaaaacccagtgttggtgtccccagagtttgtggatgaagctctgtgtgcgtgcgaggagtaccttagcaacttggcccacatggacatcgacaaggacctggaggccccgctgtacctcacccccgagggctggtccctcttcctccagcgctactaccaagtggtccacgaaggggcagaactcaggcacctcgacactcaggtccagcgctgtgaggacatcctgcagcagctgcaggccgtggtaccccagatagacatggaaggggatcgcaacatctggatcgtgaagccaggagccaagtcccgcggacgaggcatcatgtgcatggaccacctggaggagatgctgaagctggtgaacggcaaccccgtggtgatgaaggacggcaagtgggtggtgcagaagtatattgagcggcccctcctcatctttggcaccaagtttgacctcagacagtggttcctggtaactgactggaacccacttaccgtgtggttctaccgcgacagctatatccgcttttccacgcagcccttctccctgaagaacctggacaactcagtgcacctgtgcaacaactccatccagaagcacctggagaactcatgccatcggcatccactgcttccgccagacaacatgtggtctagccagaggttccaggcccacctgcaggagatgggtgccccaaatgcttggtccaccatcatcgtgcctggcatgaaggatgctgtgatccacgcacttcagacctcccaggacaccgtgcagtgtcggaaggccagctttgagctctatggcgctgacttcgtgttcggggaggacttccagccctggctgattgagatcaacgccagccccacgatggcaccctccacagcagtcactgcccggctctgtgctggcgtgcaagctgacaccctgcgcgtggtcattgaccggatgctggaccgcaactgtgacacaggagcctttgagctcatctataagcagcccgtcaccacttccccagcctccacaccagggcccagctgccttctccccatgtactccgacaccagggccaggtcctcagacgacagcacagcaagctggtgggcactaaggccctgtcgaccacaggcaaggccttgaggactctacccacggctaaggtcttcatttccctcccaccgaaccttgatttcaaggtggcacccagcatcctgaagccaagaaaggtgggcctcgacctgtgactcacacccagtggacagtgctgagcacggggtcagggctggagggcacaggcagagggcagctcccaggctggctggcaccccaagggaagagctggtctccctcagaagccccttcctccacagacttctgatcatctccctcttctcccctcctttcacaccgaggctcctgctctcctgtgcctccgaggcccccagctggaagtgccttgttgcctctgccctttgaagtcggaacaattcctagcacctgtcggaaggtcaaggccaaaggcaaattcaaggccagactgtgacaaacccagggctgaggcctgccccatgaagaggctgagccccctgaaacccctgccccttgttggtacattccagaggcgcaggggcctgggggatatgaagctagggaagcccctgcttcgattccccactgcccttgtcctggatccaacaccaaataaaaagaaacaagtgaaaaaaaaaaaaaaaaaaa

SEQ ID NO: 972 - DNA, 3148 bp, Homo sapiens
cctcccgtcccgccgagccggcgccaagatggcggcgctgactcctggagagcggtcgcgccggaggccgcgggggccggagcggagcagccgcggctgaggttcccgagtcgccgctcggggctgcgctccgccgccgggaccccggcctctggccgcgccggctccggcctccgggggggccggggccgccgggacatggtgccagtcgcaccccttccccgccgccgctgagctcgccggccgcgcccgggctgggacgtccgagcgggaagatgttttccgccctgaagaagctggtggggtcggaccaggccccgggccgggacaagaacatccccgccgggctgcagtccatgaaccaggcgttgcagaggcgcttcgccaagggggtgcagtacaacatgaagatagtgatccggggagacaggaacacgggcaagacagcgctgtggcaccgcctgcagggccggccgttcgtggaggagtacatccccacacaggagatccaggtcaccagcatccactggagctacaagaccacggatgacatcgtgaaggttgaagtctgggatgtagtagacaaaggaaaatgcaaaaagcgaggcgacggcttaaagatggagaacgacccccaggaggcggagtctgaaatggccctggatgctgagttcctggacgtgtacaagaactgcaacggggtggtcatgatgttcgacattaccaagcagtggaccttcaattacattctccgggagcttccaaaagtgcccacccacgtgccagtgtgcgtgctgggaaactaccgggacatgggcgagcaccgagtcatcctgccggacgacgtgcgtgacttcatcgacaacctggacagacctccaggttcctcctacttccgctatgctgagtcttccatgaagaacagcttcggcctaaagtaccttcataagttcttcaatatcccatttttgcagcttcagagggagacgctgttgcggcagctggagacgaaccagctggacatggacgccacgctggaggagctgtcggtgcagcaggagacggaggaccagaactacggcatcttcctggagatgatggaggctcgcagccgtggccatgcgtccccactggcggccaacgggcagagcccatccccgggctcccagtcaccagtggtgcctgcaggcgctgtgtccacggggagctccagccccggcacaccccagcccgccccacagctgcccctcaatgccgccccaccatcctctgtgccccctgtaccaccctcagaggccctgcccccacctgcgtgcccctcagcccccgccccacggcgcagcatcatctctaggctgtttgggacgtcacctgccaccgaggcagcccctccacctccagagccagtcccggccgcagagggcccagcaacggtccagagtgtggaggactttgttcctgacgaccgcctggaccgcagcttcctggaagacacaacccccgccagggacgagaagaaggtgggggccaaggctgcccagcaggacagcgacagtgatggggaggccctgggcggcaacccgatggtggcagggttccaggacgatgtggacctcgaagaccagccacgtgggagtcccccgctgcctgcaggccccgtccccagtcaagacatcactctttcgagtgaggaggaagcagaagtggcagctcccacaaaaggccctgccccagctccccagcagtgctcagagccagagaccaagtggtcctccataccagcttcgaagccacggagggggacagctcccacgaggaccgcagcacccccctggccaggcggtgtctctgttcgcacaggtccggagaagcgcagcagcaccaggccccctgctgagatggagccggggaagggtgagcaggcctcctcgtcggagagtgaccccgagggacccattgctgcacaaatgctgtccttcgtcatggatgaccccgactttgagagcgagggatcagacacacagcgcagggcggatgactttcccgtgcgagatgacccctccgatgtgactgacgaggatgagggccctgccgagccgcccccaccccccaagctccctctccccgccttcagactgaagaatgactcggacctcttcgggctggggctggaggaggccggacccaaggagagcagtgaggaaggtaaggagggcaaaaccccctctaaggagaagaagaagaagaagaaaaaaggcaaagaggaagaagaaaaagctgccaagaagaagagcaaacacaagaagagcaaggacaaggaggagggcaaggaggagcggcgacggcggcagcagcggcccccgcgcagcagggagaggacggctgccgatgagctggaggctttcctggggggcggggccccgggcggccgccaccctgggggtggcgactacgaggagctctaggccggcgtgggcagtggccgccctggggcggggggcgtgcctgtcactgcctggggaggcatttgcctctgtaccatcgcctttgccgctgccccgtggctgccgtgtgcgcttctgagctggaagaggccgggcattggtggtccccaggctgggccctgcaggtgctgggccttcaggcccagtgtgagcctgctctgcaagaagggaggggacagctggcttcagccaggctcggtggacaccctggccctctcggggcagagccgccagtgtttctcagggatgtgactgaggcccaggagggacctgtgagggtctgtttacagaggctgggcaggggccgcttggctgtggggtgtgcgctgccccggcacctgcttgccctccgcgctcatctggggccgcagcatgcctatggttccgcttccggccgggagccctgaacacgggtgtgcagactcaccctaaagggcggcccaggccccacgctagaaggctggcgagaccgaaggcagcatgtgaggcctctcctgggagtgggggttgtgtttcccacagtggcctcagctgcgcccccgctcaggtgagcccgaaggcaggagccgggaggcactcctcccaaacactccactcagaccataaagcactcctgtttcactctgaaaaaaaaaaaaaaaaaa

SEQ ID NO: 973 - DNA, 1360 bp, Homo sapiens
gttccgtcgtttccgttgccggctgtttgcagtggggaaaccgaggcagctcctgctccccctagttcttccgctcctgtgaggaaaaaaaaatgtttatttctttgtgggagttcttctatgggcacttttttcgattttggatgaaatggctattacgacagatgactgggaagtgtgaattgcagcgaatatttgatacctatgtaggtgcacaaaggacacacaggatagaaaattccttgacatactccaagaataaggttttacagaaggcgacacatgttgttcagagtgaagtggacaaatatgtagatgatattatgaaggaaaagaatattaaccctgagaaggatgccagttttaaaatatgcatgaagatgtgcttactgcagataactggttataaacagctgtatttggatgtagaaagtgtgaggaaaaggccatatgattctgataacctacagcatgaagagctactcatgaagctttggaatcttctaatgcccacgaagaagttaaacgctagaatctccaagcagtgggctgaaattggttttcagggtgatgatcccaagacagacttcagaggcatgggcatacttgggttaatcaatcttgtgtatttcagtgaaaattacactagtgaagctcatcagattctttcccgttcaaatcatccaaaattagggtattcttatgcaatagttggaatcaatcttacagagatggcttatagcttactgaagagtgaagctttgaagtttcatctctataaccttgttcctggtataccaacaatggaacactttcatcagttttactgttatcttgtctatgaatttgacaagttttggtttgaagaagaaccagaaagcattatgtatttcaatttgtatagagagaagtttcatgaaaagattaaaggacttttactggattgtaatgtagcacttactttaaaagtataaatcatccactgtatcttctatttctaccacattttgcacattcaacagaatttatatgttgtaataggaattatctgatcaattacactcttatatataatttcctacaaaaatatttcagaaattctatttaagaaagctagtggacaatcagtgtatgtttacaattgtttatacactgttctccaaaggtaccttatccttccaaagatcccctctgtagagtcatgcgaactacagtttggaacttgggacttagcccgttggtgtaaaagtataaatcaggtatttgtattaaattgattaaaatgtgtaaaaaaaaaaaaaaaaaaaaaaaaaaaaaaaaaaaaaaaaaaaaaaaaaaaaaaaaaaaaaaaaaaaaaaaa

SEQ ID NO: 974 - DNA, 1399 bp, Homo sapiens
agtgtgaaatcttcagagaagaatttctctttagttctttgcaagaaggtagagataaagacactttttcaaaaatggcaatggtatcagaattcctcaagcaggcctggtttattgaaaatgaagagcaggaatatgttcaaactgtgaagtcatccaaaggtggtcccggatcagcggtgagcccctatcctaccttcaatccatcctcggatgtcgctgccttgcataaggccataatggttaaaggtgtggatgaagcaaccatcattgacattctaactaagcgaaacaatgcacagcgtcaacagatcaaagcagcatatctccaggaaacaggaaagcccctggatgaaacacttaagaaagcccttacaggtcaccttgaggaggttgttttagctctgctaaaaactccagcgcaatttgatgctgatgaacttcgtgctgccatgaagggccttggaactgatgaagatactctaattgagattttggcatcaagaactaacaaagaaatcagagacattaacagggtctacagagaggaactgaagagagatctggccaaagacataacctcagacacatctggagattttcggaacgctttgctttctcttgctaagggtgaccgatctgaggactttggtgtgaatgaagacttggctgattcagatgccagggccttgtatgaagcaggagaaaggagaaaggggacagacgtaaacgtgttcaataccatccttaccaccagaagctatccacaacttcgcagagtgtttcagaaatacaccaagtacagtaagcatgacatgaacaaagttctggacctggagttgaaaggtgacattgagaaatgcctcacagctatcgtgaagtgcgccacaagcaaaccagctttctttgcagagaagcttcatcaagccatgaaaggtgttggaactcgccataaggcattgatcaggattatggtttcccgttctgaaattgacatgaatgatatcaaagcattctatcagaagatgtatggtatctccctttgccaagccatcctggatgaaaccaaaggagattatgagaaaatcctggtggctctttgtggaggaaactaaacattcccttgatggtctcaagctatgatcagaagactttaattatatattttcatcctataagcttaaataggaaagtttcttcaacaggattacagtgtagctacctacatgctgaaaaatatagcctttaaatcatttttatattataactctgtataatagagataagtccattttttaaaaatgttttccccaaaccataaaaccctatacaagttgttctagtaacaatacatgagaaagatgtctatgtagctgaaaataaaatgacgtcacaagac

SEQ ID NO: 975 - DNA, 1712 bp, Homo sapiens
gagctcgggagcggggaccggtagccgactgcctctgggacagcggtggcgtctctgtgcccgtttagtggagttggagggaagctgcgaggaggcgcaggaagtccacctcagaaccccccccccggtctaggggcgcccgggcgttggaaccggcgggggaagggtgcgggggcgcatggggtgatcctgattcggctcccattttcccgaacgggcaccctgaggctcctggcccggggcatggtgttagaaatcatagctgcggagaagcccttgtgacaccttgctgcagactgggaagctgcagattgggaagctgcagatgattgggaaggtggaaggtggagacgcggtccttaggtggtcgagcgcattttctcttcctcagagtccaggaaggagcgcgatggagaagtggggcgcacggcgggtttcgggtccgcccctgcccttccgactcctccgaccacgtctgcctttggctgaaagcaaatatggctccgtgtgcggtttctgcaacaaaggctgggcgggccgggtttccctagggatggggaccgcctccccggggagtcgtgggggtgagccaccggggcctccgagagaatcgctggtgtcgcttcgcacccaagggacacatctcgggttagaaaggagaaacgacgtggatctaaaggcgaagcccatgctgaggacttttcaaaatggcctcttatcggccccactcacaggagcttcaggcttcggtggccctgtaggacaaccctggggtgtcattggagagaagctgacggggttaatggcgggtgacaggtgaaagagaccccggaggggtggggccggtgtgtgtggctaagctgagtcccaggcacagggtggattggaatttatgggtggcagagctagagctaggccctgcccttacctaggtcctggcttcgaggtccactgttctgtcgcgtcttttgacgcatcggtggaagaactgaatttcaggatgctcacaaacctgcagctggaagctagacttccaaaccttagtttaaaaaagcaactctactgaaatactaaaataaattgccgacggaattagggtgatttcttgttcacggtttcatttaaaaatgcacctatgttatttacaggaaaaacgttttagtggtgctagagctacaagaataaggtaaacagagggatgctgctagaccaggagtaccttacccagtctgggataggaggaggtcggggaagccctccctaagcaagacacgtgagctgagtttgaagaaaaagttaaaaggaaggtgaagtgcgggagagaaacagggaagggaatttggagcagagtgaacagcatatgcaaaggtgtggaaatgtggaaatgcatggcctgttaaagctgccttaagaaaatatgttgcctggggctgggcgcggtggctcatgcctgtaatcccagcattttgggaggccgaggcgggcggatcgcttgaggtcggagttggagatcagcctggctaactaacatggctaaacccttctctactgaaaatacggagattagccgggcgtggtggcatgcgcctgtggtcctagctattctggaggctgaggcgggagaatcgcttgggcctgggaggcggaggttgcagtgggccgagatcgcgcctttgcactccagcctggaagacgaaacaaaactccgtctc

SEQ ID NO: 976 - DNA, 2010 bp, Homo sapiens
gtgctgccgcgggtcacgtgctgcggaggcttggggaggggcggcgaggcggggtttatagcccgggcgcccgcgggccccacgctttgaccgggtcgtggcagccggagtcgtcttcgggacgcgcctgctcttcgcctttcgctgcagtccgtcgatttctttctccaggaagaaaaatggcatccgttgcagttgatccacaaccgagtgtggtgactcgggtggtcaacctgcccttggtgagctccacgtatgacctcatgtcctcagcctatctcagtacaaaggaccagtatccctacctgaagtctgtgtgtgagatggcagagaacggtgtgaagaccatcacctccgtggccatgaccagtgctctgcccatcatccagaagctagagccgcaaattgcagttgccaatacctatgcctgtaaggggctagacaggattgaggagagactgcctattctgaatcagccatcaactcagattgttgccaatgccaaaggcgctgtgactggggcaaaagatgctgtgacgactactgtgactggggccaaggattctgtggccagcacgatcacaggggtgatggacaagaccaaaggggcagtgactggcagtgtggagaagaccaagtctgtggtcagtggcagcattaacacagtcttggggagtcggatgatgcagctcgtgagcagtggcgtagaaaatgcactcaccaaatcagagctgttggtagaacagtacctccctctcactgaggaagaactagaaaaagaagcaaaaaaagttgaaggatttgatctggttcagaagccaagttattatgttagactgggatccctgtctaccaagcttcactcccgtgcctaccagcaggctctcagcagggttaaagaagctaagcaaaaaagccaacagaccatttctcagctccattctactgttcacctgattgaatttgccaggaagaatgtgtatagtgccaatcagaaaattcaggatgctcaggataagctctacctctcatgggtagagtggaaaaggagcattggatatgatgatactgatgagtcccactgtgctgagcacattgagtcacgtactcttgcaattgcccgcaacctgactcagcagctccagaccacgtgccacaccctcctgtccaacatccaaggtgtaccacagaacatccaagatcaagccaagcacatgggggtgatggcaggcgacatctactcagtgttccgcaatgctgcctcctttaaagaagtgtctgacagcctcctcacttctagcaaggggcagctgcagaaaatgaaggaatctttagatgacgtgatggattatcttgttaacaacacgcccctcaactggctggtaggtcccttttatcctcagctgactgagtctcagaatgctcaggaccaaggtgcagagatggacaagagcagccaggagacccagcgatctgagcataaaactcattaaacctgcccctatcactagtgcatgctgtggccagacagatgacaccttttgttatgttgaaattaacttgctaggcaaccctaaattgggaagcaagtagctagtataaaggccctcaattgtagttgtttccagctgaattaagagctttaaagtttctggcattagcagatgatttctgttcacctggtaagaaaagaatgataggcttgtcagagcctatagccagaactcagaaaaaattcaaatgcacttatgttctcattctatggccattgtgttgcctctgttactgtttgtattgaataaaaacatcttcatgtgggctggggtagaaactggtgtctgctctggtgtgatctgaaaaggcgtcttcactgctttatctcatgatgcttgcttgtaaaacttgattttagtttttcatttctcaaataggaatactacctttgaattcaataaaattcactgcaggatagaccagttaaaaaaaaaaaaaaaaaaaaaaaaaaaaaaa

SEQ ID NO: 977 - DNA, 4166 bp, Homo sapiens
cagccggagcaggagcgccgagacgcgcctccggaacgtagagtaacaatcacaaccccacattccgggcgagcgtgagcacgagcgggaagggatgcgacccgggccgaggcgccgcgcgagcgccctgcagccaacgtgagcgccgccagccgcggcggcccgggcgccggccaggcctgggggcggcgggagcctgcgtgcgtgcactcctctcctctgctctcgtgcgtcctggaagcagtggccgcggcggctccctccggggtgcaaacccagtcgccgccagcagaacggccgacgctgcggaggggagaaggtcctttctcggctgccaccccctcccccggtcctccggggaagcagcggcttcagcaagattggacccgggcaccgggtggcactgaaccctctggccctcgccccagggggcccgtcggggagaggacgcagctcgtaggggggtccccggggagaggaagagacagcccctttcgagcttccacgcaccagccactccggggagggggccaagaggcaacggcggccaccaccgggcaccctcgccccctcccctcgggccgggagcttccagcccaagtctgcagcaccaggaagaaggcgcctgagctcccctcgcgacgagtcaaccgcagtaggaggtgggggcgaagagagggctgaacccgtccgctgcccgggcggtggagcccccacggcgaggcgctgcgccggcggtggagactcgcgttccctccagcccctggggcagaactttctcgccccccctcctccctcccccgcagtcggactccctccccagccggccagtcctcccggaggagaaggcgccgcggagacagcccgggcgggggcctaccttccccagggcaggcatcatgtcggcggcgcaggtgtcctcgtcccggagacaatcttgctacctgtgcgacctgccccgcatgccctgggccatgatctgggacttctcggaacccgtatgccgcggttgcgtcaactacgagggcgctgatcgcatcgaattcgtgatcgagacagcgcgccagctgaagcgggcgcacggctgcttccaggacggccgctcccccgggccgccgccgcccgtcggggtcaagacagtggccctgtcggctaaggaagcggcggcggcggcggcagcagcggcggccgccgccgccgccgcgcaacagcaacagcaacagcagcagcagcagcagcaacagcagcagcagcagcagcagcagcagcagcaacaacagctcaaccacgttgatggttccagcaagcctgcggtgctggcggccccgtctggcctggagcgctacggcctaagcgctgccgccgccgccgccgccgccgccgccgctgcggtggaacagcgcagccgcttcgagtacccgccaccgccggtgagcctgggaagcagcagccacaccgcgcgactgcccaacggcctggggggcccaaacggcttccccaaaccaacaccagaggagggacccccagagctgaaccgtcagagccccaattcttcttcagcggcggcgtcggtggcgtctcggcgtggaacgcacggtgggctggttacggggctgcccaacccggggggtggcggaggcccccagctcaccgtgccccccaacctgctaccgcagacgctgcttaacggcccggccagcgctgcggtactccccccaccccctccccacgccctgggcagccgtgggcccccgacgcctgctcccccaggggctcctgggggccccgcttgtctcgggggtaccccgggtgtatcggccacgtcgtcctccgcgtcgtcttcgacctcttcgtcggtggcagaggtgggcgtgggtgctggtggtaagaggcccggctcggtgtcgagcacagaccaggagcgcgagttgaaggagaagcagcgcaacgccgaggccctggccgagctgagcgagagcctgcgcaaccgcgccgaggagtgggccagcaagcccaagatggtccgcgacacgctgctcacgctggcaggctgcacgccctacgaggttcgcttcaagaaggaccactcgctgctgggccgcgttttcgccttcgacgccgtctccaagcccggcatggactacgaattgaagctgttcattgagtaccccacgggctcgggcaacgtgtactccagtgcatctggtgtggccaagcagatgtatcaggactgcatgaaggacttcggccggggcctatcctcgggtttcaagtacctggagtacgaaaagaagcacggctccggggactggcgcctgcttggagacctgctccccgaagccgtgcgcttcttcaaggagggcgtgcccggcgccgacatgctgccccagccctacctggacgccagctgtcccatgctgcccactgctctggtgagtctgagccgcgcccccagcgcacccccggggaccggggccttgccgcccgccgcgccgtcgggccggggcgcagccgccagcctgcgcaagagaaaggcctctccggagcccccggactcagccgagggcgcgctgaagctgggcgaggaacagcagaggcagcagtggatggcgaaccagagcgaggcgctgaagctcaccatgtccgccgggggcttcgcggcgccggggcacgcggcggggggtccgcctccgccgcccccacctctgggaccccattccaaccggaccaccccacctgagtcagccccccagaacggtccgtcccctatggccgctctcatgtcggtggcagatactctgggcacagcgcactcgcccaaggatggcagttccgtgcactctaccactgcgtcggcgcggcgaaacagcagcagcccagtctcgccggcctccgtgccggggcagcgccgcttggcatcacgtaacggggacctgaatttacaggtggcgcccccgccgcctagcgcccacccgggcatggaccaagtgcacccccaaaacattccggattcccccatggccaacagcggacccctctgctgcaccatttgccacgaacgtttggaggatacgcatttcgttcagtgcccttccgtccccagccacaaattttgcttcccttgctctagagagagtatcaaggcccagggggccaccggcgaggtgtattgccccagcggagagaaatgccccctagtcgggtcgaatgtaccttgggccttcatgcagggcgaaatcgcgactatcttagctggggatgttaaagtgaaaaaggagagagacccttgaaccactgggcagccacctcctttgccctagaccagctcctctccaatcctgagggcccctcccccaacccaactcgaccctccctcccctcacccccaaggtgtagaattgtgaatataacgaaactgcaaaaagttagtcttatgtatagacattattttcgtcgtatgtttctatattttgaaacaaaggtatgtaacttcttcatttgaaggataagctggtttgtgttaagcagtatagtattggttgggtcatttgcatcatatcgttagcatttatttggtggcagaatgtttgcctaggtacagaattaatagcccttagcaacgactgctgctggtgtgtatttttgtaaatgttatgcactctctgaaaggaaaaacacacacaaaagaaaaagacttttttttttttttttttttttttgccaaggccagtgttgctgcctaaaaaaaaaaaaaaaaaaaaaaaaaaaaaaaaaaaatgctataaaatggtgaaagcttccttctaaactgccccaagtgttgaagtcttcactttattttgttgttttgttttgtttttctgttttgtttgcaaaatggtaagggggtgtcgggggggatggggtgtattttgttgcaagtttgtgaggggaaaatgttttggtttgtttctactgacctgaatgtgttggatctacacgtgttgttttgtttttgctttattgatgcacggatgcttttgaacagtagagcgaaatgctagacatggagaatctgctctgtttgtcctttatacatttctgtagttaacagaacactgtaatgtgccttggagcttagtaacttgtaataaattcaattgatattaaaaaaaaaaaaaaaaaaa

SEQ ID NO: 978 - DNA, 1075 bp, Homo sapiens
gttttcttcgaagatttggggctccgcgatacagttaggatggctgtagtacctctgctgttgttggggggtttgtggagcgctgtgggagcgtccagcctgggtgtcgttacttgcggctccgtggtgaagctactcaatacgcgccacaacgtccgactgcactcacacgacgtgcgctatgggtcaggtagtgggcagcagtcagtgacaggtgtaacctctgtggatgacagcaacagttactggaggatacgggggaagagtgccacagtgtgtgagaggggaacccccatcaagtgtggccagcccatccggctgacacatgtcaacactggccgaaacctccatagtcaccacttcacttcacctctttctggaaaccaggaagtgagtgcttttggtgaggaaggtgaaggtgattatctggatgactggacagtgctctgtaatggaccctactgggtgagagatggtgaggtgcggttcaaacactcttccactgaggtactgctgtctgtcacaggagaacaatatggtcgacctatcagtgggcaaaaagaggtgcatggcatggcccagccaagtcagaacaactactggaaagccatggaaggcatcttcatgaagcccagtgagttgttgaaggcagaagcccaccatgcagagctgtgaatctagaggctctgagccactgttaacgcacaatgttcacagacatctgttgctgcctcaccttgggatccctgccacaagttccttgggcagtggccatgtcaccattgagatgaagatatacaacagaaaatagtggctgtgtttggaagcttcagccctgcacatttgaactagtcactctcccagacttgcgtgggtcagttctttctgagtagaggacttgctggtaaaggggcagatgctttttattagtactgataaaacaaactgagggaaacatccctcttagctgggaaacttttactcttcaggagcttggcatcatggactgttaatgtatgtgattttccccctattttctctctccaaaatgataaaaacaataattttattatga

SEQ ID NO: 979 - DNA, 3060 bp, Homo sapiens
gccgggtttgggggttgggacctccggctgcaggtccgcctgggccagacgcgcgagcgcaagcagcgggttagtggtcgcgcgcccgacctccgcagtcccagccgagccgcgacccttccggccgtccccaccccacctcgccgccatgcgcctccgccgcctagcgctgttcccgggtgtggcgctgcttcttgccgcggcccgcctcgccgctgcctccgacgtgctagaactcacggacgacaacttcgagagtcgcatctccgacacgggctctgcgggcctcatgctcgtcgagttcttcgccccctggtgtggacactgcaagagacttgcacctgagtatgaagctgcagctaccagattaaaaggaatagtcccattagcaaaggttgattgcactgccaacactaacacctgtaataaatatggagtcagtggatatccaaccctgaagatatttagagatggtgaagaagcaggtgcttatgatggacctaggactgctgatggaattgtcagccacttgaagaagcaggcaggaccagcttcagtgcctctcaggactgaggaagaatttaagaaattcattagtgataaagatgcctctatagtaggttttttcgatgattcattcagtgaggctcactccgagttcctaaaagcagccagcaacttgagggataactaccgatttgcacatacgaatgttgagtctctggtgaacgagtatgatgataatggagagggtatcatcttatttcgtccttcacatctcactaacaagtttgaggacaagactgtggcatatacagagcaaaaaatgaccagtggcaaaattaaaaagtttatccaggaaaacatttttggtatctgccctcacatgacagaagacaataaagatttgatacagggcaaggacttacttattgcttactatgatgtggactatgaaaagaacgctaaaggttccaactactggagaaacagggtaatgatggtggcaaagaaattcctggatgctgggcacaaactcaactttgctgtagctagccgcaaaacctttagccatgaactttctgattttggcttggagagcactgctggagagattcctgttgttgctatcagaactgctaaaggagagaagtttgtcatgcaggaggagttctcgcgtgatgggaaggctctggagaggttcctgcaggattactttgatggcaatctgaagagatacctgaagtctgaacctatcccagagagcaatgatgggcctgtgaaggtagtggtagcagagaattttgatgaaatagtgaataatgaaaataaagatgtgctgattgaattttatgccccttggtgtggtcactgtaagaacctggagcccaagtataaagaacttggcgagaagctcagcaaagacccaaatatcgtcatagccaagatggatgccacagccaatgatgtgccttctccatatgaagtcagaggttttcctaccatatacttctctccagccaacaagaagctaaatccaaagaaatatgaaggtggccgtgaattaagtgattttattagctatctacaaagagaagctacaaacccccctgtaattcaagaagaaaaacccaagaagaagaagaaggcacaggaggatctctaaagcagtagccaaacaccactttgtaaaaggactcttccatcagagatgggaaaaccattggggaggactaggacccatatgggaattattacctctcagggccgagaggacagaatggatataatctgaatcctgttaaattttctctaaactgtttcttagctgcactgtttatggaaataccaggaccagtttatgtttgtggttttgggaaaaattatttgtgttgggggaaatgttgtgggggtggggttgagttgggggtattttctaattttttttgtacatttggaacagtgacaataaatgagacccctttaaactgtcttattttccaccagattgagaaccagatgttctctacacactatcactgttcaatagagctttcttcagtgatggaaatgctctgtaatctacactgttcagtacaggtagctacggagcatctgaaatatggctagaaactacatttttgttttgattaatttaaatagccatacagttgctaccatactggtcacggcagctgtagactgactgggtccatagttcatcacctcaaaattctttcaaaatttattatctctttctctccttacatgtttatttcccaggcctaccctggtgattagaacagctgaagggcctttcttgttaggctgtccatgccctaaggatgggttcctgtttatccttgccacgcagctgagcttactgcatgtttatatctcccaaggactgttctctgctcagaaatgccctgtcaagggtgtggcatcacgcagtttcatccaagttgtttcaggaattgctgacactgctgggtgcagttctatcccctaaagcctagggtgtggccctttaacttccccttcagtagaactgggaaaggcagtaccattcctagttatgagtgaagcatccactttcttttgtaacaatgaggaacagaaaggataagactgaagagtgatcttttgtccaactaaaccatttatctccttttgtaggtaaattcaaatcctgcccagttatagttttcagtcactggagaattccaggtaggagccctactttaggtgatcctaggaactcctatgttcagaaaagaattttcttcctactatataattacagtatttagctgtcaattttaagatgaatttggtagagccttatagtaaagtatgtatcttggtcacacacaaagcttggaaaaagtaaaagatgtctaaaccataatcttgtaactcataacatctgggctggggcccggggatctaattgtttagagagccccaaaagtggctcagatgtaaagccagggttaagaaccatctgccttggaagatttaagggaaacatataaacttgtacaaaggacaaaaaaa

SEQ ID NO: 980 - DNA, 1104 bp, Homo sapiens
gcgcgagtgaaggaagacgaagtgcgtgacccgaccggctgtggtgttccagtccccactgaccagtaggagcagcagggcgtcggcttgtgaggtggcttttcctcggggcaacccaggaaggccccaagaggacaatggattctggaactcgcccagttggtagctgctgtagcagccccgctgggctctcacgggagtacaaactagtgatgctgggtgctggtggtgtagggaagagtgccatgaccatgcagttcatcagccaccgattcccagaagatcatgatcccaccattgaagatgcttataagatcaggatccgtattgatgatgagcctgccaatctggacattttggatacagctggacaggcagagtttacagccatgcgggaccagtatatgagggcaggagaagggtttatcatctgttactctatcacggatcgtcgaagtttccatgaagttcgwgagtttaaacagcttatttatcgagtccgacgtactgacgatacacctgtggttcttgtgggaaacaagtcagacctcaaacagctaagacaggtcaccaaggaagaaggattggccttggcccgagaattcagctgtcccttttttgagacatctgctgcataccgctactatattgatgatgttttccatgcccttgtacgggagatacgtaggaaagaaaaggaggcagtactggccatggagaaaaaatctaagcccaaaaacagtgtatggaagaggctaaaatcaccattccggaagaagaaagattcagtaacttgaagagaagatgtgaagtgtttatctgtgaactgcagtgctgtatcaaagcagtccagtaacctgcagtactgagtatggtgcttgctctttcacttaactgataagagggacatgcctactaggagtttttaatgatgtggtatttaaagtattgtctcttagttaagtatgatttattaacccagtggagcactgtctgcttttaaattgtcacattagaatttgttctaccaatgttttgggttctgttgcgctattaattaatgtaaatttgtttatacccaggagaaaaaaaaaaaaaaaaaaa

SEQ ID NO: 981 - DNA, 4289 bp, Homo sapiens
agcagcgacagagccttcctcaaacctgtagtgactgccacactttgcaaggacaccgtagagggggcatgtccgcgctccaacttcctcccgacgcagcctctgattggctcctgggcttataagaaacgcgtgaatgagcagctgccgcgggcagaaagttgccggaggtctccgggtggtatcgccctttcctctttgccagcccgctggcgagccgagccagggcaagatgaggtcgtcctgtgtcctgctcaccgccctggtggcgctggccgcctattacgtctacatcccgctgcctggctccgtgtccgacccctggaagctgatgctgctggacgccactttccggggtgcacagcaagtgagtaacctgatccactacctgggactgagccatcacctgctggcactgaattttatcattgtttcttttggcaaaaaaagcgcgtggtcttctgcccaagtgaaggtgaccgacacagactttgatggtgtggaagtcagagtgtttgaaggccctccgaagcccgaagagccactgaaacgcagcgtcgtttatatccacggaggaggctgggccttggcaagtgcaaaaatcaggtattatgatgagctgtgtacagcaatggctgaggaattgaatgctgtcattgtttccattgaatacaggctagttccaaaggtttattttcctgagcaaattcatgatgttgtacgggccacaaagtatttcctgaagccagaagtcttacagaagtatatggttgatccaggcagaatttgcatttctggtgacagtgctggtggaaatctggctgctgcccttggacaacagtttactcaagatgccagcctaaaaaataagctcaaactacaagctttaatttatccagttcttcaagctttagattttaacacaccatcttatcagcaaaatgtgaacaccccaatcctgccccgctatgtcatggtgaagtattgggtggactacttcaaaggcaactatgactttgtgcaggcaatgatcgttaacaatcacacttcacttgatgtggaagaggctgctgctgtcagggcccgtctaaactggacatccctcttgcctgcatccttcacaaagaactacaagcctgttgtacagaccacaggcaatgccaggattgtccaggagcttcctcagttgctggatgcccgctccgccccactcattgcagaccaggcagtgctgcagctcctcccaaagacctacattctgacgtgtgagcatgatgtcctcagagacgatggcatcatgtatgccaagcgtttggagagtgccggtgtggaggtgaccctggatcactttgaggatggctttcacggatgtatgattttcactagctggcccaccaacttctcagtgggaatccggactaggaatagttacatcaagtggctagatcaaaacctgtaaaggagcaaaacttccagaagcctcgagcccctcttgacctcctacacctgctttggaaagacatgcactttttagttgactaattcttcctcccattcccctctacttgcgagttatggaatttctattccataactgaagtctttatgataacctaatttttaaaaatgaatttgactaacttaagtgcaaaacatgtaaatttggttcccagagtgggccaatctctctgttcttgttatcttagccaactatactgatacctacagctacagaaagcaggactaggaactggaaataactttgggtcctgccttcattaggacgttctttttagaagcagttcttccagctctggatcatagagtgacctttaataagttaaaaaaacgaggactccttaattctgctagagttaaccttgagttcagagcagtattaaatgcgtgcactttcaggtcagtactggggaccaagtaccctctggtcttttgtgaatggatggttttgtttcctatgggaattttggcaaaggttttctggaaagaacaagtttctcaaaggactttcttcctctagaatgttcattttatgagatcgctatctgtaagtccagttggattacaggaatacttgaaagttactttctaccactattagaaaatatgaagtcgcatgcactggatatctatatatcattaggtttttgttgtgtttttggttatgctgtcccccttctccttggggagatatttgggagcaaacttatttagatttagagtaaacttttcattatagagcaagtaaaaacagacaaatgaaacaacctagtgtttcacataaaaatacttctgacataaagtaccaagagcagtgtgaatatacttggcatagtcaaaaaagaaaatacatttaatattagttcaaaattgttaaaaatacctttagaaggtctagtctattattgaaaactcaattttttcacttatatggctttaaaatggagctattttgctacaatataatgtattgtttatttttttaagttatttaatgttaatatacatagctagacttaaggtttttcagaaagatgtccataataaatattaaaaacaatggtattttttaaaaaactgccttagggttttaaaaccttccctacagttataaccacgtgtaattttgtggaaatgatataacagctattaatactactataacataggcataaatattttcgtgtttatatgcatatacaagttaaaataattagaaactatgactgcgcctagtaaagtcatctaggtttatagttcagtagcttaggcaaggcacacactgctcatctccgctttttagggtcagaggaacacaagctcatgttctgagtgaagggcgtacactggcacctggtgttgcctagatcccccatctcctccttccagccaggtctggaagtttcaacagcccaagcttaacttcatgtaaagtcttcactgccagtgggaacatctttgacacaacaagacactccaattgtgatttgagttgaggatctctgcctgccttcctgccgtccttccttcttccccgatccatgctacttttaggggctgcggagagcagcagcagagctgagtaatgatacagggcaccacggagagaaagtagaaccatttcactcctgggaagatggggtatttcccacttccagcaacgaaataacaaatgaaaagttgcatacttattgatgtattgtatgagccagtagcattttatgtacaaaacagaagtcaatgcaacagtatgtatgtgtgcctgtgtgtgtataaaaataaccattgaagctaacttgctaatgtacttaggcaagccacttcccatctctgggcctcgtctttcctccctctaaaatcaaagagctgaattatgtgatccttgaggtctcttccacttataataccaactgtcttgtcagactggcaaattatattggcctctccttatgtggtggtttttttggtaggtcatagttccttatacacagacacctgcatcatcgaaggtctttttttcctaaaaaaaaaaaatgggattttagttcttattctgtgataactatcctcctcatataatactattctttttgacaccatttgaaggaaccaatatttggaccttattttgaggttgtctgtctcgaagaaaaagaaaataaaatgtataggcagggttccttcaattggcattttccccagaattgtgagccaaagcctatagtaattgcagacagcaaatgattccggatctctaaaaggctctctcagatgaaaagggagtaaaggaaaaaagaggtcaaccactgtttctgataatgtacttgagtttcattgttcttttagtttgtattcttataaaaaatgtttacactctgcagattgattttttttttttagtactgtggctttcttttcctattttatgaaaaaaatgataatctttttgtaaaattgtctgtgaaatataaacattaatatataaagaaaaaccttgaagtgctgtatagtgaagtataaattaatgttttattgatttgtgaagaatttaagactattatataattatcttggtggatctattttatgcatgaccttttaacctttgactttgcttatttcccactacgaaggggaaggtagattttatgaatgattttaatagcaaatatattttataaagtgaaaatccagtgtggaggtagcaaagcatctatctattctgaatcatgtttggaaataaaattgctccatctgggaatgtgctttca

SEQ ID NO: 982 - DNA, 5767 bp, Homo sapiens
gagggaggagagttcacttttacttcagtgtcagcgcgcggcggccgtggctggctctggcgagagagcaccgagggagtgggtcgcagatcttcgggcggctaggggaaatcggcgagaggcgggatccgagcgcgccggcggggcgcagagcccgcgagcctggccagcgagggtagccgcggggggcgcgccccgggcgggcccccggagacgcgcaggatgccacacgaagagctgccgtcgctgcagagaccccgctatggctctattgtggacgatgaaaggctctctgcagaggagatggatgagaggaggcggcagaacattgcttatgaatatctgtgccacttagaggaagccaaaaggtggatggaagtttgcttagttgaagaattgccaccaaccactgaattggaagaagggctccggaatggagtttaccttgcaaagttagccaagttctttgccccgaaaatggtatcagagaaaaagatctatgatgtggaacaaacacgttataagaagtctggccttcattttcgacacacagataataccgtccagtggttaagagcgatggagtctattggtctacccaagatattttatccagaaacaacagatgtctatgatcggaaaaacataccaagaatgatatattgcattcacgcactgagtttgtatctgttcaaactaggaatagcaccccagatccaggatttgttgggcaaagtagacttcacagaggaggaaatcagtaatatgagaaaagaacttgagaaatatggaatacagatgccatctttcagcaaaataggtggtattctggccaatgaactgtccgtggatgaagctgcattacatgctgcagttatagccattaatgaagcagttgaaaaaggaatagcagagcaaaccgttgtaacactaagaaacccaaatgcggttttaactttagtggatgacaaccttgcaccagaatatcagaaagaactctgggatgccaaaaagaaaaaagaggaaaatgcaagactgaagaatagctgtatttcagaagaagaaagagatgcttatgaagaactgctgacacaagcagaaatccaaggcaatattaataaagtcaacaggcaggctgcagtggaccatatcaatgctgtcattccggaaggtgaccccgagaatacgctgcttgcactgaagaaaccagaggcccagctgcctgctgtttatccctttgctgctgccatgtatcagaacgaacttttcaacctccagaaacagaacaccatgaactacttggcccacgaggagcttttgattgctgtggaaatgttgtctgctgttgctttactaaaccaggccttggaaagcaacgatcttgtgtctgtgcagaatcaactcagaagccccgcaataggcttaaacaatctggacaaggcatatgtggaacgttatgcaaacacactactctctgttaaactagaagttttatcccaagggcaagataacttaagctggaatgaaattcagaattgtattgatatggttaatgctcaaattcaagaagaaaatgaccgagttgtagctgtagggtacatcaatgaagctattgatgaagggaatcctttgaggactttagaaactttgctcctacctactgcgaatattagtgatgtggacccagcccatgcccagcactaccaggatgttttataccatgctaaatcacagaaactcggagactctgagagtgtttccaaagtgctttggctggatgagatacagcaagccgtcgatgaggccaacgtggacgaggacagagcaaaacaatgggttactctggtggttgatgttaatcagtgtttggaaggaaaaaaatcaagtgatattttgtctgtattgaagtcttccacttctaatgcaaatgacataatcccggagtgtgctgacaaatactatgatgcccttgtgaaggcaaaagagctcaaatctgaaagagtgtctagtgacggttcatggctcaaactcaacctgcacaaaaaatatgactactattacaacactgattcaaaagagagttcctgggtcacacctgaatcatgcttctataaagaatcatggctcacaggaaaagaaatcgaggacattattgaggaagtcacagtaggttacattcgtgagaatatatggtctgcttcagaagagttgcttcttcgctttcaagccacaagctcaggacccatccttagggaagagtttgaagctagaaaatcatttttgcatgaacaagaagagaatgtggtcaaaatacaggctttttggaaaggatataaacaacggaaggagtatatgcacaggcggcaaacgttcattgataatactgattctgttgtgaagattcagtcctggttccgaatggcaactgcaagaaagagctatctttcaagactacagtatttcagagatcataataatgaaattgtgaaaatacagtcactgttgagagcgaacaaagctagagatgactacaaaacattggttggctctgaaaacccaccattaacagtaattcgcaaatttgtatacctgctggaccaaagtgatttggatttccaggaggaactagaggttgcacgattaagggaagaagtagtgaccaagatcagggccaatcaacagctggaaaaagacctgaacctgatggacatcaagattggactgctggtgaagaacaggatcacactagaggatgtaatttcacacagtaaaaagctgaacaagaaaaaaggaggagaaatggaaatactgaataacaccgacaaccaaggaataaaaagtttgagtaaggagaggagaaaaacactagaaacatatcagcagctgttttaccttttacagaccaaccctttatacttggctaagctgattttccagatgccacagaacaagtccactaaatttatggatactgttattttcacactatataattatgcctctaatcagcgagaagaatatctacttctcaagctttttaaaactgctctggaggaagaaataaaatcaaaagtggaccaggtacaggacatagttactggtaaccctacagtcatcaagatggtcgtcagcttcaatagaggtgcccggggacagaacaccctgcgccaactcctggctccagtggtaaaagagatcatcgacgacaagtcgctgattatcaacacaaaccctgtagaggtgtacaaggcttgggtgaaccaactagaaacacagactggagaggccagcaagttgccttatgatgtgaccacagaacaagctctaacatacccagaagtgaaaaataaactggaggcttccattgagaacctgagaagggtcaccgacaaagtcctgaattctatcatttcttcccttgatctactgccttatggattgaggtatatagccaaagtactgaagaattcgatccatgagaaattccccgatgcaacagaagatgagctattaaagattgttggaaacctcctgtactatcggtacatgaatccagccattgtagctccagatggctttgatatcatcgacatgacagctggaggtcagataaattctgaccaaaggagaaacttaggatcagtggccaaggttcttcagcacgcagcctccaacaagctgtttgaaggagaaaatgagcatctctcatctatgaacaattatttatcagagacgtatcaggaattcaggaaatatttcaaagaagcatgtaatgtccctgagccagaagagaagtttaatatggacaaatacacagacctggtgacagtcagcaaaccagtcatttatatttcaattgaagaaatcatcagcacacactcactcctgttggaacaccaggatgcaattgcccctgagaaaaatgacttactgagtgaattgctggggtcgctgggagaggtgccaaccgtggaatcttttcttggggaaggagcagttgaccccaatgaccctaacaaggcaaatacactaagtcagctttcaaagaccgagatttctcttgtcttgacaagcaaatatgacatagaggacggtgaagctatagatagccgaagcctcatgataaagaccaagaagctgataattgatgtgatccggaaccagccagggaacacattgacagaaatcttagagacaccagcaactgcgcaacaggaggtagaccatgccacggacatggtgagccgtgcaatgatagattccaggactccagaagaaatgaagcatagccaatctatgattgaagatgcacagctgcctcttgagcagaagaagaggaaaatccagaggaatcttcggacgttggaacagactggacacgtgtcatccgaaaataaataccaagacattctcaatgagattgccaaggatattcgaaatcaaagaatctatcgtaagcttcgaaaagctgaattggcaaaacttcagcagaccctgaatgcacttaacaagaaggcagcattttatgaagagcaaatcaattattatgacacctacataaagacttgtttagacaacttaaaaagaaaaaatactcggagatcaattaaactagatggaaaaggagaacccaaaggggcgaagagagcgaagccagtgaagtacactgcagcaaagctgcatgagaaaggtgtcctgctagatatagatgatcttcaaacaaaccagtttaagaatgttacatttgatatcatagctactgaagatgtaggcattttcgatgtaagatcaaaattccttggtgttgagatggaaaaggtgcaactcaatattcaggatttacttcagatgcaatatgaaggagtagctgtaatgaaaatgtttgataaggttaaagtgaatgtaaaccttctcatatacctgctgaacaagaagttctatggaaagtgaagtgcctacagaaatttcttggattctgtatcatctggattaggaaatgaatttgtttaatatttttgtttttaaacatgattgaaatcactgcttataaatgtgtgattttttttaaatgaccaaaactgttctgaagaatgtacccaggtgcctttttgctaatttgatactataatagaatgagacataaaatgaattaatggaaacatatccacactgtactgtgatataggtactctgatttaaaactttggacatcctgtgatctgttttaaagttggggggtgggaaatttagctgactagggacaaacatgtaaacctattttcctatgaaaaaagttttaaatgtcccacttgaataacgtaattcttcatagtttttttaatctatggataaatggaaacctaattatttgtaatgaattatttagacagttctaagccctgtcttctgggagttatcaattttaaagagaacttttgtgcaattcaaatgaagtttttataagtaattgaaaatgacaacacaataacactttctgtataaaagtatatattttatgtgatttattcctactaaatgaaagtgcactactgcctcatgtaaagactcttgcacgcagagcctttaagtgactaaggaacaacatagatagtgagcatagtccccacctccacccctcacaatttatttgaatacttcaattgtgcctctcaattttttgtaatgctaaaaaatcagtatctagatggtttttaaatgtattctctggaaattgttttatgtaaaataaatgttacttaattccatt

SEQ ID NO: 983 - DNA, 1494 bp, Homo sapiens
gcggagtagatgagcctggggtgaagtcggtgaaggagtagacacactggggtgaagtgggcaggagaatagatacgcttgggggtgaagtttggttggggtgaagtttaggagaggcgttgcttaggcccttaccttgggatagggtttgggtgagttgggagctggttgaagacctcgagctcagatgacagaaagttaggacttgggattcggcgatgggaaggggcacccggagctcggtagcgcggcgggcaaggcaggcgccatgaccctgattgaaggggtgggtgatgaggtgaccgtccttttctcggtgcttgcctgccttctggtgctggcccttgcctgggtctcaacgcacaccgctgagggcggggacccactgccccagccgtcagggaccccaacgccatcccagcccagcgcagccatggcagctaccgacagcatgagaggggaggccccaggggcagagacccccagcctgagacacagaggtcaagctgcacagccagagcccagcacggggttcacagcaacaccgccagccccggactccccgcaggagcccctcgtgctacggctgaaattcctcaatgattcagagcaggtggccagggcctggccccacgacaccattggctccttgaaaaggacccagtttcccggccgggaacagcaggtgcgactcatctaccaagggcagctgctaggcgacgacacccagaccctgggcagccttcacctccctcccaactgcgttctccactgccacgtgtccacgagagtcggtcccccaaatcccccctgcccgccggggtccgagcccggcccctccgggctggaaatcggcagcctgctgctgcccctgctgctcctgctgttgctgctgctctggtactgccagatccagtaccggcccttctttcccctgaccgccactctgggcctggccggcttcaccctgctcctcagtctcctggcctttgccatgtaccgcccgtagtgcctccgcgggcgcttggcagcgtcgccggcccctccggaccttgctccccgcgccgcggcgggagctgctgcctgcccaggcccgcctctccggcctgcctcttcccgctgccctggagcccagccctgcgccgcagaggactcccgggactggcggaggccccgccctgcgaccgccggggctcggggccacctcccggggctgctgaccctcagcccgcactgggagtgggctcctcggggtcgggcatctgctgtcgctgcctcggccccgggcagagccgggccgccccgggggcccgtcttagtgttctgccggaggacccagccgcctccaatccctgacagctccttgggctgagttggggacgccaggtcggtgggaggctggtgaaggggagcggggaggggcagaggagttccccggaacccgtgcagattaaagtaactgtgaagttttcaaaaaaaaaaaaaaaaaaaaaa

SEQ ID NO: 984 - DNA, 2926 bp, Homo sapiens
cggaagcggaagtcggggggcgcgccagctcgtagcaggggagcgcccgcggcgtcgggtttgggctggaggtcgccatggggcgaggcagcggcaccttcgagcgtctcctagacaaggcgaccagccagctcctgttggagacagattgggagtccattttgcagatctgcgacctgatccgccaaggggacacacaagcaaaatatgctgtgaattccatcaagaagaaagtcaacgacaagaacccacacgtcgccttgtatgccctggaggtcatggaatctgtggtaaagaactgtggccagacagttcatgatgaggtggccaacaagcagaccatggaggagctgaaggacctgctgaagagacaagtggaggtaaacgtccgtaacaagatcctgtacctgatccaggcctgggcgcatgccttccggaacgagcccaagtacaaggtggtccaggacacctaccagatcatgaaggtggaggggcacgtctttccagaattcaaagagagcgatgccatgtttgctgccgagagagccccagactgggtggacgctgaggaatgccaccgctgcagggtgcagttcggggtgatgacccgtaagcaccactgccgggcgtgtgggcagatattctgtggaaagtgttcttccaagtactccaccatccccaagtttggcatcgagaaggaggtgcgcgtgtgtgagccctgctacgagcagctgaacaggaaagcggagggaaaggccacttccaccactgagctgccccccgagtacctgaccagccccctgtctcagcagtcccagctgccccccaagagggacgagacggccctgcaggaggaggaggagctgcagctggccctggcgctgtcacagtcagaggcggaggagaaggagaggctgagacagaagtccacgtacacttcgtaccccaaggcggagcccatgccctcggcctcctcagcgccccccgccagcagcctgtactcttcacctgtgaactcgtcggcgcctctggctgaggacatcgaccctgagctcgcacggtatctcaaccggaactactgggagaagaagcaggaggaggctcgcaagagccccacgccatctgcgcccgtgcccctgacggagccggctgcacagcctggggaagggcacgcagcccccaccaacgtggtggagaaccccctcccggagacagactctcagcccattcctccctctggtggcccctttagtgagccacagttccacaatggcgagtctgaggagagccacgagcagttcctgaaggcgctgcagaacgccgtcaccaccttcgtgaaccgcatgaagagtaaccacatgcggggccgcagcatcaccaatgactcggccgtgctctcactcttccagtccatcaacggcatgcacccgcagctgctggagctgctcaaccagctggacgagcgcaggctgtactatgaggggctgcaggacaagctggcacagatccgcgatgcccggggggcgctgagtgccctgcgcgaagagcaccgggagaagcttcgccgggcagccgaggaggcagagcgccagcgccagatccagctggcccagaagctggagataatgcggcagaagaagcaggagtacctggaggtgcagaggcagctggccatccagcgcctgcaggagcaggagaaggagcggcagatgcggctggagcagcagaagcagacggtccagatgcgcgcgcagatgcccgccttccccctgccctacgcccagctccaggccatgcccgcagccggaggtgtgctctaccagccctcgggaccagccagcttccccagcaccttcagccctgccggctcggtggagggctccccaatgcacggcgtgtacatgagccagccggcccctgccgctggcccctaccccagcatgcccagcactgcggctgatcccagcatggtgagtgcctacatgtacccagcaggggccactggggcgcaggcggccccccaggcccaggccggacccaccgccagccccgcttactcatcctaccagcctactcccacagcgggctaccagaacgtggcctcccaggccccacagagcctcccggccatctctcagcctccgcagtccagcaccatgggctacatggggagccagtcagtctccatgggctaccagccttacaacatgcagaatctcatgaccaccctcccaagccaggatgcgtctctgccaccccagcagccctacatcgcggggcagcagcccatgtaccagcagatggcaccctctggcggtcccccccagcagcagccccccgtggcccagcaaccgcaggcacaggggccgccggcacagggcagcgaggcccagctcatttcattcgactgacccaggccatgctcacgtccggagtaacactacatacagttcacctgaaacgcctcgtctctaactgccgtcgtcctgcctccctgtcctctactgccggtagtgtcccttctctgcgagtgagggggggccttcaccccaagcccacctcccttgtcctcagcctactgcagtccctgagttagtctctgctttctttccccagggctgggccatggggagggaaggactttctcccaggggaagcccccagccctgtgggtcatggtctgtgagaggtggcaggaatggggaccctcaccccccaagcagcctgtgccctctggccgcactgtgagctggctgtggtgtctgggtgtggcctggggctccctctgcaggggcctctctcggcagccacagccaagggtggaggcttcaggtctccagcttctctgcttctcagctgccatctccagtgccccagaatggtacagcgataataaaatgtatttcagaaaaaaaaaaaaaaaaaa

SEQ ID NO: 985 - DNA, 4717 bp, Homo sapiens
gggcggcggcgggtgaggagcctgaggcggcggcgggggtggctccgcgcgcggtggtctcgggggcaaaataacatggcagccagacgaattacacaggagacttttgatgctgtattacaagaaaaagccaaacgatatcacatggatgccagtggtgaggctgtaagcgaaactcttcagtttaaagctcaagatctcttaagggcagtcccaagatccagagcagagatgtatgatgacgtccacagcgatggcagatactccctcagtggatctgtagctcactctagagatgccggaagagaaggcctgagaagtgacgtatttccagggccttccttcagatcaagcaacccttccatcagtgatgacagctactttcgcaaagaatgtggccgggatctggaattttctcactctgattctcgggaccaggtcattggccaccggaaattggggcatttccgttctcaggactggaaatttgcgctccgtggttcttgggaacaagactttggccatccagtttctcaagagtcctcttggtcacaggagtatagttttggtccctctgcagttttgggggactttggatcttccaggctgattgagaaagagtgtttggagaaggagagtcgggattatgacgtggaccatcctggggaggctgactctgtgcttaggggcagcagtcaagtccaggccagaggtcgagctctaaacatcgttgaccaggaaggttccctcctaggaaagggggagactcagggcctgctcacagctaaggggggtgttgggaaacttgtcacattgagaaatgtgagcacaaaaaaaatacccaccgtgaatcgtattactcccaaaacgcagggcactaaccaaatccagaaaaacactccaagtcctgatgtgaccctggggacaaacccagggacagaagatatccagttccccattcagaagatccctctggggctggatctgaagaatcttcggctccccagaagaaagatgagctttgacatcatagataagtctgatgttttttcaagatttgggatagaaataatcaaatgggcaggattccacaccataaaagatgatattaaattttcccaacttttccagactctctttgaacttgaaacagaaacctgtgctaaaatgcttgcctcattcaaatgttccttaaaaccagagcacagagatttttgcttttttactatcaaatttttaaagcactctgctttgaaaacacccagagttgataatgagtttttaaacatgcttttagacaaaggtgctgtgaagaccaaaaattgcttttttgaaatcataaagccttttgacaagtacataatgagacttcaagaccggcttctgaagagtgtcacacctttgcttatggcctgcaatgcctacgagctaagtgtcaagatgaagaccctcagtaaccccctggacttggctcttgccctagaaaccaccaactctctctgccggaagtctttggcccttttgggacagacattttccttggcctcttctttccggcaggagaaaatcttagaagctgtcggcctgcaagatatagctccctcacctgctgcgtttccaaacttcgaagactccactttgtttgggcgagagtacatagaccacctgaaggcctggctagtcagcagcggatgtcccctccaggttaagaaagccgaaccagagccgatgcgagaggaggagaaaatgattcctcctacgaaacctgaaattcaggccaaggctccaagtagtctgagtgatgctgtcccccagcgagcagatcacagggtagtgggcaccatcgaccagcttgtgaaacgtgtcatcgaaggcagcctgtctcccaaagagagaactcttctcaaagaggaccctgcttactggtttttgtctgatgaaaatagtctggagtataaatattacaagctgaagttggcagaaatgcagcggatgagcgagaacttgcgaggagccgaccagaagccgacctcagcagactgtgcagtgagggccatgctgtactcccgggctgtccgcaacctcaagaagaaactccttccgtggcagcggcgggggctcctccgtgctcaagggctccggggctggaaggcgaggagagcgaccaccgggacccagaccctcctatcctcaggcaccaggctgaaacaccacggccggcaggctccaggcctctcacaggcaaaaccatccctgccagacagaaatgatgctgccaaggactgcccgccagacccagttggaccttctcctcaggaccccagcttagaagcctcaggcccatcccccaagccagcaggagtggacatctctgaagcacctcagacctcttctccctgcccatctgctgacattgacatgaagacaatggagactgcagagaaactggctagatttgttgctcaggtgggaccagagatcgaacaattcagcatagaaaacagcaccgataaccctgacctgtggtttctacatgaccaaaatagttctgctttcaaattctatcgaaagaaagtgtttgaactatgtccatcaatttgtttcacgtcatctccgcacaaccttcacactggtggtggtgacaccacgggttctcaggagagccccgtggacctcatggaaggggaagcagagtttgaagacgagccccctccgcgggaggctgagctggagagcccagaggtgatgcctgaggaggaggacgaggacgatgaggatgggggagaggaggcccccgctcctggaggggcgggcaagtctgagggcagcacccctgccgacggccttcccggcgaggctgccgaggacgacctggctggagcacctgccttgtcacaggcctcctcaggtacctgcttccctcggaagaggatcagcagcaagtcattgaaggttggcatgattccagctcccaagagagtgtgtctcatccaggagccaaaagtccatgaaccagttcgaattgcctatgacaggcctcggggtcgtcccatgtccaaaaagaagaaacccaaggacttggacttcgcccagcagaagctgaccgataagaacctgggcttccagatgctgcagaagatgggctggaaggagggccatggcctgggctccctcggaaagggcatcagggagccggtcagcgtgggaaccccctcggaaggggaagggttgggtgctgacgggcaggagcacaaagaagacacattcgatgtgttccgacagaggatgatgcagatgtacagacacaagcgggccaacaaatagatcaaaaccactgatgtgaaagataagccttgaagcagcaattgcccttaaaacatcatccctgccctggatcggcctggagccagtgcccaagtacggtttggtgtgtacatgaaaacaaacgtctctgcagtctctggggcggaggtttcgctggcttttctttctctcaaagaaaaaaacatgcaccattttcaatgtgcttttgcctctcctctctgttcacatgcttttagcagcaagtcccctccaaatctgtcttggttccccttcagaaggtggcgctgcccccgaaaggcacctcagcctgtgagtgctgaggaaccagctcctctggctgattttccagttggactggccattgctctccagaagtgctctgttagcaaacgtgatgtggaaacgatcacagatggtgttttctcgttgttcgccagaatttatacgggggagacaaattcccggtaattaccaagtctgcactcgggtaccaaagctctgaagctctctgaacagttgccatacttgagttgatgaatgtgttattcatggtgtctcatctcatcaatgcatcttgagagacttaatgaaattttagcaacagtatagaatagctctatcgggtggggagtaatcattaaacagatgaaatcggccccagatttacatgtctctttagaatccacagtgtaagcaaactacagttacaaagggatgggggttgtaaaccctctgagactctgcacttttcgcacgtatggcatcgtcaagtgctgtcttattacagcctttgtaaggagaggcaggctcctcctggggtgggctctgcagctgctctatttccaggcatgtgatcgcccccgctctccagattccccagcactctgctgcgtgtaactccactcaattctccactcatccttccttgtgaagcaggatcgttgaagttttaagtatgggcaaaaatctggaaaacttaggatccctctgacaccccaggattaggggacacagcagtggctagggcatcagccacagaactgagcgggaaatgccacttgtattggctgtaaagaaatcctggctttgggccaggcacagtggctcaagcctgtaatcccagcactttaggaggttgaggcggatggatcacctgaggtcaggagtttgagaccagcctggccaacatggtgtaaccccgtctctactaaaaatacaaaaaaattagccaggcgtggtagcgggcacctgtaatcccagctactcaggaggctgaggcaggagaatcacttgaaccggggaggcagaggttgcagtgagctgagatcatgccactccactccagcctgggcgacagagcaagactccatctctaaaaaaaaaaaaaaaaaaa

SEQ ID NO: 986 - DNA, 3663 bp, Homo sapiens
gctgcgcggcgcggcgctgcggagaccgttggttcatttgcatgtccccgcctcgcgcggcggcggcggcgggtgaggagcctgaggcggcggcgggggtggctccgcgcgcggtggtctcgggggcaaaataacatggcagccagacgaattacacaggagacttttgatgctgtattacaagaaaaagccaaacgatatcacatggatgccagtggtgaggctgtaagcgaaactcttcagtttaaagctcaagatctcttaagggcagtcccaagatccagagcagagatgtatgatgacgtccacagcgatggcagatactccctcagtggatctgtagctcactctagagatgccggaagagaaggcctgagaagtgacgtatttccagggccttccttcagatcaagcaacccttccatcagtgatgacagctactttcgcaaagaatgtggccgggatctggaattttctcactctgattctcgggaccaggtcattggccaccggaaattggggcatttccgttctcaggactggaaatttgcgctccgtggttcttgggaacaagactttggccatccagtttctcaagagtcctcttggtcacaggagtatagttttggtccctctgcagttttgggggactttggatcttccaggctgattgagaaagagtgtttggagaaggagagtcgggattatgacgtggaccatcctggggaggctgactctgtgcttaggggcagcagtcaagtccaggccagaggtcgagctctaaacatcgttgaccaggaaggttccctcctaggaaagggggagactcagggcctgctcacagctaaggggggtgttgggaaacttgtcacattgagaaatgtgagcacaaaaaaaatacccaccgtgaatcgtattactcccaaaactcagggcactaaccaaatccagaaaaacactccaagtcctgatgtgaccctggggacaaacccagggacagaagatatccagttccccattcagaagatccctctggggctggatctgaagaatcttcggctccccagaagaaagatgagctttgacatcatagataagtctgatgttttttcaagatttgggatagaaataatcaaatgggcaggattccacaccataaaagatgatattaaattttcccaacttttccagactctctttgaacttgaaacagaaacctgtgctaaaatgcttgcctcattcaaatgttccttaaaaccagagcacagagatttttgcttttttactatcaaatttttaaagcactctgctttgaaaacacccagagttgataatgagtttttaaacatgcttttagacaaaggtgctgtgaagaccaaaaattgcttttttgaaatcataaagccttttgacaagtacataatgagacttcaagaccggcttctgaagagtgtcacacctttgcttatggcctgcaatgcctacgagctaagtgtcaagatgaagaccctcagtaaccccctggacttggctcttgccctagaaaccaccaactctctctgccggaagtctttggcccttttgggacagacattttccttggcctcttctttccggcaggagaaaatcttagaagctgtcggcctgcaagatatagctccctcacctgctgcgtttccaaacttcgaagactccactttgtttgggcgagagtacatagaccacctgaaggcctggctagtcagcagcggatgtcccctccaggttaagaaagccgaaccagagccgatgcgagaggaggagaaaatgattcctcctacgaaacctgaaattcaggccaaggctccaagtagtctgagtgatgctgtcccccagcgagcagatcacagggtagtgggcaccatcgaccagcttgtgaaacgtgtcatcgaaggcagcctgtctcccaaagagagaactcttctcaaagaggaccctgcttactggtttttgtctgatgaaaatagtctggagtataaatattacaagctgaagttggcagaaatgcagcggatgagcgagaacttgcgaggagccgaccagaagccgacctcagcagactgtgcagtgagggccatgctgtactcccgggctgtccgcaacctcaagaagaaactccttccgtggcagcggcgggggctcctccgtgctcaagggctccggggctggaaggcgaggagagcgaccaccgggacccagaccctcctatcctcaggcaccaggctgaaacaccacggccggcaggctccaggcctctcacaggcaaaaccatccctgccagacagaaatgatgctgccaaggactgcccgccagacccagttggaccttctcctcaggaccccagcttagaagcctcaggcccatcccccaagccagcaggagtggacatctctgaagcacctcagacctcttctccctgcccatctgctgacattgacatgaagacaatggagactgcagagaaactggctagatttgttgctcaggtgggaccagagatcgaacaattcagcatagaaaacagcaccgataaccctgacctgtggtttctacatgaccaaaatagttctgctttcaaattctatcgaaagaaagtgtttgaactatgtccatcaatttgtttcacgtcatctccgcacaaccttcacactggtggtggtgacaccacgggttctcaggagagccccgtggacctcatggaaggggaagcagagtttgaagacgagccccctccgcgggaggctgagctggagagcccagaggtgatgcctgaggaggaggacgaggacgatgaggatgggggagaggaggcccccgctcctggaggggcgggcaagtctgagggcagcacccctgccgacggccttcccggcgaggctgccgaggacgacctggctggagcacctgccttgtcacaggcctcctcaggtacctgcttccctcggaagaggatcagcagcaagtcattgaaggttggcatgattccagctcccaagagagtgtgtctcatccaggagccaaaagtccatgaaccagttcgaattgcctatgacaggcctcggggtcgtcccatgtccaaaaagaagaaacccaaggacttggacttcgcccagcagaagctgaccgataagaacctgggcttccagatgctgcagaagatgggctggaaggagggccatggcctgggctccctcggaaagggcatcagggagccggtcagcgtgggaaccccctcggaaggggaagggttgggtgctgacgggcaggagcacaaagaagacacattcgatgtgttccgacagaggatgatgcagatgtacagacacaagcgggccaacaaatagttccagggtcacccccgagaggacaacaggcatctggaagtgctctctcgccactctgggtgctttactgtctctggcttgtttccatcactggaaatcacttagagaattgtagtgtttttggtccttgataaagcctagaagacatttgtgatgttacaaaatggaagttttcttttgtttctgttttttaagatctaagaagttgtgaatgttgttaatcatttagccgttgcaataaatgtagaggaaatgcaaaaaaaaaaaaaaaaaaaaaaa

SEQ ID NO: 987 - DNA, 3856 bp, Homo sapiens
agcggagcgtctgaggaggcgcgggccgctgcgggctcgggcgccgcagcgcgccggcccgagcccctggacgaggcccacggagccgctcgccccgacccagccgcccgatgtcctcaaaatggaggcagcgggggcggcggcgtgaagaaagcggcgctgtgggcgcgggagtaggggcccgggcggaggcggtggcgggatggggctgctgctcatgatcctggcgtcggccgtgctgggttccttcctcacgctcctcgcccagttcttcctgctgtaccgcagacagcccgagccgccggcggacgaggccgcccgcgcgggcgagggcttccgctacatcaagccagtgccgggcctgctcctaagggagtacctttatggcggcggccgggatgaggagccctccggagcggcccctgagggcggcgcgacccccaccgcggcccccgagacccccgccccgccgacgcgggagacttgctacttcctcaacgccaccatcctattcctgttccgggagttgcgggacaccgcgctgacccgccgctgggtcaccaagaagatcaaggtggagttcgaggagctgctgcagaccaagacggccgggcgcctgctggaggggctgagcctgcgggacgtgttcctgggcgagacggtgcccttcatcaagaccatccggctcgtgcggccagtcgtgccctcggccaccggggagcccgatggccctgaaggggaggcgctgcccgccgcctgccccgaggagctggccttcgaggcggaggtggagtacaacgggggcttccacctggccatcgacgtggacctggtcttcggcaagtccgcctacttgtttgtcaagctgtcccgcgtggtgggaaggctgcgcttggtctttacgcgcgtgcccttcacccactggttcttctccttcgtggaagacccgctgatcgacttcgaggtgcgctcccagtttgaagggcggcccatgccccagctcacctccatcatcgtcaaccagctcaagaagatcatcaagcgcaagcacaccctaccgaattacaagatcaggtttaagccgttttttccataccagaccttgcaaggatttgaagaagatgaagagcatatccatatacaacaatgggcacttactgaaggccgtcttaaagttacgttgttagaatgtagcaggttactcatttttggatcctatgacagagaggcaaatgttcattgtacacttgagttaagcagtagtgtttgggaagaaaaacagaggagttctattaagacggttgaattaataaaaggaaatttacaaagtgttggacttacacttcgtcttgtccagtcaactgatgggtatgctgggcacgtcatcattgaaactgtggctccaaactcgcctgctgcaattgcagatcttcagcggggagatcgacttatcgccattggaggtgtgaaaatcacatcaacactgcaagtgttgaagcttatcaagcaggctggtgaccgagtcctggtgtactatgaaaggcctgttggccagagtaatcaaggtgcagtgctgcaagataactttggccagttggaagaaaactttttgtcaagctcatgccaatcgggttatgaagaggaagctgccgggttgacagtagatactgaaagtagagagctggattctgaatttgaagacttggcaagtgatgtcagagcacaaaatgagttcaaagatgaggcacaatcattaagtcatagtcccaaacgtgttccaacaacactttctattaaaccccttggagctatatcaccagttttaaaccgtaaattagctgtaggaagtcacccactaccaccgaaaattcagtccaaagatggaaataaacctccacccctaaaaacttctgagataacagacccagcacaagtgtcaaaaccaacccaaggatctgctttcaaaccacctgtgccaccacgaccacaagcgaaagttcctttgccttccgccgatgctccaaatcaggcagaaccagatgttctcgttgaaaagccagagaaggtggtgccacctcctcttgtagataaatctgctgaaaagcaagcaaaaaatgtggatgccatagacgatgcagctgcacctaagcaatttttagcaaagcaagaagtggccaaagatgtcacttcagaaacttcctgccctactaaggacagttcggacgaccgtcaaacatgggaatcatcagaaattctttatcgtaataagctaggaaaatggacaagaaccagagcatcctgtttgtttgacatagaagcctgtcacaggtacttaaacattgcattgtggtgcagggatcctttcaagttgggaggtctcatctgtttggggcatgttagtttaaaacttgaagatgtggctttaggatgcctagctacatcaaacacggaatacctttccaaattgagactggaagccccctcacctaaggctatagtcactagaaccgcactacgcaatctgagtatgcaaaagggattcaatgacaaattttgctatggtgacattactattcacttcaaatatttgaaagaaggagaatcagaccaccatgtagttactaacgtagaaaaagaaaaagaaccccatttggttgaagaagtttctgttctccctaaagaggagcaatttgttggacagatgggtttaacagaaaacaaacacagttttcaggatactcagttccagaacccaacatggtgtgactactgtaagaaaaaagtttggactaaagcagcttcccagtgtatgttttgtgcttatgtttgccataaaaaatgtcaagaaaagtgtctagctgagacttctgtttgtggagcaactgataggcgaatagacaggacactgaaaaaccttaggctggaaggacaggaaaccctcttaggcctgcctcctcgtgttgatgctgaagctagcaagtcagtcaataaaacaacaggtttgacaaggcatattatcaatactagttctcgtttattaaatttgcgtcaagtctctaaaactcgcctttctgaaccaggaaccgatctcgtagaaccttcaccaaaacacacacccaacacgtcagacaacgaaggcagtgacacggaggtctgtggtccaaacagtccttctaaacggggaaacagcacaggaataaagttagtgagaaaagagggtggtctggatgacagtgttttcattgcagttaaagaaattggtcgtgatctgtacaggggcttgcctacagaggaaaggatccagaaactagagttcatgttggataagctacagaatgaaattgatcaggagttggaacacaataattcccttgttagagaagaaaaagagacaactgatacaaggaaaaaatcacttctttctgctgccttagctaaatcaggtgaaaggctacaagctctaacacttcttatgattcactacagagcaggcattgaagatatagaaactttagaaagtctgtctttagaccagcactccaaaaaaataagcaagtacacagatgatacagaagaagaccttgataatgaaataagccaactaatagactctcagccattcagcagcatatcagatgacttatttggcccatccgagtctgtgtagcagacaggtctatttaaactttcaaatgaacagggtaaagttgcatctaaagtaccacagatacaaccatgtttaaatcctcgtatgcactctggcctgcttctccagttacttgcttgtgtaagaacaaaaatgagaaaggttgttttccagtaaaaacatgaccagcttacaaaaaaaaaaaaaaaa

SEQ ID NO: 988 - DNA, 4471 bp, Homo sapiens
gcggaacgctagcggtgttggcgcggagtggaccccggctgcggcccctggcaatggcgccaccatcggtcccggagtcccagtgatgctctgtgccatagagcccccataacttcactactacgtgatagtaaatccccggcaaaaaccagcagcgccttgcaagcccacgccaccccaagcatcccaggactcttctgaaacgactccgggctaccagatcggccgtccagctggaatcaaccgatggaggctccgctgcaaactggaatggtgcttggcgtgatgatcggggccggagtggcggtggtggtcacggccgtgctcatcctcctggtggtgcggaggctgcgagtgccaaaaaccccagccccggatggcccccggtatcggttccggaagagggacaaagtgctcttctatggccggaagattatgcggaaggtgtcacaatccacctcctccctcgtggatacctctgtctccgccacctcccggccacgcatgaggaagaaactgaagatgctcaacattgccaagaagatcctgcgcatccagaaagagacgcccacgctgcagcggaaggagcccccgcccgcagtgctagaagctgacctgaccgagggcgacctggctaactcccatctgccctctgaagtgctttatatgctcaagaacgtccgggtgctgggccacttcgagaagccactcttcctggagctctgccgccacatggtcttccagcggctgggccagggtgactacgtcttccggccgggccagccagatgccagcatctacgtggtgcaggacgggctgctggagctctgtctgccagggcctgacgggaaggagtgtgtggtgaaggaagtggttcctggggacagcgtcaacagccttctcagcatcctggatgtcatcaccggtcaccagcatccccagcggaccgtgtctgcccgggcggcccgggactccacggtgctgcgcctgccggtggaagcattctccgcggtcttcaccaagtacccggagagcttggtgcgggtcgtgcagatcatcatggtgcggctgcagcgagtcaccttcctggcactgcacaactacctgggtctgaccaatgagctcttcagccacgagatccagcccctgcgtctgttccccagccccggcctcccaactcgcaccagccctgtgcggggctccaagagaatggtcagcacctcagctacagacgagcccagggagaccccagggcggccacccgatcccaccggggccccgctgcctggacctacaggggaccctgtgaagcccacatccctggaaaccccctcgccccctctgctgagccgctgcgtctccatgccaggggacatctcaggcttgcagggtggcccccgctccgacttcgacatggcctatgagcgtggccggatctccgtgtccctgcaagaagaggcctccggggggtccctggcagcccccgctcggacccccactcaggagcctcgtgagcagccggcaggcgcctgtgaatacagctactgtgaggatgagtcggccactggtggctgccctttcgggccctaccagggccgccagaccagcagcatcttcgaggcagcaaagcaggagctggccaagctgatgcggattgaggacccctccctcctgaacagcagagtcttgctgcaccacgccaaagctggcaccatcattgcccgccagggagaccaggacgtgagcctgcacttcgtgctctggggctgcctgcacgtgtaccagcgcatgatcgacaaggcggaggacgtgtgcctgttcgtagcgcagcccggggaactggtggggcagctggcggtgctcactggcgaacctctcatcttcacactgcgagcccaacgcgactgcaccttcctgcggatctccaagtccgacttctatgagatcatgcgcgcacagcccagtgtggtgctgagtgcggcgcacacggtggcagccaggatgtcgcccttcgtgcgccagatggacttcgccatcgactggactgcagtggaggcgggacgcgcgctgtacaggcagggcgaccgctccgactgcacttacatcgtgctcaatgggcggctgcgtagcgtgatccagcgaggcagtggcaagaaggagctggtgggcgagtacggccgcggcgacctcatcggcgtggtggaggcactgacccggcagccgcgagccacgacggtgcacgcggtgcgcgacacggagctggccaagcttcccgagggcaccttgggtcacatcaaacgccggtacccgcaggtcgtgacccgccttatccacctactgagccagaaaattctagggaatttgcagcagctgcaaggacccttcccagcaggctctgggttgggtgtgcccccacactcggaactcaccaacccagccagcaacctggcaactgtggcaatcctgcctgtgtgtgctgaggtccccatggtggccttcacgctggagctgcagcacgccctgcaggccatcggtccgacgctactccttaacagtgacatcatccgggcacgcctgggggcctccgcactggatagcatccaagagttccggctgtcagggtggctggcccagcaggaggatgcacaccgtatcgtactctaccagacggacgcctcgctgacgccctggaccgtgcgctgcctgcgacaggccgactgcatcctcattgtgggcctgggggaccaggagcctaccctcggccagctggagcagatgctggagaacacggctgtgcgcgcccttaagcagctagtcctgctccaccgagaggagggcgcgggccccacgcgcaccgtggagtggctaaatatgcgcagctggtgctcggggcacctgcacctgcgctgtccgcgccgcctcttttcgcgccgcagccctgccaagctgcatgagctctacgagaaggttttctccaggcgcgcggaccggcacagcgacttctcccgcttggcgagggtgctcacggggaacaccattgcccttgtgctaggcgggggcggggccaggggctgctcgcacatcggagtactaaaggcattagaggaggcgggggtccccgtggacctggtgggcggcacgtccattggctctttcatcggagcgttgtacgcggaggagcgcagcgccagccgcacgaggcagcgggcccgggagtgggccaagagcatgacttcggtgctggaacctgtgttggacctcacgtacccagtcacctccatgttcactgggtctgcctttaaccgcagcatccatcgggtcttccaggataagcagattgaggacctgtggctgccttacttcaacgtgaccacagatatcaccgcctcagccatgcgagtccacaaagatggctccctgtggcggtacgtgcgcgccagcatgacgctgtcgggctacctgcccccgctgtgcgaccccaaggacgggcacctactcatggatggcggctacatcaacaatctgccagcggacatcgcccgcagcatgggtgccaaaacggtcatcgccattgacgtggggagccaggatgagacggacctcagcacctacggggacagcctgtccggctggtggctgctgtggaagcggctgaatccctgggctgacaaggtaaaggttccagacatggctgaaatccagtcccgcctggcctacgtgtcctgtgtgcggcagctagaggttgtcaagtccagctcctactgcgagtacctgcgcccgcccatcgactgcttcaagaccatggactttgggaagttcgaccagatctatgatgtgggctaccagtacgggaaggcggtgtttggaggctggagccgtggcaacgtcattgagaaaatgctcacagaccggcggtctacagaccttaatgagagccgccgtgcagacgtgcttgccttcccaagctctggcttcactgacttggcagagattgtgtcccggattgagccccccacgagctatgtctctgatggctgtgctgacggagaggagtcagattgtctgacagagtatgaggaggacgccggacccgactgctcgagggatgaaggggggtcccccgagggcgcaagccccagcactgcctccgagatggaggaggagaagtcgattctccggcaacgacgctgtctgccccaggagccgcccggctcagccacagatgcctgaggacctcgacaggggtcaccccctccctcccacccctggactgggctgggggtggccccgtgggggtagctcactccccctcctgctgctatgcctgtgacccccgcggcccacacactggactgacctgccctgagcggggatgcagtgttgcactgatgacttgaccagcccctcccccaataaactcgcctcttggaaaaaaaaaaaaaaaaaaaaaaaaaaaaaaaaaaaaaaaaaa

SEQ ID NO: 989 - DNA, 2331 bp, Homo sapiens
acagcggtgaccgagtgagaggagggcggcggcggcggcggcggcggcggcgtgaagtcactgctgctctgggttcgggttggcgactgaaggcggtaccggcctcccggaacagcccgggggagggcttaggtgcagaagggcaggctggccgcggccggtttggtctggggaccacgggctggagcaggtggaaatttaaaattgtttacagtcaacactgtttccagccatgggtttgtctccatctgctcctgctgttgcagttcaggcctcaaatgcttcagcgtccccaccttcaggatgcccgatgcatgaagggaaaatgaaaggctgtccagtgaatacagggccatctggcccaacctgtgagaagaaaacatactctgtgcctgcccaccaggaacgcgcctatgagtacgtggagtgtcccattaggggcactgcggctgagaataaggagaacctagatccttcaaatctgatgccaccaccaaatcaaacaccagctccagatcagccatttgcattgtctactgtcagagaagagtcatccattccgagagcagattcagagaaaaagtgggtttacccttctgagcagatgttctggaatgcaatgttaaagaaagggtggaagtggaaggatgaggatatcagtcagaaggatatgtataatatcattagaattcacaatcagaataacgagcaggcttggaaggagattttgaagtgggaagcccttcatgctgcagagtgtccttgtggtccatcattgatccggtttggagggaaagcaaaagagtattcaccaagggcacgaattcgttcctggatggggtatgagttgccttttgataggcacgattggatcataaaccgttgcgggacagaagttagatatgtgattgattattatgatggtggtgaagtcaacaaggactaccagttcaccatcctggacgtccgtcctgccttagattcactttcggcagtatgggacagaatgaaagtcgcttggtggcgttggacctcgtaaagcactgtttcagatggaaaaatataaactatttttttctgagcgatacattaaactattttccccagattgaattgcactcatgatgtaatgggaacttcaagtgggtaatcacactttttccttcacttaacgaaggatactatgcactgttcacttttgacttgtgttgtaccttgcagtttatagcagatcattttgttttcttcctacttagcttaagtgggaagcagtctctcagtttttcctttacctgcagtattgtctgtatatttcatctcgaaaagcctgaacaacctctgaaaaagagcttttaaaaagtgatgaaagttgcttttttttcttactattttctcaggaatactccagagatgtaaagcctgagagtccatggtgatgctcaagagctttcatctggccaaatattttaactaaagctgttcattataaataagaggtgattataccttttttaaaaaaagttaccattatttctaaagcccctatggtatgattgtgacctttaacaaaatgcaaaggtatacactggaaaggtactcagcaaaattctctccaaattctgatttatatgaatttcttggactggatagagtactttcaactataccttcctttggaacataccttttaaaaaatgttccctttaaatcctgttattctaatatgtaactctgctcccaacaaacaggtctcctcattgtccttggcatttgacaagttatcccaacttcgaatctcatttcttcctttgctggcagcctccacccttccccacatcagtcggcctaatccaaaccttgaaagcctggcttaagtcccagtatcagtgatggtccccctctaaaacatgattttatatttggctgagtgttaaaattcacaagatgagcatttttttcccagatggagaacgcttcaactcagtctagattttttttgtttgttttaaggaagctctaagtttgccattgaaactttttgtaccagtaatccataaactggttgttctatttatagcagcatgttacaaatgactgctttttttttttaactgtctatactattaaatcctttaatttatcctgaatgctgtagtgttaaattagtggatgaaattggcagtctgtgggtgattaatttggtatggatttgtcagttttgtgtggagtttaagaaatagaacagccttaaactctacatttcaaaatacttgtatattttaaaataaagctgattagttcacaggttttaaaaaaaaaaaaaaaaaaaaa

SEQ ID NO: 990 - DNA, 7300 bp, Homo sapiens
cagccgggtgacccaggccgaggccggcagaagacagcctgatgccttgaagacttcctcttgcacttttgttggagggtgctggtttgctaaaagcagagagtatttttctttttatttattttgtttttaattttttaattttagctccagctcagttgcccagactggagagcagtggccaatcatagcttactgcctcctggaactcctggctcaatcgatcctcctggataagcctcctccgggtactatagcttcatggcggctgaagagatgcattggcctgtccctatgaaggccattggtgcccagaacctgctaaccatgcctgggggcgtggccaaggctggctacctgcacaagaagggcggtacccagctgcagctgctgaaatggcccctgcgctttgtcatcatccacaaacgctgcgtctactacttcaagagtagcacctctgcctccccgcagggcgccttctccctgagtggctataaccgggtgatgcgggcggctgaggagaccacgtccaacaacgttttccccttcaagatcatccacatcagcaagaagcaccgcacgtggttcttctcggcctcctccgaggaggagcgcaagagctggatggccttgctgcgcagggagattggccacttccacgaaaagaaagacctgcccttggacaccagcgactccagctcggacacagacagcttctacggcgcagttgagcggcctgtggatatcagcctttccccgtaccccacggacaatgaagactatgagcacgacgatgaggatgactcctacctggagcctgactccccggagcccggaaggcttgaggatgccctgatgcacccaccggcttacccaccacccccagtgcccacgcccaggaagccagccttctctgacatgccccgggcccactcctttacctccaagggccccggtcccctactgccacccccgccccctaagcacggcctcccagatgttggcctggctgctgaggactccaagagggacccactgtgcccgaggcgggctgagccttgccccagggtacctgctaccccccgaaggatgagcgatccccctctgagcaccatgcccaccgcacccggcctccggaaacccccttgcttccgggagagtgccagccccagcccggagccctggacccctggccacggggcctgctccacttccagtgctgccatcatggccactgccacctccagaaactgtgacaaactcaagtccttccacctgtccccccgaggaccacccacatctgagcccccacctgtgccagccaacaagcccaagttcctgaagatagctgaagaggaccccccaagggaggcagccatgcccggactctttgtgccccccgtggctccccggcctcctgcgctgaagctgccagtgcctgaggccatggcgcggcccgcagtcctgcccaggccagagaagccgcagctcccgcacctccagcgatcacccctcgatgggcagagtttcaggagcttctcctttgaaaagccccggcaaccctcacaggctgacactggcggggacgactcggacgaggactatgagaaggtgccactgcccaactcggtcttcgtcaacaccacggagtcctgcgaagtggaaaggttgttcaaggctacaagcccccggggagagccccaggatggactctactgcatccggaactcctctaccaagtcggggaaggtcctggttgtgtgggacgaaacctctaacaaagtgaggaactatcgcatttttgagaaggactctaagttctacctggagggcgaggtcctgtttgtgagtgtgggcagcatggtggagcactaccacacccacgtgctgcccagccaccagagcctgctgctgcggcacccctacggctacactgggcctaggtgatggcagtccatgtggctgccaggccaaggcagtcacaggggccctgaccccaggccacacagacggacatgggcccacatgggagggtgagcaggagcaaggctgtgcttgcctagggcctctgtgatggacatctcgtaggacccagccagtctcatccagcaggttgggttctagggctgaaccaggcgccaggctccagaggacgaagggactctgttgccccacactaacttgccctgtcccaatcccagaaacccaggaccaagctgtgcctgggctccaaggacaggaacactggtccccccatcacactcacccctaagtgggctgggagccaggcagggccagggcagctgggtgggggccggggctggccctgggacccccaggaacgctaagacacaggctccagtaggggctgttgcctccaataaagcagcagtgagctttgccttggtggctggggcttgattgggaaggaggggattaccagcttactgggtgcccatgctgatgtctaagtggtgaccgcagcagtacccgggaaccccaacagttggttgtcttgtcttccagggtgcaggtcactgagtgacttccccagggtgcacagcgagtaacagatcaggacccaaacttgggcagtctgggctgggagcccacaccccactcaccagttctgctgcctcaggtcaggccagggcagtgctgctgcagagctagaaggccctgcagctacagctgcttcattccctgcattagtgcctggttactgggtacctcctgagtggctgtccccgttccagaacttgcatacactgagcgggctacagagctagaagccctgcagctacagctgcttcattccctgcattagcgagcagttattgggtacctcctgcatgcctggtcccattccagacaggggcctctggcctggctgagttcacagcccagtctggggacagctgggtatgaggtgcttacggcacagtgtccagggcagctgggtgtgcagggactgggggctcccggaagattttttggaggaagtaacagctacgatgggatgggaacagtggaccctaagcaggccaagggtgcgtagggacggtggtacccagatgcccaagtcttccaggcaatacctggctcaggcccagccccaatccatccccttactttctgccatggagttccagcaggtcactctccctggcacaccttccaggctggatttttaatgaaacagactcagggaggtaggggctggcagggaccctagaatccttgtgatttttcttagcaccttatgtcagggaaacctaaactgaggtcagcacttgggcccactgacagtgactgactgggggagaaggtcctgcagcccccttcccctgggtgtgttctggggacctgtggtttgctggcggaaacaaatgatgaggctggttagcggatgtgggaggctgtgaccccagggggccatagggtgcggtggaactgcaggccctgcagatgacggcagccagctgcttccaggaaccaggtgtccaaggccacctctgcaggggtttcctcttcagcctgcctggggtgagaggtcagtgcaccacagccgaggctggagcacagggagcttctgttgttctgatctatctctggaaaaccagccattcctcctccctgcagtcagaattctttgccctgtctgacctgaacttgcttagggagtcatgccactccccactgtggccatagtttctcttcctgtaaaattttattattttagttttttgtttttgagatgtagtctcaccctgtcgcccaggctggagtgcaatgccgtgatctccgctcactgccacctccgcctctctagttcaagcgattttcctgcctcagcctcccgagtagctgggattccaggcgcccgccaccacgcctggctaattttttgtatttttagtagagacgggattttatcatgttggccaggctggtctcgaactcctgacctcaggtgatctgcccaccttggcctcccaaagtgctgggattacaggcatgagccactgtgcctggccccttcctgtaaaatttttaaatggagaattgggtgcgagatgtggtttccagcctggtgcctggggtgctgagctagtgagtggtgcagtccaggacacctttgctttatgtcacttacacggtcacctggagccggctcaagtggctaaagcatcctggggcccagagccaggtgatagtccctctggccaactggacagttgaggcttgtggttaacccgaagcccagctggggccttggtccagcttcgcttcccagattctgcacctgctagcacagctgtccacgtctgtgtgagctgttctaggccgagggcctcagtttcaagagtgtgttggggtgggatggggcaggccgtggtcctccagcatgaagaaggagccatgaggagttcccatgacctcccgagacttgccataagtgttctagtccacatataagggtagggttgggattaccatttactgaccacatctgtgaggtgccgagctgggtgcttgacatcatttgcttggagaagcagctgttagtagacccattttacaggtgagagaaccaagtctcacagaggcctgggttcaagtcccacctctgccactaactggcatgtgaccctatctatccttcactgctctgagcctagaccctggcccctgcctggctccctgccaggctccctgccacccctcacgacctctgatggtcgttgtgggggtctcttgcctggctcccagggctagggttagggctctggaggtgctttcactcaaccaagggggccacagcactggggagtgaaactgccccgcctcaccctgcgttgccctctgggtctgtgagggtgggctggcaggaggcctaggccttgccctaggggcagtcctgcttcctcattttatagatagggaaactgaggctttgggaggactcactgacatacctaccttcaagatgagttcaggtgggctcagttctggggcttgggaaaagggccccagtggctttgggaagcacccccagcccagggtgaaacatgcttcttctcttcctgtggttccatccgaaggattgtggtgagccccgtgccttcagttaataaagatttgtattgtgaaaagattttttcttttttttttgggacacagtctcactctgtcgcccaggctagagtggattggcgtgatctcggctcaatgcaaatctccagggttcaatcgattctcctgcctcaccctcccatgtagctgggattacagctgcctgccaaatttttgtatttttagtggaaccggggtttcaccatgttggccaggctggtcttgaactcctgacctcaactgatccgcccaccttggcctcccaagtgctgggattacaggcgcgagccacggcgcccagccttgaaaagatgtttttagaaccagaagaaacctcggttcccactgatccttctgggccacgttgtgcggagctcccctgctggttggggctcagcgcagccccagggaggtgcttcctgcacctcaggatgggcgagggtgggcattgggggagagggggacctgggacctgcggcttagttccctgaggcaggcagggcttattggggccatttcatagaaaggcagattgaagctcagcagggaagaagcttttgagggtgatccaggcgctggagggatggcctaggacaccagggtcacaccaggaacatgggagggccgtgcttgtctctagacgaggggaatgggggaagggccacaacctctgtttctgtgacccagcagcatcaagcccctcgctgggcacctcgcacacaccccctgccttatctctgcctgcacgccctgttccctccacctagactgcctgctgagggggcagtgccaggaggttgcctgtccttggggaagaggggcagtgaccctgtgaagatgcttgacagacaacccccaccacctcagaagtgtgtgtgagtggtgaacccttttaagccatcttccagccattctcactggagggagatttgatgggtacagagcagacccctacctgtctaccctccttcggacccctaggaagcttcgcaggccttccaggctgccagacagctgccctggcgttgccgtctgcttcttccctggccccactctgaggggctcagagctgaggcagaatccctttttcattcatttcctgcagaataaaacaacatacagaaaagtgaataaaacataaatgcacaacctaacacactgttaggaagtaaacgatctgcaaccaccatcaggaaatagttttgccagcacccaagtgccctcccctcacagtgtcacttccggcctctctgccctggcttatgtgagtcttgtgttcttgtttttctaaaaagtcttcagcacccaattatgcaagcattgcagtattttcctgtttctgtgctttatccccttgaatcatacagatgcaaattctggcagctggcttctttggctcgttattatgtctgtgagatttattcatgttgctgtgcgtagtatagtttgtgcatgttcattgctaaaaacttccattgtttggctgtatcgtagttcacagattcatttcactgtcagtcaagcttgtccaatgcatgcagcccaggatgcctttgaatgtggcccaacacaaatttgtaaactttcttaaaacattataaagatttttgtttgcgatttttttttttagctcatcagctatagttagtggtagtgtattttatgcgtgacccgagacagttcttccggtatggtccatggaagccaaaagattggacatgcctgctgtagatggacagttggtttgtttctagtttggggtaactacacacaatgctgctagcaacagttttgtccatgtctctgatgcacgtgtgttttttgcaaatggtgcacaaatttttctagggtttgtactcaggagtctgactcctgggttctagggtatgaagatctttctaaatattgttctagtttacgtgcccaccagcagtaaaacagaattcccttgccttcccatccttggcagacatttcacttttgccagtctggtggggtgtatagttatggccttaatttgcatttagctaattaccaaggagattgagcatatttttatgtttttattaaccattttgattttgtctcctgtgaagtgtctatcatcttttgcccattttttaacttgttgtctttttctttttcttttctttttttttttttt

SEQ ID NO: 991 - DNA, 4407 bp, Homo sapiens
tttcgactcgcgctccggctgctgtcacttggctctctggctggagcttgaggacgcaaggagggtttgtcactggcagactcgagactgtaggcactgccatggcccctgtgctcagtaaggactcggcggacatcgagagtatcctggctttaaatcctcgaacacaaactcatgcaactctgtgttccacttcggccaagaaattagacaagaaacattggaaaagaaatcctgataagaactgctttaattgtgagaagctggagaataattttgatgacatcaagcacacgactcttggtgagcgaggagctctccgagaagcaatgagatgcctgaaatgtgcagatgccccgtgtcagaagagctgtccaactaatcttgatattaaatcattcatcacaagtattgcaaacaagaactattatggagctgctaagatgatattttctgacaacccacttggtctgacttgtggaatggtatgtccaacctctgatctatgtgtaggtggatgcaatttatatgccactgaagagggacccattaatattggtggattgcagcaatttgctactgaggtattcaaagcaatgagtatcccacagatcagaaatccttcgctgcctcccccagaaaaaatgtctgaagcctattctgcaaagattgctctttttggtgctgggcctgcaagtataagttgtgcttcctttttggctcgattggggtactctgacatcactatatttgaaaaacaagaatatgttggtggtttaagtacttctgaaattcctcagttccggctgccgtatgatgtagtgaattttgagattgagctaatgaaggaccttggtgtaaagataatttgcggtaaaagcctttcagtgaatgaaatgactcttagcactttgaaagaaaaaggctacaaagctgctttcattggaataggtttgccagaacccaataaagatgccatcttccaaggcctgacgcaggaccaggggttttatacatccaaagactttttgccacttgtagccaaaggcagtaaagcaggaatgtgcgcctgtcactctccattgccatcgatacggggagtcgtgattgtacttggagctggagacactgccttcgactgtgcaacatctgctctacgttgtggagctcgccgagtgttcatcgtcttcagaaaaggctttgttaatataagagctgtccctgaggagatggagcttgctaaggaagaaaagtgtgaatttctgccattcctgtccccacggaaggttatagtaaaaggtgggagaattgttgctatgcagtttgttcggacagagcaagatgaaactggaaaatggaatgaagatgaagatcagatggtccatctgaaagccgatgtggtcatcagtgcctttggttcagttctgagtgatcctaaagtaaaagaagccttgagccctataaaatttaacagatggggtctcccagaagtagatccagaaactatgcaaactagtgaagcatgggtatttgcaggtggtgatgtcgttggtttggctaacactacagtggaatcggtgaatgatggaaagcaagcttcttggtacattcacaaatacgtacagtcacaatatggagcttccgtttctgccaagcctgaactacccctcttttacactcctattgatctggtggacattagtgtagaaatggccggattgaagtttataaatccttttggtcttgctagcgcaactccagccaccagcacatcaatgattcgaagagcttttgaagctggatggggttttgccctcaccaaaactttctctcttgataaggacattgtgacaaatgtttcccccagaatcatccggggaaccacctctggccccatgtatggccctggacaaagctcctttctgaatattgagctcatcagtgagaaaacggctgcatattggtgtcaaagtgtcactgaactaaaggctgacttcccagacaacattgtgattgctagcattatgtgcagttacaataaaaatgactggacggaacttgccaagaagtctgaggattctggagcagatgccctggagttaaatttatcatgtccacatggcatgggagaaagaggaatgggcctggcctgtgggcaggatccagagctggtgcggaacatctgccgctgggttaggcaagctgttcagattcctttttttgccaagctgaccccaaatgtcactgatattgtgagcatcgcaagagctgcaaaggaaggtggtgccaatggcgttacagccaccaacactgtctcaggtctgatgggattaaaatctgatggcacaccttggccagcagtggggattgcaaagcgaactacatatggaggagtgtctgggacagcaatcagacctattgctttgagagctgtgacctccattgctcgtgctctgcctggatttcccattttggctactggtggaattgactctgctgaaagtggtcttcagtttctccatagtggtgcttccgtcctccaggtatgcagtgccattcagaatcaggatttcactgtgatcgaagactactgcactggcctcaaagccctgctttatctgaaaagcattgaagaactacaagactgggatggacagagtccagctactgtgagtcaccagaaagggaaaccagttccacgtatagctgaactcatggacaagaaactgccaagttttggaccttatctggaacagcgcaagaaaatcatagcagaaaacaagattagactgaaagaacaaaatgtagctttttcaccacttaagagaagctgttttatccccaaaaggcctattcctaccatcaaggatgtaataggaaaagcactgcagtaccttggaacatttggtgaattgagcaacgtagagcaagttgtggctatgattgatgaagaaatgtgtatcaactgtggtaaatgctacatgacctgtaatgattctggctaccaggctatacagtttgatccagaaacccacctgcccaccataaccgacacttgtacaggctgtactctgtgtctcagtgtttgccctattgtcgactgcatcaaaatggtttccaggacaacaccttatgaaccaaagagaggcgtacccttatctgtgaatccggtgtgttaaggtgatttgtgaaacagttgctgtgaactttcatgtcacctacatatgctgatctcttaaaatcatgatccttgtgttcagctctttccaaattaaaacaaatatacattttctaaataaaaatatgtaatttcaaaatacatttgtaagtgtaaaaaatgtctcatgtcaatgaccattcaattagtggcataaaatagaataattcttttctgaggatagtagttaaataactgtgtggcagttaattggatgttcactgccagttgtcttatgtgaaaaattaactttttgtgtggcaattagtgtgacagtttccaaattgccctatgctgtgctccatatttgatttctaattgtaagtgaaattaagcattttgaaacaaagtactctttaacatacaagaaaatgtatccaaggaaacattttatcaataaaaattacctttaattttaatgctgtttctaagaaaatgtagttagctccataaagtacaaatgaagaaagtcaaaaattatttgctatggcaggataagaaagcctaaaattgagtttgtggactttattaagtaaaatccccttcgctgaaattgcttatttttggtgttggatagaggatagggagaatatttactaactaaataccattcactactcatgcgtgagatgggtgtacaaactcatcctcttttaatggcatttctctttaaactatgttcctaaccaaatgagatgataggatagatcctggttaccactcttttactgtgcacatatgggccccggaattctttaatagtcaccttcatgattatagcaactaatgtttgaacaaagctcaaagtatgcaatgcttcattattcaagaatgaaaaatataatgttgataatatatattaagtgtgccaaatcagtttgactactctctgttttagtgtttatgtttaaaagaaatatattttttgttattattagataatatttttgtatttctctattttcataatcagtaaatagtgtcatataaactcatttatctcctcttcatggcatcttcaatatgaatctataagtagtaaatcagaaagtaacaatctatggcttatttctatgacaaattcaagagctagaaaaataaaatgtttcattatgcacttttagaaatgcatatttgccacaaaacctgtattactgaataatatcaaataaaatatcataaagcatttt

SEQ ID NO: 992 - DNA, 3385 bp, Homo sapiens
gctctggtgctgcggctccgctctcgtcgcaacgagatctttcgagatcttctccgcccccgctaccggcgcctcctctgcggccactgagccggagccggcctgagcagcgctctcggttgcagtacccactggaaggacttaggcgctcgcgtggacaccgcaagcccctcagtagcctcggcccaagaggcctgctttccactcgctagccccgccgggggtccgtgtcctgtctcggtggccggacccgggcccgagcccgagcagtagccggcgccatgtcggtggtgggcatagacctgggcttccagagctgctacgtcgctgtggcccgcgccggcggcatcgagactatcgctaatgagtatagcgaccgctgcacgccggcttgcatttcttttggtcctaagaatcgttcaattggagcagcagctaaaagccaggtaatttctaatgcaaagaacacagtccaaggatttaaaagattccatggccgagcattctctgatccatttgtggaggcagaaaaatctaaccttgcatatgatattgtgcagttgcctacaggattaacaggtataaaggtgacatatatggaggaagagcgaaattttaccactgagcaagtgactgccatgcttttgtccaaactgaaggagacagccgaaagtgttcttaagaagcctgtagttgactgtgttgtttcggttccttgtttctatactgatgcagaaagacgatcagtgatggatgcaacacagattgctggtcttaattgcttgcgattaatgaatgaaaccactgcagttgctcttgcatatggaatctataagcaggatcttcctgccttagaagagaaaccaagaaatgtagtttttgtagacatgggccactctgcttatcaagtttctgtatgtgcatttaatagaggaaaactgaaagttctggccactgcatttgacacgacattgggaggtagaaaatttgatgaagtgttagtaaatcacttctgtgaagaatttgggaagaaatacaagctagacattaagtccaaaatccgtgcattattacgactctctcaggagtgtgagaaactcaagaaattgatgagtgcaaatgcttcagatctccctttgagcattgaatgttttatgaatgatgttgatgtatctggaactatgaatagaggcaaatttctggagatgtgcaatgatctcttagctagagtggagccaccacttcgtagtgttttggaacaaaccaagttaaagaaagaagatatttatgcagtggagatagttggtggtgctacacgaatccctgcggtaaaagagaagatcagcaaatttttcggtaaagaacttagtacaacattaaatgctgatgaagctgtcactcgaggctgtgcattgcagtgtgccatcttatcgcctgctttcaaagtcagagaattttctatcactgatgtagtaccatatccaatatctctgagatggaattctccagctgaagaagggtcaagtgactgtgaagtcttttccaaaaatcatgctgctcctttctctaaagttcttacattttatagaaaggaacctttcactcttgaggcctactacagctctcctcaggatttgccctatccagatcctgctatagctcagttttcagttcagaaagtcactcctcagtctgatggctccagttcaaaagtgaaagtcaaagttcgagtaaatgtccatggcattttcagtgtgtccagtgcatctttagtggaggttcacaagtctgaggaaaatgaggagccaatggaaacagatcagaatgcaaaggaggaagagaagatgcaagtggaccaggaggaaccacatgttgaagagcaacagcagcagacaccagcagaaaataaggcagagtctgaagaaatggagacctctcaagctggatccaaggataaaaagatggaccaaccaccccaagccaagaaggcaaaagtgaagaccagtactgtggacctgccaatcgagaatcagctattatggcagatagacagagagatgctcaacttgtacattgaaaatgagggtaagatgatcatgcaggataaactggagaaggagcggaatgatgctaagaacgcagtggaggaatatgtgtatgaaatgagagacaagcttagtggtgaatatgagaagtttgtgagtgaagatgatcgtaacagttttactttgaaactggaagatactgaaaattggttgtatgaggatggagaagaccagccaaagcaagtttatgttgataagttggctgaattaaaaaatctaggtcaacctattaagatacgtttccaggaatctgaagaacgaccaaaattatttgaagaactagggaaacagatccaacagtatatgaaaataatcagctctttcaaaaacaaggaggaccagtatgatcatttggatgctgctgacatgacaaaggtagaaaaaagcacaaatgaagcaatggagtggatgaataacaagctaaatctgcagaacaagcagagtttgaccatggatccagttgtcaagtcaaaagagattgaagctaaaattaaggagctgacaagtacttgtagccctataatttcaaagcccaaacccaaagtggaacctccaaaagaggaacaaaaaaatgcagagcagaatggaccagtggatggacaaggagacaacccaggcccccaggctgctgagcagggtacagacacagctgtgccttcggattcagacaagaagcttcctgaaatggacattgattgattccaacacttgtttctattaaaacagactattataaagctttaagttgtcaactttgttctaaatatcaactagcgcaagtgaatactgaagatttcttagtcagtttttaggggattttcggggaggggaaataggtaatgtatggagcattttcacttctaaatagttagatacagaaattaagtgcattgtatctttttcataatggtactatttagaagcccagttagtcttactgagcttatgcttcactcctttatgtttaaccatgtgtctacaagaataagtttgttttggaaagttgagctatagctacagctctagctatccagcagacttttcattatgacttacatggcaggagctctaattatgctttaaaaatctgttgtggagattgctttaaatgctccctgcctggtgtggggatggggtccccctctttgtgagggctggagcatggcacggcatggattaacacggcagaggaacaaaggtgtgctctgagcttcttcatatttcaccttcaccctcacctgtgttctcttccctctctcccaataaaagggctcccatta

SEQ ID NO: 993 - DNA, 1309 bp, Homo sapiens
gctctggtgctgcggctccgctctcgtcgcaacgagatctttcgagatcttctccgcccccgctaccggcgcctcctctgcggccactgagccggagccggcctgagcagcgctctcggttgcagtacccactggaaggacttaggcgctcgcgtggacaccgcaagcccctcagtagcctcggcccaagaggcctgctttccactcgctagccccgccgggggtccgtgtcctgtctcggtggccggacccgggcccgagcccgagcagtagccggcgccatgtcggtggtgggcatagacctgggcttccagagctgctacgtcgctgtggcccgcgccggcggcatcgagactatcgctaatgagtatagcgaccgctgcacgccggcttgcatttcttttggtcctaagaatcgttcaattggagcagcagctaaaagccaggtaatttctaatgcaaagaacacagtccaaggatttaaaagattccatggccgagcattctctgatccatttgtggaggcagaaaaatctaaccttgcatatgatattgtgcagttgcctacaggattaacaggtataaaggtgacatatatggaggaagagcagaatggaccagtggatggacaaggagacaacccaggcccccaggctgctgagcagggtacagacacagctgtgccttcggattcagacaagaagcttcctgaaatggacattgattgattccaacacttgtttctattaaaacagactattataaagctttaagttgtcaactttgttctaaatatcaactagcgcaagtgaatactgaagatttcttagtcagtttttaggggattttcggggaggggaaataggtaatgtatggagcattttcacttctaaatagttagatacagaaattaagtgcattgtatctttttcataatggtactatttagaagcccagttagtcttactgagcttatgcttcactcctttatgtttaaccatgtgtctacaagaataagtttgttttggaaagttgagctatagctacagctctagctatccagcagacttttcattatgacttacatggcaggagctctaattatgctttaaaaatctgttgtggagattgctttaaatgctccctgcctggtgtggggatggggtccccctctttgtgagggctggagcatggcacggcatggattaacacggcagaggaacaaaggtgtgctctgagcttcttcatatttcaccttcaccctcacctgtgttctcttccctctctcccaataaaagggctcccatta

SEQ ID NO: 994 - DNA, 2104 bp, Homo sapiens
gctgttgtcgctcgctcagcgtctccctctcggccgccctctcctcgggacgatggcgcgcggtggccgcggccgccgcctggggttagccctggggctgctgctggcgctggtgctggcgccgcgggttctgcgggccaagcccacggtgcgcaaagagcgcgtggtgcggcccgactcggagctgggcgagcggccccctgaggacaaccagagcttccagtacgaccacgaggccttcctgggcaaggaggactccaagaccttcgaccagctcaccccggacgagagcaaggagaggctagggaagattgttgatcgaatcgacaatgatggggatggctttgtcactactgaggagctgaaaacctggatcaaacgggtgcagaaaagatacatctttgataatgtcgccaaagtctggaaggattatgatagggacaaggatgataaaatttcctgggaagaatacaaacaagccacctatggttactacctaggaaaccccgcagagtttcatgattcttcagatcatcacacctttaaaaagatgctgccacgtgatgagagaagattcaaagctgcagacctcaatggtgacctgacagctactcgggaggagttcactgcctttctgcatcctgaagagtttgaacatatgaaggaaattgtggttttggaaaccctggaggacatcgacaagaacggggatgggtttgtggatcaggatgagtatattgcggatatgttttcccatgaggagaatggccctgagccagactgggttttatcagaacgggagcagtttaacgaattccgggatctgaacaaggacgggaagttagacaaagatgagattcgccactggatcctccctcaagattatgatcacgcacaggctgaggccaggcatctggtatatgaatcagacaaaaacaaggatgagaagctaactaaagaggaaatattggagaactggaacatgtttgttggaagccaagctaccaattacggggaagatctcacaaaaaatcatgatgagctttgatagacactcaccagaatatggcagactgtcataggcattctgttattgtcttggattgttgctacaattgtctaattacagcagttgtgatcccacaaaaagcaagtttatacctcagattggggtataaaaattgtttttcgctcagtatttactggaaaatggacatcactagtctttcagtaagatttctctcaaaacacgtgaaaaccttggtaaattgcaattctttctggggatatattggtacaacatgacttaaaacttttttttttctattaaaacttaaaggggaacaaaacttgaaaaagccctgttcttcagaaggtgagtgggttgagggaggcagtaatatgaagtgactgctgtgtattttaactaccagatttttatatttgccactgttagatagttggaaaggggaaattctgtttaagcgaaagtggtatcatcctaggtaagcttatttcagaacaagtctaatatatcagattctttcttttcgactttatactctgagttattacttactgtaagtggtgtatatgaaacctccatgcattttccagtatggatctgctaatatgcacagtaaatccatgtctttgtttgtttttctattaagaagcaatcaagaaagataatgtgaaaaagaaaggaatttagaggtagggaaaagatgaatgtcagacatgtgaagaactatagtaaaaatgataaaccacctaaatatccttgaacctaccttaaaatgccaatgaggtaggcctgatctttgaatagtggctaggatacaatgcatttcctcagtgatcactgattagaatgagttggtgggatccttgggaagccaaacggagcggggttctggatcatgtcccatccagtccagtgaatccccgacccgcagacctgccccccccgcaacagcttataccatggaatgaggacaaggtgatactctgagctgtggactgaactggcagacacaacctgtacagattgaaatttcaccttgtaaggaggaagtgaatgaaataaaggatccccctaagg

SEQ ID NO: 995 - DNA, 4878 bp, Homo sapiens
gcggccgcggccagggcggcccgtgggaccgcgggcccccggcgcagcgctgcccggctcccggccctgccggcctcctcccttggcgccgcggccatggcggccagcgcgaagcggaagcaggaggagaagcacctgaagatgctgcgggacatgaccggcctcccgcacaaccgaaagtgcttcgactgcgaccagcgcggccccacctacgttaacatgacggtcggctccttcgtgtgtacctcctgctccggcagcctgcgaggattaaatccaccacacagggtgaaatctatctccatgacaacattcacacaacaggaaattgaattcttacaaaaacatggaaatgaagtctgtaaacagatttggctaggattatttgatgatagatcttcagcaattccagacttcagggatccacaaaaagtgaaagagtttctacaagaaaagtatgaaaagaaaagatggtatgtcccgccagaacaagccaaagtcgtggcatcagttcatgcatctatttcagggtcctctgccagtagcacaagcagcacacctgaggtcaaaccactgaaatctcttttaggggattctgcaccaacactgcacttaaataagggcacacctagtcagtccccagttgtaggtcgttctcaagggcagcagcaggagaagaagcaatttgaccttttaagtgatctcggctcagacatctttgctgctccagctcctcagtcaacagctacagccaattttgctaactttgcacatttcaacagtcatgcagctcagaattctgcaaatgcagattttgcaaactttgatgcatttggacagtctagtggttcgagtaattttggaggtttccccacagcaagtcactctccttttcagccccaaactacaggtggaagtgctgcatcagtaaatgctaattttgctcattttgataacttccccaaatcctccagtgctgattttggaaccttcaatacttcccagagtcatcaaacagcatcagctgttagtaaagtttcaacgaacaaagctggtttacagactgcagacaaatatgcagcacttgctaatttagacaatatcttcagtgccgggcaaggtggtgatcagggaagtggctttgggaccacaggtaaagctcctgttggttctgtggtttcagttcccagtcagtcaagtgcatcttcagacaagtatgcagctctggcagaactagacagcgttttcagttctgcagccacctccagtaatgcgtatacttccacaagtaatgctagcagcaatgtttttggaacagtgccagtggttgcttctgcacagacacagcctgcttcatcaagtgtgcctgctccatttggagctacgccttccacaaatccatttgttgctgctgctggtccttctgtggcatcttctacaaacccatttcagaccaatgccagaggagcaacagcggcaacctttggcactgcatccatgagcatgcccacaggattcggcactcctgctccctacagtcttcccaccagctttagtggcagctttcagcagcctgcctttccagcccaagcagctttccctcaacagacagctttttctcaacagcccaatggtgcaggttttgcagcatttggacaaacaaagccagtagtaaccccttttggtcaagttgcagctgctggagtatctagtaatccttttatgactggtgcaccaacaggacaatttccaacaggaagctcatcaaccaatcctttcttatagccttatatagacaatttactggaacgaacttttatgtggtcacattacatctctccacctcttgcactgttgtcttgtttcactgatcttagctttaaacacaagagaagtctttaaaaagcctgcattgtgtattaaacaccaggtaatatgtgcaaaaccgagggctccagtaacaccttctaacctgtgaattggcagaaaagggtagcggtatcatgtatattaaaattggctaatattaagttattgcagataccacattcattatgctgcagtactgtacatatttttcttagaaattagctatttgtgcatatcagtatttgtaactttaacacattgttatgtgagaaatgttactggggaaatagatcagccacttttaaggtgctgtcatatatcttggaatgaatgacctaaaatcattttaaccattgctactggaaagtaacagagtcaaaattggaaggttttattcattcttgaatttttcctttctaaagagctcttctatttatacatgcctaaattcttttaaaatgtagagggatacctgtctgcataataaagctgatcatgttttgctacagtttgcaggtgaaaaaaaataaatattataaaatatgctattgtttttgtgttcttgctgcaatgcctttaccaaagtggccttaaatatgagtagtgaattgagaacatcttgaattcttaaaagacttcttagtgactttttataaaaaggccatgtagaaaatttattaaaactactatgactgctacattcaggaatatgccagtggtaaagcatttaaatgtagcttgtcagatttaccataatcctactaatttctttgcagcttattaattttgtgaaatttgtatatatgaagaatttgcatgtatgtgtatttacaaatttttctaagtatcttgaattctcagactgcaaaaggcctattttaactattgattttttttaaaaaaaattgtctttgaatgtattggaagtagacatgcattaactgtgacattattgcacctcagtttttttctttctttttttgggcaaactgatattatctataggatatttgtttatgtttgttttttgggggaaagaaactggaactcagtgttaccttaaagttacggaatactttgttttaaaggaaaagataataagtttagttatatctttttgttaatattcaaatgaacttgtttaagtatctatgtacagtaatgcctcattcatctagaggtaatctggcagtcttgtgaaaaccgaacacaactcagaaacttggaatcgttttttttaaaaatgcctctgagcaacccatataagtcacaaagtctgtgtgttagagcttatgcatttgtttttatgagagattttaataaatttaattatttgcttgtccagactatagcatattagctgtttagaagggatggcttgaaaggaaggagactgaaaaacactctgagagcatacactgtccaaggccattagtgtaaggaccgctacccagcctagaggacatcactatactacatcatctgatgattattctttattatgcctctaggtaattaagtaaaggtgaaattgcatacacagatatgtagtacatattttaaaagttttatcttaaattgattaaaactttttaaaaagctttggtattaaaagaggtaaacatcagtttcctcaaacattttattcatgttgaatgcctttttgcaatgatgactgagttgttatcatagtattttaaaacctgtatagtgttttagacttgttaaaacattgctgtctagtgtacatctagctaaaagtgtggtttatctaaaccgttttaataagcaagatgactgggaaatctctgccccttttctgagcagtatgcctcttcttttagaattaaatgaatgctgcacaggtccagatgtgtgttgatgtagacttgaaatgtctccacattttggaggacttcctcagcccttttcattgagggaaaatatatttgaatttctgttttagattgtatcgggtcccagttgattcatgtgtacaaagttatgctacctaattacagaccattacccaaatatcctaccaggctttccatctgaatagtaaattaaacagttgttatcaaaatgattttaaagactatttctttttctgggtaactattgaagtttgtaattaaatgggggctcttactgactttaaattagcgcttataaaataaaaatgtttagttcaagaagagacccaagctgggtatggtggtgtgagagcctgtgagtcctagctacctggaggtgaggtgggaacatcacttgagcccaggagttggaggctgcagtgcgctacgatcacaccactgcacaccagcctggggatagagtgagatcccatctctaaaaaatgaaaaaaagaagagaggtagctttaaagtggtttttctcatgatattcactgtttattattaaagaaaatcagctttcgttagacttttacatttagatttattctagttttatatagaccatcaaaattatgttgagtactaaaaaggagaaaaaatcctggaaggtaacaaggctgaagaccttcaaatttcctggcttactggtttagtcacatcatttttcctgttcaggtatctgcagatatccctgttcaggaaagatcttttttcaggatggcaaacttttgacatagtttaaagacattttttccccattttttgaaatagagaatattttattatttttgtgaaaatagagttttggtaatcactttcttcctcaaaataagtccttctgttaatttgtaaaagcacattagtgctttacctgtgaaattccccgcccccctgcacacacacccactttagtacagttcctgtcaattggcaacatggagagggtgacctggctgctggtttaccactgtaccaacatctctggagcattttagtttcagaaccttaacactccccaacagctttgttgatgtagcttgtatctctgagaatttattgtattaaaattaatactgagatatttttaaaa

SEQ ID NO: 996 - DNA, 627 bp, Homo sapiens
gacctttccgagttggctgcagatttgtggtgcgttctgagccgtctgtcctgcgccaagatgcttcaaagtattattaaaaacatatggatccccatgaagccctactacaccaaagtttaccaggagatttggataggaatggggctgatgggcttcatcgtttataaaatccgggctgctgataaaagaagtaaggctttgaaagcttcagcgcctgctcctggtcatcactaaccagatttacttggagtacatgtgaaagaaaacgtcagtctgcctgtaaatttcagcaagccgtgttagatggggagcgtggacagtcactgtacacttgtataagtaccgtttacttcatggcatgaataaatggatctgtgagatgcactgctacctggtactgctttcagtgtgttccccctcagcccctccggcgtgtcaggcatactctgagtagataatttgtcatgcagcgcatgcaatcagaatctcactgagccacccatcattgtgaaataattacctcagttgtacaggacttggtgatcaggatccaggcactcacttgtattctactgctcaataaacgtttattaaacttgatcctgctactaaaaaaaaaaaaaa

SEQ ID NO: 997 - DNA, 5428 bp, Homo sapiens
gcggggagccggcggttatctgggcggcggagcgctcacaatgtggcaggagacagaaaagataagatgctcccaagtcccttgcagctctcttcagaagaaaaatcactagtgctctgctcttgccataataccaaacctttttgactcatgctttggtgctgcaacactggaagaattgcacacagtttccaggaatatctttttttcatttgagtgattctttgtggatgagaaaagatttgagtcttaataattaccttgttttaaagctatttctttatagtctgaactgtttaataaattgggccacttaccaatgagccacacagccagttcttgtcaggagctggttgaaaactgtgctgtgcatgtagcaggaatggcacaagaagatagccgtcgtggtcaagtgccatcttccttttatcatggtgccaaccaagaacttgacctgtccaccaaagtgtacaaaagggaatcaggaagtccttattctgtgttagtggacaccaagatgagcaaaccgcatctccatgaaacagaagaacagccatatttcagggagacaagagcagtgtctgacgtgcatgctgttaaggaagaccgggagaattctgatgacacagaggaggaagaggaagaagtctcttacaaaagggagcagatcatagtggaggtaaaccttaataatcaaacattaaatgtatctaaaggggaaaagggtgtctcttctcagtccaaagagactcctgttcttaagacaagcagtgaggaggaagaggaagagagtgaggaagaggccacagatgacagcaatgactatggagagaatgaaaagcagaagaaaaaggagaagatagtagagaaagtcagcgttacacaaaggagaaccaggagagctgcctctgttgccgcagctaccacttcccctactcccagaactacaagaggtcgtaggaagagtgtagagccacctaagcgtaagaagcgggccacaaaggagcccaaagcaccagtccagaaagctaagtgtgaagagaaagagactctgacctgtgagaagtgccccagggtatttaacactcgctggtacctggagaagcacatgaacgttactcataggcgcatgcagatttgtgataaatgtggcaagaagtttgtcctggaaagtgagctgtcccttcaccagcaaacagactgtgaaaaaaacattcagtgtgtttcctgtaacaaatcgttcaagaaactctggtcccttcatgaacatatcaagatcgtccatggatatgcagaaaagaaattttcctgtgaaatttgtgagaagaaattctataccatggctcatgtgcggaaacacatggttgcacacacaaaagacatgccatttacatgcgaaacctgtggaaaatcattcaaacgcagtatgtcactcaaggtgcactccttgcagcattctggagagaagccctttagatgcgagaactgtgacgaaaggtttcagtacaagtaccagctacgctcccacatgagcattcatattgggcacaaacagttcatgtgccagtggtgtggcaaggatttcaacatgaagcagtacttcgacgaacacatgaaaacacacactggagagaaaccctttatctgtgaaatctgtggcaaaagcttcaccagccgccccaacatgaagagacaccgcagaactcacacaggcgagaagccctatccatgtgatgtgtgtggccagcggttccgcttctcgaacatgcttaaggcccacaaggagaagtgctttcgggtgaccagccccgtgaatgtgccacctgctgtccagatcccacttacaacttccccagccaccccagttccttctgtggtgaacacagccacaaccccaacccctccaatcaatatgaatcctgtaagcactcttccccctcggcccatcccccaccccttctcacacctgcacatccacccacaccctcaccacccacaccaccttcccatccctccagtccctcacctcccgccacctccagctctctttaagagtgagcctttaaatcatagaggccagagtgaggacaactttctgcggcacctggcagagaagaacagttcagcacagcatcattaacatccgtctccttagtgtgttctccaggagacacgtccccatgtgtgagcgtgcacagagggagtcggtgagcatttccttagttctcagactctcctccgcctctaccaagagcttcgccagtgtcactgaatcaacagatccaagggaatgaacaagaagactaccttgagctcacagagggactgtcatctaaaccaggggaaccactgaactaaagcccaatttgcttgcattttctgatgacttttataagtttcaaatactcagacttgtggaattttataatttcatatcagctgatgaggtatgcttgcttttatatcccagacttctcctcaaagaggggataggcctggtttcctttgtactaatcgggaaggctgtgagattaatccagagcattaattgtatcactgtgtatggtaaggaattcttttcagcttttggtgccagctacagagttgagctggccatgtttcacagtatatcaagcattatagagaaagacagaaattttcttctttgtgtagctctcctaacgcactctttattttactacagaaattattttagagtttttgtatagacttctttggtagtctgtttctaaaatgaaatgtatttcaataagcagtgtaattttttcagtgtagctgaacctatgttgtaaaatagaaaaaaatttttataatcatcaaaatgtgattcttaaagatgcatataacttctataattcaaagctattcttacatccgtacaactcaaaaggtgcttcagagactagatgtatctgagagggtctccagaccaggttactgcaaaaatgaggttttgctttcaggatttggcgtaaatacttggtagttttgacatctctgcttaacactcaagagaggctccctaatgtgctcctgtcctccatgttctgcttggcttcgttagtgcattacatgaaatgatttgcaggggatggggccttttccagggaagtcacctaaagcttgcatgttttgaaaatttgaataaggctgtttgctgacaggaggaggaagtagtggagatcatttcatctcagtcacgtctgtttctcacttcccttaggaattgtgttgatgtttaacttttatgggatgacaaattgaaatcgctcattttgaggttgctttatttttctagaattgttataagaagctaaaatagtaaacttaaaatcacaaacatgacattgctgatagtggctgagaaattcagatgagaagacaaattggttatgaattttgaaatatctattatatgtaaaatgtggatatgttcacaaccttgagctattttaacacagtttaaatatagtgagggaaaactcctaagttttactgccctgtcctctgcaaattatgtaataccagcattcttaggcgataaagagagcagcacctctagtacctttaggcagattactttttcaagtttggggaacttcaaaagaccataatcaaccaggagcttattataggaaaggctgaacagaagggctagtgtattgattacacttaacagatcatatttatccagactcagtatagcttaaaattttgtatttctttatctgagagaactgagttcccaggctaaatcacttacctcccaccccctctccaattttttttttaagagacaaggtcttgctatgttgcccaggctagagtgcagtggctattcacaggtgcagttatagcacactacagcctccaactcttgggttcaagcaaccctgcctcagctaaccaagtagctgggactacaggtgcatgctaccatgcccagtccattttttaatcttgaaatttcttcatttttctttcttcggtttcttaaaatctttgcctgaatcagaacgctggcttttatttatttttttatttttaatattaaatgtgcagatatgcttcgagcacttttctaactaatgagctctgtggtaagaaaaaatgaactctttcaattgagattaagtccatatttttcaaacatcacgttctctattggctttttggtttagtgtttctaaattttctccttctgattttgcctgtcttatataatgagcataggaaaattttggaatgaggcagaaaagtatatcaagacatacttcctggttttggatgtaagttttaaagaatggtatttttaatatttgtacacattctttgagcacccaggtacccaagccaataaggaaagttaattccttgcatatgactgttatatctttagtggttgtctccctctccctccacagtctccttggcattccatgacaagtttgtcaacctacacttttatatagacatgtcattatttcatggtcaagcctgtagtattaaaatgatttttttaaaagatgtaaactgtgcttagttaattggttatattttgttctgtttttttttttttttttttttttttttgaggcagagtcttgttctgttgcctgggctggagtgcagtggcgtgatcttggctcactgcaacccccgccccccgggttcaagtgattctcctgcctcagcctcccgagtagctggaattacaggcatgcgccagcacgcccggctaagttttgtatttttggcagagatggggtttcaccatattggccaggctggtctcaaactcctgaccttgtgatccgcccacctcagcctccgaaagtgctgggattacaggcgtgagccaccacgtccaactgccttattttgttctgaataaatttacagtattgggcagcaattctggattctagacttgagaccacagaatcaaccatttcatgaggttgtactgtaattatacactggaatattcaggtagtcatctttgatttttcattcaagtaaatatagccataagaaaatatctgctatacaggaaaaccagtattaagcaaataccaccatccttaacagaaacaaaaatatatatatatattatttttaaaaattagcattgtcatacagtacaattcttagtgaagtgtattgtggaacaatttagaaacttcctttttttcccctagattaaggatactttccttgacttgagacttgtggtcttcaggaaaactactcagaatataatgactcctcatcagtatcatattgtatataaataatgaaatgcattaagaatattcacaacattgaacccaggaggcggagcttgcagtgagccgagattgcgccactgcgctccagcctgggcaacagagcgagactccatctc

SEQ ID NO: 998 - DNA, 2444 bp, Homo sapiens
agatggcggcgcctgaggggtcttgggggctctaggccggccacctactggtttgcagcggagacgacgcatggggcctgcgcaataggagtacgctgcctgggaggcgtgactagaagcggaagtagttgtgggcgcctttgcaaccgcctgggacgccgccgagtggtctgtgcaggttcgcgggtcgctggcgggggtcgtgagggagtgcgccgggagcggagatatggagggagatggttcagacccagagcctccagatgccggggaggacagcaagtccgagaatggggagaatgcgcccatctactgcatctgccgcaaaccggacatcaactgcttcatgatcgggtgtgacaactgcaatgagtggttccatggggactgcatccggatcactgagaagatggccaaggccatccgggagtggtactgtcgggagtgcagagagaaagaccccaagctagagattcgctatcggcacaagaagtcacgggagcgggatggcaatgagcgggacagcagtgagccccgggatgagggtggagggcgcaagaggcctgtccctgatccaaacctgcagcgccgggcagggtcagggacaggggttggggccatgcttgctcggggctctgcttcgccccacaaatcctctccgcagcccttggtggccacacccagccagcatcaccagcagcagcagcagcagatcaaacggtcagcccgcatgtgtggtgagtgtgaggcatgtcggcgcactgaggactgtggtcactgtgatttctgtcgggacatgaagaagttcgggggccccaacaagatccggcagaagtgccggctgcgccagtgccagctgcgggcccgggaatcgtacaagtacttcccttcctcgctctcaccagtgacgccctcagagtccctgccaaggccccgccggccactgcccacccaacagcagccacagccatcacagaagttagggcgcatccgtgaagatgagggggcagtggcgtcatcaacagtcaaggagcctcctgaggctacagccacacctgagccactctcagatgaggacctacctctggatcctgacctgtatcaggacttctgtgcaggggcctttgatgacaatggcctgccctggatgagcgacacagaagagtccccattcctggaccccgcgctgcggaagagggcagtgaaagtgaagcatgtgaagcgtcgggagaagaagtctgagaagaagaaggaggagcgatacaagcggcatcggcagaagcagaagcacaaggataaatggaaacacccagagagggctgatgccaaggaccctgcgtcactgccccagtgcctggggcccggctgtgtgcgccccgcccagcccagctccaagtattgctcagatgactgtggcatgaagctggcagccaaccgcatctacgagatcctcccccagcgcatccagcagtggcagcagagcccttgcattgctgaagagcacggcaagaagctgctcgaacgcattcgccgagagcagcagagtgcccgcacccgccttcaggaaatggaacgccgattccatgagcttgaggccatcattctacgtgccaagcagcaggctgtgcgcgaggatgaggagagcaacgagggtgacagtgatgacacagacctgcagatcttctgtgtttcctgtgggcaccccatcaacccacgtgttgccttgcgccacatggagcgctgctacgccaagtatgagagccagacgtcctttgggtccatgtaccccacacgcattgaaggggccacacgactcttctgtgatgtgtataatcctcagagcaaaacatactgtaagcggctccaggtgctgtgccccgagcactcacgggaccccaaagtgccagctgacgaggtatgcgggtgcccccttgtacgtgatgtctttgagctcacgggtgacttctgccgcctgcccaagcgccagtgcaatcgccattactgctgggagaagctgcggcgtgcggaagtggacttggagcgcgtgcgtgtgtggtacaagctggacgagctgtttgagcaggagcgcaatgtgcgcacagccatgacaaaccgcgcgggattgctggccctgatgctgcaccagacgatccagcacgatcccctcactaccgacctgcgctccagtgccgaccgctgagcctcctggcccggaccccttaaaccctgcattccagatgggggagccgcccggtgcccgtgtgtccgttcctccactcatctgtttctccggttctccctgtgcccatccaccggttgaccgcccatctgcctttatcagagggactgtccccgtcgacatgttcagtgcctggtggggctgcggagtccactcatccttgcctcctctccctgggttttgttaataaaattttgaagaaacc

SEQ ID NO: 999 - DNA, 2990 bp, Homo sapiens
tccggggctagtttgtgtttcagacttccatatttccatttgcagttgggtgaagtggttagagctgaaaggggacagctggagtcaaacaacttaactcaaatatctgggaacgatttcgcgctgaggaagaccctttgggacttgtagctccactccggggaacggactcgccgggactgacagttgccggaagtgaggctgcggggaatggccgccgctgcgaccatggcggctgcggcccgggaactggtgttgcgggctgggacctcagatatggaggaggaagagggcccgctggcgggtggtcctgggctccaggaaccactgcaacttggggagttggatatcacttctgatgaattcatcctggatgaagtggatgttcacattcaggcaaatctggaggatgagttagtaaaggaagctcttaaaacgggtgtagatctccgtcactattcaaagcaagttgagctggagctacagcagattgaacagaaatccattcgggattatattcaagagagtgagaatatagcatctctacacaaccagatcacagcctgtgatgctgtcctggagcgaatggagcagatgttgggagcttttcagagtgacctcagctccatcagctctgagatccggacactgcaggaacagtcaggagccatgaacattcgacttcgaaatcgccaggcagttcgggggaaacttggggagcttgttgatggtctggtggtgccttctgctctggtcacggcaattctggaggctccagtgacagagcccaggttcttggagcagctacaggagctggatgccaaggcagccgcagtcagagagcaggaagctagaggcacagcagcctgcgcagatgtcagaggcgtgctcgatcggctccgggtcaaggcagtgacgaagatccgagagtttatcctccagaagatttattccttcaggaaacccatgaccaactatcagatcccccagacggccctgctgaagtacaggttcttctatcagtttctgctgggcaatgaacgagcaacagcaaaggagatcagggatgaatatgtggagacgctgagcaagatttacctgtcttactaccgctcttacctggggcggctcatgaaggtgcagtatgaggaagtcgctgagaaagatgatctaatgggtgtggaagatacagcaaagaaaggattcttctcaaagccatcgctccgcagcaggaacaccattttcaccctaggaacccgcggctctgtcatctcccccactgaacttgaggcccccatcctggtgcctcacacagcgcagcgcggagagcagaggtatccatttgaggccctcttccgcagccagcactacgccctcctagacaattcctgccgcgaataccttttcatctgtgaattttttgttgtgtctggcccagctgcacacgacctgttccatgctgtcatgggccgtacactcagcatgaccctgaaacacctggattcttatctagctgactgctacgatgccattgctgtttttctctgtatccacattgttctccggttccgtaacattgcagcaaagagggatgttcctgccctggacaggtactgggaacaggtgcttgccttgctatggccacggtttgaactgatcctggagatgaatgttcagagcgtccgaagcactgacccccagcgcctaggggggttggatactcggccccactatatcacacgccgctatgcagagttctcctccgctcttgtcagtatcaaccagacaattcctaatgaacggaccatgcaattgctgggacagctgcaggtggaggtggagaattttgtcctccgagtggcagctgagttctcctcaaggaaggagcagcttgtgtttctgatcaacaactatgacatgatgctgggtgtgctgatggagcgggctgcagatgacagcaaagaggttgagagcttccagcagctgctcaatgctcggacacaggaattcattgaagagttgctgtctcccccttttgggggtttagtggcatttgtgaaggaggctgaggctttgattgagcgtggacaggctgagcgacttcgaggggaagaagcccgggtaactcagctgatccgtggctttggtagttcctggaaatcatcagtggaatctctgagtcaggatgtaatgcggagtttcaccaacttcagaaatggcaccagtatcattcagggagcgctgacccagctgatccagctctatcatcgcttccaccgggtgctgtcccagccgcagctccgagccctccctgcccgggctgagctcatcaacattcaccaccttatggtggagctcaagaagcataagcccaacttctgatgtgccagaaaccgccctgagatctgccggtcatctccatggacttctgcaccccattccatacccttcttcacctggggtaccccttccagttttccccttgcttcccaggcccttgacatggcttacctgccttcactcccagcaccttgcccaacaggataagctggatccccttggccttctgaatatcccagtgtcttcaggtttcccaagaccacttccctgtgggcttccaaaatggcctttatcatttctccagtctgtcaccctcctttcctgctcccatacacccaaggcttgtttcttcccctgtaaaaaccactgcctcaatctctggttcactcaactagtcaccatgtcctgaggcatgaagcctcctcagctcttggaattgctggcaaggggtgactgcctctgagtcattgtgtttttcaaagtgatttcttttctgtagctttttgacctaagatctcagcaatttgaacactaacctctcccctcctggctcaagaattactccgaagtcagtctgcagaaaataaatatttagtatgacatgacacttaaaaaaaaaaaaaaaaaaaaaaaaaaaaaaaaaaaaaaaa

SEQ ID NO: 1000 - DNA, 3781 bp, Homo sapiens
gggccggctcgcgggcgctgccagtctcgggcggcggtgtccggcgcgcgggcggcctgctgggcgggctgaagggttagcggagcacgggcaaggcggagagtgacggagtcggcgagcccccgcggcgacaggttctctacttaaaagacaatgactactgatgaaggtgccaagaacaatgaagaaagccccacagccactgttgctgagcagggagaggatattacctccaaaaaagacaggggagtattaaagattgtcaaaagagtggggaatggtgaggaaacgccgatgattggagacaaagtttatgtccattacaaaggaaaattgtcaaatggaaagaagtttgattccagtcatgatagaaatgaaccatttgtctttagtcttggcaaaggccaagtcatcaaggcatgggacattggggtggctaccatgaagaaaggagagatatgccatttactgtgcaaaccagaatatgcatatggctcggctggcagtctccctaaaattccctcgaatgcaactctcttttttgagattgagctccttgatttcaaaggagaggatttatttgaagatggaggcattatccggagaaccaaacggaaaggagagggatattcaaatccaaacgaaggagcaacagtagaaatccacctggaaggccgctgtggtggaaggatgtttgactgcagagatgtggcattcactgtgggcgaaggagaagaccacgacattccaattggaattgacaaagctctggagaaaatgcagcgggaagaacaatgtattttatatcttggaccaagatatggttttggagaggcagggaagcctaaatttggcattgaacctaatgctgagcttatatatgaagttacacttaagagcttcgaaaaggccaaagaatcctgggagatggataccaaagaaaaattggagcaggctgccattgtcaaagagaagggaaccgtatacttcaagggaggcaaatacatgcaggcggtgattcagtatgggaagatagtgtcctggttagagatggaatatggtttatcagaaaaggaatcgaaagcttctgaatcatttctccttgctgcctttctgaacctggccatgtgctacctgaagcttagagaatacaccaaagctgttgaatgctgtgacaaggcccttggactggacagtgccaatgagaaaggcttgtataggaggggtgaagcccagctgctcatgaacgagtttgagtcagccaagggtgactttgagaaagtgctggaagtaaacccccagaataaggctgcaagactgcagatctccatgtgccagaaaaaggccaaggagcacaacgagcgggaccgcaggatatacgccaacatgttcaagaagtttgcagagcaggatgccaaggaagaggccaataaagcaatgggcaagaagacttcagaaggggtcactaatgaaaaaggaacagacagtcaagcaatggaagaagagaaacctgagggccacgtatgacgccacgccaaggagggaagagtcccagtgaactcggcccctcctcaatgggctttcccccaactcaggacagaacagtgtttaatgtaaagtttgttatagtctatgtgattctggaagcaaatggcaaaaccagtagcttcccaaaaacagcccccctgctgctgcccggagggttcactgaggggtggcacgggaccactccaggtggaacaaacagaaatgactgtggtgtggagggagtgagccagcagcttaagtccagctcatttcagtttctatcaaccttcaagtatccaattcagggtccctggagatcatcctaacaatgtggggctgttaggttttacctttgaactttcatagcactgcagaaaccttttaaaaaaaaatgcttcatgaatttctcctttcctacagttgggtagggtaggggaaggaggataagcttttgttttttaaatgactgaagtgctataaatgtagtctgttgcatttttaaccaacagaacccacagtagaggggtctcatgtctccccagttccacagcagtgtcacagacgtgaaagccagaacctcagaggccacttgcttgctgacttagcctcctcccaaagtccccctcctcagccagcctccttgtgagagtggctttctaccacacacagcctgtccctgggggagtaattctgtcattcctaaaacacccttcagcaatgataatgagcagatgagagtttctggattagcttttcctattttcgatgaagttctgagatactgaaatgtgaaaagagcaatcagaattgtgctttttctcccctcctctattccttttagggaataatattcaatacacagtacttcctcccagcattgctactgctcagcttcttctttcattctaatccttgctattaagaatttaagacttgtgcttacaatatttttgacctggagtggatctatttacatagtcatttaggatccatgcagctttttttgtctttttaagattattggctcataagcatatgtatactggtttatggaactttatttacactcctctatcatgcaaaaaaattttgactttttagtactaagcttaatttttaaaaacaaaatctgtagtgttgacaaataaatagttgctcttctacactaggggtttcacctgcaggtttgacacgcagttgctcgcttttcctgccctgtcaagcttctctgttctggcgtgagttgtgaaagagttgaagacagcttcccatgccggtacacagccagtagcctaaatctccagtacttgagctgaccattgaactagggcaagtcttaaatgtgtacatgtagttgaatttcagtccttacgggtaaacagattgagcatggctctctattccctcagcctaagaaacactcatgggaatgcatttggcaacccaaggaaccatttgcttaaacctggaacatctcacctttttaaatcctaaaaaacactggcagttatattttaaattagtttttatttttatgatggttttatcaaaagacttttattattagattgggacccccttcaaacctaaaaatcaagttatttccttttataatacttttcttccccatggaacaaatgggatcaatttgtgagttttttcctttaatgataactaaaatccctctaatttctcatttatgcttttgtcttttttatgaaatatttcttttaaaagccccagtctcacctacgaaatatgaagagcaaaagctgattttgcttacttgctaaactgttgggaaagctctgtagagcatggttccagtgaggccaagattgaaatttgatactaaaaaggccacctagctttttgcagataacaaacaagaaagctattccaagactcagatgatgccagctgtctcccacgtgtgtattatggttcaccagggggaactggcaaaagtgtgtgtggggaggggaagggtgtgtgagtggttctgagcaaataactacagggtgcccattaccactcaagaagacacttcacgtattcttgtatcaaattcaataatcttaaacaatttgtgtagaagtccacagacatctttcaaccaccttttaggctgcatatggattgccaagtcagcatatgaggaattaaagacattgtttttaaaaaaaaaaaatcatttagatgcacttttttgtgtgttctttaaataaatccaaaaaaaatgtgaaaaaaaaaa

SEQ ID NO: 1001 - DNA, 2324 bp, Homo sapiens
acagacactgatctcagtttcccccgagagtgtgagtgtaggcctctacaggcagctgcctctggggagttggggagcctaggggttaactctagacccccctcaaccctctggaccaaagtctgtccaggaaaataggatgccggagcccaggagtcgtcagcctagcagttgcctggcctccagatgcctcccagggtcaccttccagccctgtggatggcagtggaatcaggacactcccttgaacagtgaatacgattttgccctggtcaacattggacgattagaggctgtgagcggcttgtcccgagtccagctcctccgtccagggtccctgcataaatttatccctgaggagattctgattcatggccgagacttccggctgctcagagttggttttgaggctggaggcctagagcctcaggcttttcaggtgaccatggccattgtccaagccagagctcagagcaatcaagcccaacagtattcggggataaccctgagcaaggctggccagggttctggctccagaaaaccaccaattcctctcatggagacagcggaagactgggagactgagcggaagaagcaggcagccagaggctggagggtcagcacggtcaacgagaggttcgacgtagccaccagcctcccccgttacttctgggtccctaaccgaattctggacagtgaggtcaggagagcatttggccactttcatcagggccgtggaccgcgcttgtcctggcatcaccctgggggcagtgatcttctccgctgtggaggcttctatacagccagtgaccctaacaaggaggatatcagagcagtggagttgatgctccaggctgggcattcagatgttgtcctggtagacactatggatgagctgcccagccttgcagatgtccaacttgcccacctgaggctgagggccctctgcctgcctgattcatctgtagctgaggataaatggctttcagccctggaaggaacacgatggctggactatgtcagggcttgtcttcgaaaggccagtgacatttcagtattagtgacatccagggttcgttctgtaatacttcaagagcgcggtgatcgtgatctcaatggcctcctctcttcactcgtccagctgctttcagcccccgaagcccgaacactgtttggcttccaatcactagtacagcgagagtgggtggcagctggacatcccttcctgactcggcttgggggaactggggccagtgaagaggctccggtgtttctcctcttccttgattgtgtctggcagctcctccagcagtttccagctgattttgaattctctgagtttttccttcttgctcttcatgacagtgtcagggttcctgacacccttaccttcctgagaaataccccctgggagcgcggaaagcagagcggacagttaaactcctatacacaagtctacaccccaggatactcccagcctccagctgggaactcttttaacctgcagctgtctgtctgggactgggatttacgttatagcaatgcacagatactacaattccagaatcctggctatgacccagaacactgtccagattcctggctccctagaccacagccaagcttcatggttcctggaccccccagttctgtgtggctcttctctagaggagcattgacccccctgaatcagctctgtccttggcgggacagtccttccctgctggcagtctcttctcgttggctccctcgacctgctatctcctctgaaagcctggctgaccaggaatggggtctcccctcacattggggagcttgccctttacctccagggctgctgctgcctgggtatctgggaccccagatcaggctctggagacgctgctacctgaggggaaggcctgaggtccagatgggcctctcagctcccacaatctctggcctccaggatgagctatcccatcttcaggagttattacggaaatggacaccaagaatatctcctgaggatcactccaagaaaagagatccacataccattctcaatcccactgaaattgctggcattctcaaaggccaatcccatcccttctggataaccagatgttaaatcatgagatcagagatgctgttcatcagtcccaacaagatggcctagaaatcgcattctcacctcgccttgctgctgctttaattccaagttctatttcttcccttatagttttctatgggaatgaggcggatacaggaaacaccctatctcctctgtatttttgtagtggaatttctatttaaggggctcattaaagcatagtatttatacac

SEQ ID NO: 1002 - DNA, 1554 bp, Homo sapiens
gcgcgcctcgccggcgcctccatcccggatccttgctgcagcgtcagcgccgccgcccgtgcctttcctcttcctcctcctcctccttggcatccgcctcttcttcctcctgcgtcctcccccgctgcctccgctgctcccgacgcggagcccggagcccgcgccgagcccctggcctcgcggtgccatgctgccccggcggcggcgctgaaggatggcgacgccgctgcctccgccctccccgcggcacctgcggctgctgcggctgctgctctccggcctcgtcctcggcgccgccctgcgtggagccgccgccggccacccggatgtagccgcctgtcccgggagcctggactgtgccctgaagaggcgggcaaggtgtcctcctggtgcacatgcctgtgggccctgccttcagcccttccaggaggaccagcaagggctctgtgtgcccaggatgcgccggcctccaggcgggggccggccccagcccagactggaagatgagattgacttcctggcccaggagcttgcccggaaggagtctggacactcaactccgcccctacccaaggaccgacagcggctcccggagcctgccaccctgggcttctcggcacgggggcaggggctggagctgggcctcccctccactccaggaacccccacgcccacgccccacacctccatgggctcccctgtgtcatccgacccggtgcacatgtcgcccctggagccccggggagggcaaggcgacggcctcgcccttgtgctgatcctggcgttctgtgtggccggtgcagccgccctctccgtagcctccctctgctggtgcaggctgcatcgtgagatccgcctgactcagaaggccgactacgccactgcgaaggcccctggctcacctgcagctccccggatctcgcctggggaccaacggctggcacagagcgcggagatgtaccactaccagcaccaacggcaacagatgctgtgcctggagcggcataaagagccacccaaggagctggacacggcctcctcggatgaggagaatgaggacggagacttcacggtgtacgagtgcccgggcctggccccgaccggggaaatggaggtgcgcaaccctctgttcgaccacgccgcactgtccgcgcccctgccggcccccagctcaccgcctgcactgccatgacctggaggcagacagacgcccacctgctccccgacctcgaggcccccggggaggggcagggcctggagcttcccactaaaaacatgttttgatgctgtgtgcttttggctgggcctcgggctccaggccctgggaccccttgccagggagacccccgaacctttgtgccaggacacctcctggtcccctgcacctctcctgttcggtttagacccccaaactggagggggcatggagaaccgtagagcgcaggaacgggtgggtaattctagagacaaaagccaattaaagtccatttcagaaaaaaaaaaaaaaaaaaaaaaaaaaaaaaaaaaaaaaaaaaaaaaaaaaaaaaaaaaaaa

SEQ ID NO: 1003 - DNA, 2339 bp, Homo sapiens
gccgcccggatcgccgccgccgccgccgcacggtggccttttgtgtttttcagtacgtggcatgcctggatgtccctgccctggctgtggcatggcgggcccaaggctcctcttcctcactgcccttgccctggagctcttgggaagggctgggggttcccagccggccctccggagccgggggactgcgacggcctgtcgcctggacaacaaggaaagcgagtcctggggggctctgctgagcggagagcggctggacacctggatctgctccctcctgggttccctcatggtggggctcagtggggtcttcccgttgcttgtcattcccctagagatggggaccatgctgcgctcagaagctggggcctggcgcctgaagcagctgctcagcttcgccctggggggactcttgggcaatgtgtttctgcatctgctgcccgaagcctgggcctacacgtgcagcgccagccctggtggtgaggggcagagcctgcagcagcagcaacagctggggctgtgggtcattgctggcatcctgaccttcctggcgttggagaagatgttcctggacagcaaggaggaggggaccagccaggcccccaacaaagaccccactgctgctgccgccgcactcaatggaggccactgtctggcccagccggctgcagagcccggcctcggtgccgtggtccggagcatcaaagtcagcggctacctcaacctgctggccaacaccatcgataacttcacccacgggctggctgtggctgccagcttccttgtgagcaagaagatcgggctcctgacaaccatggccatcctcctgcatgagatcccccatgaggtgggcgactttgccatcctgctccgggccggctttgaccgatggagcgcagccaagctgcaactctcaacagcgctggggggcctactgggcgctggcttcgccatctgtacccagtcccccaagggagtagaggagacggcagcctgggtcctgcccttcacctctggcggctttctctacatcgccttggtgaacgtgctccctgacctcttggaagaagaggacccgtggcgctccctgcagcagctgcttctgctctgtgcgggcatcgtggtaatggtgctgttctcgctcttcgtggattaactttccctgatgccgacgcccctgccccctgcagcaataagatgctcggattcactctgtggccgcatatgtgagaggcagagagggcgagtggctgcgagagagaatgagcctcccgccagacaggagggaggtgcgtgtggatgtatgtggtgtgcacatgtggccagaggtgtgtgcgcgagaccgacactgtgatccctgtgctgggtccggggcccagtgtagcgcctgtccccagccatgctgtggttacctctccttgccgccctgtcaccttcacctcctggagtaagcagcgaggaagagcagcactggtcccaagcagaggccttgccctgctgggaccccgggagtgagagcagcccaaggatcccagggtgcagggaactccagagctgcccacctcccactgccccctcagcacacacacagtccccaggcggcctaggggccaaggctggggcggctttggtcccttttcctggcccttccttccccacttctaagccaaagaaaggagaggcaggtgctcctgtaccccagccccactcagcactgacagtccccagctcctagtagtgagctgggaggcgcttcctaagaccctttcctcagggctgccctgggagctcattcctggccaacacgccctggcagcaccagcagctcttgccacctccagctgccaaacagcagcctgccgggcagggagcagccccaggccagagaggcctcccggtccagctcagggatgctcctgccagcacaggggccagggactcctggagcaggcacatagtgagcccgggcagccctgcccagctcaggcccctttccttccccattgaggttggggtaggtgggggcggtgagggctccacgttgtcagcgctcaggaatgtgctccggcagagtgctgaagccataatccccaaccatttcccttggctgacgcccaggtactcagctggcccactccacagccaggcctggccctgcccttcaccgtggatgttttcagaagtggccatcgagaggtctggatggttttatagcaactttgctgtgattccgtttgtatctgtaaatatttgttctatagataagatacaaataaatattatccacataaaaaaaaaaaaaaaaaaaaaaaaaaaaaaaaaaaaaaaaaaaaaaaaaa

SEQ ID NO: 1004 - DNA, 1628 bp, Homo sapiens
gtggcagcggctggcggcaaaacctctcgagtgagcccctgcccgagtgccgcgggggagaggccgcgagcgggaccgagaagtgggctgggagcagaggtcgcggaggtggcgagcgaggccggggcccaggcggggaccggcaggggcccgggagtggcgggcacgccagggtcagggtgccgggcgagggagggggcccggggttggggaagggggcccggggagggaggtaaacagccctgcaggcctcggggcaccgttgctgggcggcgccggcggcatgtgcgagggcccgtcccgcatctcggggcccatccccccagacccgacgctctgtcctgacaactacaggcggccgacctcggctcaagggcgcctcgagggaaacgcgctgaagctggacttgctgacttccgaccgggccctggacaccaccgctccccgtggcccctgcatcggtcccggtgccggagagatcctggagcgcggccagcgcggcgtcggggacgtgctgttgcaactcgaggggatctccctaggtcctggggcctctctcaagaggaaggaccctaaggaccatgagaaggagaacctgaggcggatcagggagattcagaagcgcttcagagaacaggagcgcagccgggagcagggccagcccaggcccctgaaagctctgtggcgctcacccaagtacgacaaggtggagtcccgggtcaaggcccagctccaggagcctggccctgcctctgggacagagtctgcccacttcctgcgggcgcactcccgctgcggccctggcctcccaccaccccatgtatctagtccccagccaaccccaccaggtcccgaagctaaggagccaggcctgggggtggacttcattcgtcacaatgcacgagctgccaagagagccccccggaggcattcctgctcactgcaggtcctggcacaagtgctagagcagcagcggcaggcccaggagcactacaatgccacgcagaagggccatgtgccacattacttgttggagcgcagggacctgtggcggcgggaggccgaggcccgcaagcagagccagccggaccctgccatgcccccaggccacacgcgcatgcctgagaaccagcggctggaaacactgaccaagctgctccagagccagagccagctgctgcgtgagctggtactgctgcctgctggggcagactcactgagagcccagagccaccgtgctgagctggaccggaagctggtgcaggtagaggaggccatcaagatcttttctcggcccaaagtcttcgtgaagatggacgactgagcccctttgggggacagtggcaaggagctccatgctgaggatcgccacatggctgcaaaggacagggttggacccaatcccagagcagaggtctgaagacaggagcaggggggtggccagtgtccctagagcactcttcccagtcaccagtggctgcagaagggccaccctagccttttaactgctttgtcaaaattaaacattttgtacacagaaaaaaaaaaaaaaaaaaaaaaaaaaaaaaaaaaaaaaaaaaaaaaaaaaaaaaaaaaaaaaaaaaaaaaaaaaaaaaaaaaaaaaaaaa

SEQ ID NO: 1005 - DNA, 1807 bp, Homo sapiens
ctctgagtcaccaacctgaggctgccccggccgcctgcgcacccggcagcaccatgacagatcaggcctttgtgacactaaccacaaacgatgcctacgccaaaggtgccctggtcctgggatcatctctgaaacagcacaggaccaccaggaggctggtcgtgctcgccacccctcaggtctcagactccatgagaaaagttttagagacagtctttgatgaagtcatcatggtagatgtcttggacagtggcgattctgctcatctaaccttaatgaagaggccagagttgggtgtcacgctgacaaagctccactgctggtcgcttacacagtattcaaaatgtgtattcatggatgcagatactctggtcctagcaaatattgatgatctttttgacagagaagaattgtcagcagcaccagacccagggtggcctgactgcttcaattccggagtcttcgtttatcagccttcagttgaaacatacaatcagctgttgcatcttgcttctgagcaaggtagttttgatggtggggaccaaggcatactgaacacattttttagcagctgggcaacaacagatatcagaaaacacctgccgtttatttataacctaagcagcatctctatatactcctacctcccggcatttaaagtgtttggtgcaagtgccaaagttgtgcatttcctgggacgagtcaaaccatggaattatacttatgatcccaaaacaaaaagtgtcaaaagtgaggcccatgatcccaacatgactcatccagagtttctcatcctgtggtggaacatctttaccaccaacgttttacctctgcttcaacaatttggccttgtcaaagacacctgctcatatgtaaatgtgctttcagacttggtctatacactggctttctcttgtggcttctgtagaaaggaagatgtctcaggagccatatcacatctgtcccttggggagatcccagctatggcacagccgtttgtatcctcggaagaacggaaggaacgatgggaacagggccaggctgattatatgggagcagattcctttgacaacatcaagaggaaacttgacacttacctccagtagaaacactgcatttttctgtgaacacatccacttcacaagccttgtttctgatacttagtatctagagctgggttgagaaaagtctgttacagttgctagaggttttcattaaaacttatcagatgagaggcttttttaggataagaggtgagaactgggcaaaagttgtgaagcagcaattctgttatatggacagtgttctgctttttaatcctatttagcttgtttcagaaattctcacttttgttgactgccaacatacaaagtaagggaaactcaagatattaagatggctgtatcagttcttaaaatctgcagagcctggttcaaaatcagtcactcccttcagaagcagacatggcatctgttccttgcttgcttgttggttgtgtacctttcacgagacctgaattttagaattgcccagtgctgccagagtgagtgagtgtaattctcctttcaggtaaagataggctatctcaacactgctgagtgattcataaacatatcaaccaatagcattaacccattttatttcctgtccttagtgtctgaagatgctcaccagttttctgtgtacagtaaggcagcatgctaaaatgcttttgttcagttctggatatttgaaaatagcagtgtgttctctgatggttacctgcagtggcaccctgtacaaaaaataaaagacttattggtgtaaa

SEQ ID NO: 1006 - DNA, 2489 bp, Homo sapiens
aatggagggcggtctgagcttcgctcacgaaaggagccgggaggcgctggcggctccaagagtctctgtgtccctggcagcggacctcatcttccctcacgccggagccccgatctctgcgccccggcccgacccagctgcgctctgtccgtctaagacgcgcggaaactacaactcccagagctcatctcgccgagatccggccccacgagtcaggtggcggaggtcagattgctttggagacgctgagagaacctttgcgagagcgccggttgacgtgcggagtgcggggctccgggggactgagcagcacgagaccccatcctcccctccgggttttcacactgggcgaagggaggactcctgagctctgcctcttccagtaacattgaggattactgtgttttgtgagagctcgctaggcgccctaagcaacagagttctgagaaatcgagaaacatgataaggaattggctgactatttttatcctttttcccctgaagctcgtagagaaatgtgagtcaagcgtcagcctcactgttcctcctgtcgtaaagctggagaacggcagctcgaccaacgtcagcctcaccctgcggccaccattaaatgcaaccctggtgatcacttttgaaatcacatttcgttccaaaaatattactatccttgagctccccgatgaagttgtggtgcctcctggagtgacaaactcctcttttcaagtgacatctcaaaatgttggacaacttactgtttatctacatggaaatcactccaatcagaccggcccgaggatacgctttcttgtgatccgcagcagcgccattagcatcataaaccaggtgattggctggatctactttgtggcctggtccatctccttctaccctcaggtgatcatgaattggaggcggaaaagtgtcattggtctgagcttcgacttcgtggctctgaacctgacaggcttcgtggcctacagtgtattcaacatcggcctcctctgggtgccctacatcaaggagcagtttctcctcaaataccccaacggagtgaaccccgtgaacagcaacgacgtcttcttcagcctgcacgcggttgtcctcacgctgatcatcatcgtgcagtgctgcctgtatgagcgcggtggccagcgcgtgtcctggcctgccatcggcttcctggtgctcgcgtggctcttcgcatttgtcaccatgatcgtggctgcagtgggagtgatcacgtggctgcagtttctcttctgcttctcctacatcaagctcgcagtcacgctggtcaagtattttccacaggcctacatgaacttttactacaaaagcactgagggctggagcattggcaacgtgctcctggacttcaccgggggcagcttcagcctcctgcagatgttcctccagtcctacaacaacgaccagtggacgctgatcttcggagacccaaccaagtttggactcggggtcttctccatcgtcttcgacgtcgtcttcttcatccagcacttctgtttgtacagaaagagaccggggcttcaggcagcgcgcacaggctctggcagccgtctcaggcaggactgggcaccaagcttgcagccgaaggccttgccccaaactaccagcgtttctgcaagcagcttgaagggctgaccttgcagccgggtgagccaagggcactttgctgccaccactgcgttcccagagaccaagcagcccggtgccgtggccagtgaactcagaggtgctggtggacgggctaggactttggggttaggccatggggctctttctctgaaggccactttcctgacgtactctctgtacataactcagcgtccgcgactgcagtaacagccggccctacccagagtatttctgagccatgaggggcccaccagattggttctgaatcggactcatgcccagcgcattagcatagtaactcctttcagattttttggagggacgtttggaagtggcttactctcttctgccctctttcctacctccaccttctcagatgagccccatctgagcacatccagctgctccttacccagcatctggagtacaggacatagctctctcctgctaccagtctgtgccttagaggtctgttaggcctgccaaacggcgaccagctcccctggagcgagggcaggccccttccctctctttccccagacacctacttgagactcaccaatttctggcctgttcaggagcctcagataagtatttgtacttgagaccacctcacacaatctgtatgggcccaaccctgatctcaaacctccttccctctgcctgaagctgtcgtccttcctatggcaggagggggggggggtcccaggacgtgcctcatacatgacttgagcttgtcagtccactgagtttccttctatgagatcaacgcgaggggcctgtatcttgaattaaagcctactcgcttcctttctgcaaaaaaaaaaaaaaaa

SEQ ID NO: 1007 - DNA, 2611 bp, Homo sapiens
cgcctctcccaaagtctagccgggcaggggaacgcggtgcattcctgaccggcacctggcgaggctcatgcgtcccgtgagggcggttcctcgagcctgggggcgctcagattgctttggagacgctgagagaacctttgcgagagcgccggttgacgtgcggagtgcggggctccgggggactgagcagcacgagaccccatcctcccctccgggttttcacactgggcgaagggaggactcctgagctctgcctcttccagtaacattgaggattactgtgttttgtgagagctcgctaggcgccctaagcaacagagttctgagaaatcgagaaacatgataaggaattggctgactatttttatcctttttcccctgaagctcgtagagaaatgtgagtcaagcgtcagcctcactgttcctcctgtcgtaaagctggagaacggcagctcgaccaacgtcagcctcaccctgcggccaccattaaatgcaaccctggtgatcacttttgaaatcacatttcgttccaaaaatattactatccttgagctccccgatgaagttgtggtgcctcctggagtgacaaactcctcttttcaagtgacatctcaaaatgttggacaacttactgtttatctacatggaaatcactccaatcagaccggcccgaggatacgctttcttgtgatccgcagcagcgccattagcatcataaaccaggtgattggctggatctactttgtggcctggtccatctccttctaccctcaggtgatcatgaattggaggcggaaaagtgtcattggtctgagcttcgacttcgtggctctgaacctgacaggcttcgtggcctacagtgtattcaacatcggcctcctctgggtgccctacatcaaggagcagtttctcctcaaataccccaacggagtgaaccccgtgaacagcaacgacgtcttcttcagcctgcacgcggttgtcctcacgctgatcatcatcgtgcagtgctgcctgtatgagcgcggtggccagcgcgtgtcctggcctgccatcggcttcctggtgctcgcgtggctcttcgcatttgtcaccatgatcgtggctgcagtgggagtgatcacgtggctgcagtttctcttctgcttctcctacatcaagctcgcagtcacgctggtcaagtattttccacaggcctacatgaacttttactacaaaagcactgagggctggagcattggcaacgtgctcctggacttcaccgggggcagcttcagcctcctgcagatgttcctccagtcctacaacaacgaccagtggacgctgatcttcggagacccaaccaagtttggactcggggtcttctccatcgtcttcgacgtcgtcttcttcatccagcacttctgtttgtacagaaagagaccggggtatgaccagctgaactagcacccagggacccagtgtacccagcctctggcctcgtgccctgctggggaaggcctcacccagcgaaggccggagaagcggttgggccctggcacacagggctggctcagtgtgcggacagaggagaccactctgctcctggggccagaggccattcaatagcctgccttcgtccgggcccctcctgggcctccccggccaggcacgtggcaccgtcgccttgacaccgccatctcttttctttaaggcttcaggcagcgcgcacaggctctggcagccgtctcaggcaggactgggcaccaagcttgcagccgaaggccttgccccaaactaccagcgtttctgcaagcagcttgaagggctgaccttgcagccgggtgagccaagggcactttgctgccaccgctgcattcccagagatcaagcagcccggtgccgtggccagtgaactcagaggtgctggtggacgggctaggactttggggttaggccatggggctctttctctgaaggccactttcctgacgtactctctgtacataactcagcgtccgtgactgcagtaacagccagccctacccagagtatttctgagccatgaggggcccaccagattggttctgaattggattcatgcccagcgcattagcatagtaactcctttcagattttttggagggacgtttggaagtggcttactctcttctgccctctctcctacctccaccttctcagatgagccccatctgagcacatccagctgctccttacccagcatctggagtacaggacatagctctctcctgctaccagtctgtgccttagaggtcgttaggcctgccaaacggcgaccagctcccctggagcgagggcaggccccttccctctctttccccagacacctacttgagactcaccaatttctggcctgttcaggagcctcagataagtatttgtacttgagaccacctcacacaatctgtatgggcccaaccctgatctcaaacctccttccctctgcccaaagctgtccttcctatggcaggaggggtgggggtcccaggacgtgcctcatacatgacttgagcttgtcagtccactgagtttccttctacgagatcaacgcgaggggcctgtatcttgaattaaagcctactcgcttcctttc

SEQ ID NO: 1008 - DNA, 2546 bp, Homo sapiens
ttcctttccagcctcacgcccgtgggctgcagttggaacgatggcggcggcagctgccgccgggcctagcccggggtctggacctggggactccccagaagggcccgagggggaggctccggagcgtcggcggaaggcgcacgggatgctgaagctttactacggcctctcggaaggggaggcggcgggacgccccgcggggcccgaccccctggacccgactgatctgaacggggcgcacttcgacccggaagtttacctagacaagctgcgtagagagtgccctctggcccagttgatggacagtgagacggacatggtgcggcagatccgggctctagacagcgacatgcagaccctggtctatgagaactacaacaagttcatctcagccacagacaccatccggaagatgaagaacgatttccggaagatggaggatgagatggaccggctggccaccaacatggcagtgatcaccgacttcagcgctcgcatcagcgccacgctgcaggaccgccacgagcgcatcaccaagctggcaggggtccacgcgctgctgcggaagctgcagttcctctttgagctgccctcgcgcctcaccaagtgcgtggaactgggcgcctatgggcaggcggtgcgctaccagggccgcgcgcaggccgtgctgcagcagtaccaacacctgccctcgttccgcgccatccaggacgactgccaggtcatcacggcccgcctggcccagcagctgcggcagcgctttagggagggcggctcaggcgccccggagcaggcagagtgcgtggagctgctgctggccctgggcgagcctgcggaggagctgtgcgaggagttcctggcgcacgcccgcggccggctggagaaggagctgagaaacctggaggccgagctggggccctcacctccggctcccgacgtgttagagttcaccgaccatggaggcagtggcttcgtgggcggcctctgccaggtggcggcggcctaccaggagctgtttgcggcccagggcccagcaggtgccgagaagctggcggccttcgcccggcagctgggcagccgctattttgcgctggtggagcggcggctggcgcaggagcagggtggtggtgacaactcactgctggtgcgggcgctggaccgcttccaccggcgcttgcgggctcccggggccctgctggccgctgccgggctcgcagacgctgccacggagatcgtggaacgagtggcccgcgagcgcctgggccaccacctgcagggtctccgggcggccttcctgggctgcctgacagacgtccgccaggcgctggcagcacctcgcgtggctgggaaggagggccctggcctggccgagttgctggccaatgtggccagctccatcctgagccacattaaggcctctctggcagcagtgcaccttttcaccgccaaagaggtgtccttctccaacaagccctacttccggggtgagttctgcagtcagggtgtccgtgagggcctcatcgtgggcttcgtccactctatgtgccagacggctcagagcttctgcgacagccctggggagaaggggggtgccacaccacctgccctgctcctgctgctctcccgcctctgcctggactacgagacggccaccatctcctacatcctcactctcactgatgaacagtttctggtgcaggatcagttcccagtgacgcccgtgagcacgctgtgtgcagaggccagggaaacggcgcggcggctgctgacccactacgtgaaggtgcagggcctggtcatatcacagatgctgcgcaagagcgtggagactcgcgactggctcagcactctggagccccggaatgtgcgggccgtcatgaagcgggtggtggaggataccaccgccatcgacgtgcaggtggggctcctgtacgaagagggtgttcgcaaggcccagagcagcgactccagcaagaggactttctccgtgtacagcagctctcggcagcagggccgctacgcccccagctatacccccagtgccccgatggacaccaacctcttgagcaatatccagaagctattctctgaacgtattgatgtgttcagccctgtggagttcaacaaggtgtcggtgctgaccggcatcatcaagatcagcctgaagacgctgctggagtgtgtgcggctgcgcacctttgggcgcttcgggctgcagcaggtgcaagtggactgccactttctgcagctctacctgtggcgttttgtggccgacgaagaactcgtgcacttgctgctggacgaagtggtggcctctgctgccctgcgctgcccagaccctgtgcccatggagcccagtgtggttgaggtcatctgcgagcgcggctaggcgcagccgctgccatgcaccggtctgtccctgcaccccatggcacccaggatctggtctcggtggtccttccccgcaggcaggtgtcaggaccggcctaataaacatgtgtggcctcctcaaaaaaaaaaaaaaaaaaaaaaaaaaaaaaaaaaaa

SEQ ID NO: 1009 - DNA, 2692 bp, Homo sapiens
gcagtccagctgctctggacgctgaggccccggcttctcttgctggggtgtcgattcgggagggctgagggcgcggccgagagaacggggcggtcaccgccgccgtggcccgcgcgtcccgcgctctccttgcagtgcaggccccagccgctctcgggcgcggcgtgggggaggcggccctgcaggtgcgtacccggggtccgacacgtgcggggcttcctgcgagctgagtccccgctgcgcgtcttcaggcctttgtaagttgtcaaatttcccaccggcccagctcatcgagcttcttcccagctgtgaacaggagggcctgttccctaattcttgccgaaattgttccaactgctggtgttctgcaagatggagccaggaggagagcccacaggtgctaaagagagcagtaccctgatggagtcccttgcagctgtgaaggctgctttcctggcgcaggccccgagtggcagccggtcagccgaggtgcaggcagctcagagcacggagcctgccgcagaggcaggcgctcccgagggagagggccacagaggggggcctccccgggcgttggggtctcttggcctttgtgaaaaccaggaagccagagagaggcccggaggttcccctcgaggcccggtcacttctgagaaaactggaggacagagtggcctcgagtcagacgtccctccgaacgcaggccccggcgcagagggcgggggcagctggaaggggcggcctttcccgtgcggcgcctgtggccgcagcttcaagtgctcctcggacgcggcaaagcaccggagcatccactcgggggagaaaccgtacgagtgcagcgactgcgggaaggccttcatccacagctcgcacgtggtccggcaccagcgggcgcacagcggggagaggccctacgcgtgcgccgagtgcggcaaggccttcggccagagcttcaacctcctccggcaccagcgcgtgcacacgggcgagaagccctacgcgtgcgccgactgcggcaaggccttcggccagaggtcggacgccgccaagcaccgccgcacccacaccggggagaggctgtacgcgtgcggcgagtgcgggaagcgcttcctgcacagctcgaacgtggtccggcaccggcggacccaccacggggagaacccgtacgagtgccgggagtgcggccaggccttcagccagagctccaacctcctccagcaccagcgcgtgcacacgggggagcggcccttcgcctgccaggactgcggccgcgccttcagccgcagctccttcctccgcgagcactgccgcatccacaccggggagaagccccaccagtgcggccactgcgggcgcgcgttccgggcgctgtcgggcttcttccggcaccagcgactccacacgggcgagaagccgttccgctgcaccgagtgcggccgcgccttccgcctgagcttccacctcatccagcaccggcgggtgcatggcgccgagtgagccggggctgcggcggaagagatgccggcggcctggtgggcgcgaggccgaggccgggggaggctcctgtccgccccgtgcgcggtgaggaagtaacagccggctgcgcgcctggttctcgggttgcgaaagcctcgccaggcctgcatccgccttggcttgggagcaatcaggagagacagggctcggggaaggcgagcgctgcccgcgggaggcgattcccagaggcggggaggtctcaggggtctgtcccgggccggccgcccgcctctgagactccccgcctcccacggtcagctgctgcggggcagtggccggtgattgaatcggtcattcctccgcaaccaggcctccatcaaaaccctgcatgagatgagggcctcgggcttcgggttggtgaaggcggggtgggggggcagttaggaagggggcgcccagacagggcatggaagcctcgcgtcctcccccgtaccttgcgggtcggtggttcatccatgtatttcaacgccttttcacagccggttcatatggtcccgacttctgtgtgcttagaaaattatggaacttggccgggtgcggtggctcccgcctgtaatcctagcactttgggaggccgaggcgggcggatcacacggtcaagagatcaagaccatcctggccaacatggcaaaacccccatctcgactaaaaatacaaaaaattaattgggcgtggtggcgtgcgcctgtaatctcagctacttgggagcctggggcaggagaatcacttgaacctgggaggcggaggttgcagtgagcggagatctgggcactgtactttagcctgggcgacagagagacccatctcaaaaaaaaaaattggaacctgagaagggggtcgtggggtccccggggcccaccgtctgcacttggcatctgaagtcggggtggtcttgtgggactgaccccttaccctgtgggttctgcactagctccgggcaattggtgacagaatcgagttaaattgtaggacatcgcgttggtgtctgagagggagttggagagctggttggtgtggagggaaaggcttacacacatgtgatttcagaagcgttctgtgggtagaggaatcgttttctctttgagactgttatgagtatgtacaaatgttatttcctgtaaaatattttcattttttaaaatgttattttctagat

SEQ ID NO: 1010 - DNA, 3245 bp, Homo sapiens
attttgtggcccgctatggcggcggtgttgaggttgggtacgggatgcggggtctttgactgaaggggtaggccaagtggaggtatcagggacgtcgcgcggcacagaagaggaccagcctggacgccggggacgctgtcatgtacggcgcgagcgggggccgcgccaaacccgagaggaaaagcggcgcgaaggaggaggccgggccaggcggtgccggcggtgggggcagccgagtggagctcttggttttcggctatgcctgcaagctgttccgggacgacgagcgggccctggctcaggaacagggacagcacctcatcccctggatgggggaccacaagatcctcatcgacagatatgatggacgtggtcacctgcatgacctttctgagtacgatgctgagtattccacgtggaacagagattatcagctgtctgaagaggaggcgcgaatagaggccctgtgtgatgaagagaggtatttagccttgcatacggacttgcttgaggaggaggcaaggcaagaggaagaatacaagcgattgagtgaagcactagcagaggatgggagctacaatgccgtggggttcacttacggtagcgactattacgacccgtcagagccgacggaggaggaggagccttccaaacagagagaaaaaaatgaggccgaaaatttagaggaaaatgaagagcccttcgttgcccccttaggattgagcgtcccgtctgacgtggagttgccaccaaccgctaaaatgcacgccatcatcgagcgcacggccagcttcgtgtgcaggcagggagcacagtttgagatcatgctgaaggccaagcaggcccggaactcccagtttgactttctgcgcttcgaccactacctcaacccctactataagttcatccagaaagccatgaaagagggacgctacactgtcctggcagaaaacaaaagtgacgagaaaaaaaaatcaggagtcagctctgacaatgaagatgatgatgatgaagaagatgggaattaccttcatccctctctctttgcctccaagaagtgtaaccgccttgaagagctgatgaagcccttgaaggtagtggacccagatcatcccctcgcagcacttgttcgtaaggcacaggctgacagttccactcccaccccacacaacgcagacggtgcgcctgtgcagccctcccaggtggagtacacggcagactcgaccgtggcagccatgtattacagctactacatgctaccggacggcacttactgcctggcgccgccccctcccggaatcgacgtgactacttactacagcacccttcctgctggcgtgaccgtgtctaactcccctggagtgacgaccaccgccccaccacctcctgggaccacaccactaccgcccccaaccacagcagagactagcagcggggccacctccacaaccaccaccacaagtgcacttgcccccgtggccgccatcatccccccgccccccgacgtccagcccgtgattgacaagctggccgagtatgtcgccaggaacggcctgaagttcgagaccagtgttcgtgccaagaatgatcaaagatttgagttcctgcagccgtggcaccagtataatgcttattatgagtttaagaagcagttcttcctccagaaagaagggggcgatagcatgcaggctgtgtctgcaccagaagaggctcccacagactctgctcccgagaagccaagtgatgctggggaggatggcgcgcctgaagacgcagccgaggtgggagcacgggcaggctcaggcgggaagaaggaggcatcgtccagtaagaccgtcccggacgggaagctggtgaaagcttcctttgctccaataagctttgcaatcaaggccaaagaaaatgatctgcttcccctggaaaaaaatcgtgttaagctagatgatgacagtgatgatgatgaagaaagcaaagaaggccaagaaagttctagtagtgctgcaaacactaacccagcagttgccccaccctgtgtagttgttgaggagaagaagcctcaacttacccaggaggagctagaagcaaagcaagcaaagcaaaagctggaagatcgcctcgcagctgctgcccgggaaaagctggcccaggcgtctaaggagtcaaaagagaaacagcttcaagcagaacgtaaaaggaaagcggcgttatttttacagaccctcaaaaatcctctgccggaagcagaagctgggaaaattgaggagagtcctttcagtgtcgaggaatccagcactacgccctgccctctactgactggaggcaggcctctgcctactttagaagttaaaccacccgataggccttcgagcaaaagcaaagatccaccgagagaagaagagaaagaaaagaaaaagaaaaagcacaaaaaaagatctcgaacaagatcacgttctcccaagtaccattcgtcatccaagtccaggtctagatcacactcaaaagcaaagcattctcttcccagtgcctatcggacagtgcggcggtcgaggtcccgctcccggtcccctcggaggagagcccactcccctgagagacggagggaagagaggagtgtgcccactgcctaccgcgtgagccgcagccctggggccagcaggaagcggacccgctccagaagtccccacgagaagaagaagaagaggcggtcccggtcgcggaccaagtccaaggccaggtctcagtcggtgtcacccagcaagcaggcagcgccccggcccgcggcccccgcggcccactcggcgcactcagccagcgtctcccctgtggagagtcggggctccagccaggagcgctccaggggagtctctcaggaaaaagaagcccagatctcttcagcaatcgtttcttccgtgcagagcaaaatcactcaggatctcatggccaaagtcagagcgatgcttgcagcttccaaaaacctgcaaaccagcgcttcctgagacggggccagcggaggcagagccgggaggctgcgtgggcttctgggcaggctcacgcagacgccggccacaccatccacctggccgcctccatggacccttggtggcttttgtaaattaatttttgatgacattttgagttttaagatttctgaccagcagtctcttacctgtatatttgtaaatatatcatgtttctgtgaaaatgtattatgaaataaaatgggaggaaacaccttttctagctag

SEQ ID NO: 1011 - DNA, 3198 bp, Homo sapiens
attttgtggcccgctatggcggcggtgttgaggttgggtacgggatgcggggtctttgactgaaggggtaggccaagtggaggtatcagggacgtcgcgcggcacagaagaggaccagcctggacgccggggacgctgtcatgtacggcgcgagcgggggccgcgccaaacccgagaggaaaagcggcgcgaaggaggaggccgggccaggcggtgccggcggtgggggcagccgagtggagctcttggttttcggctatgcctgcaagctgttccgggacgacgagcgggccctggctcaggaacagggacagcacctcatcccctggatgggggaccacaagatcctcatcgacagatatgatggacgtggtcacctgcatgacctttctgagtacgatgctgagtattccacgtggaacagagattatcagctgtctgaagaggaggcgcgaatagaggccctgtgtgatgaagagagaggaagaatacaagcgattgagtgaagcactagcagaggatgggagctacaatgccgtggggttcacttacggtagcgactattacgacccgtcagagccgacggaggaggaggagccttccaaacagagagaaaaaaatgaggccgaaaatttagaggaaaatgaagagcccttcgttgcccccttaggattgagcgtcccgtctgacgtggagttgccaccaaccgctaaaatgcacgccatcatcgagcgcacggccagcttcgtgtgcaggcagggagcacagtttgagatcatgctgaaggccaagcaggcccggaactcccagtttgactttctgcgcttcgaccactacctcaacccctactataagttcatccagaaagccatgaaagagggacgctacactgtcctggcagaaaacaaaagtgacgagaaaaaaaaatcaggagtcagctctgacaatgaagatgatgatgatgaagaagatgggaattaccttcatccctctctctttgcctccaagaagtgtaaccgccttgaagagctgatgaagcccttgaaggtagtggacccagatcatcccctcgcagcacttgttcgtaaggcacaggctgacagttccactcccaccccacacaacgcagacggtgcgcctgtgcagccctcccaggtggagtacacggcagactcgaccgtggcagccatgtattacagctactacatgctaccggacggcacttactgcctggcgccgccccctcccggaatcgacgtgactacttactacagcacccttcctgctggcgtgaccgtgtctaactcccctggagtgacgaccaccgccccaccacctcctgggaccacaccactaccgcccccaaccacagcagagactagcagcggggccacctccacaaccaccaccacaagtgcacttgcccccgtggccgccatcatccccccgccccccgacgtccagcccgtgattgacaagctggccgagtatgtcgccaggaacggcctgaagttcgagaccagtgttcgtgccaagaatgatcaaagatttgagttcctgcagccgtggcaccagtataatgcttattatgagtttaagaagcagttcttcctccagaaagaagggggcgatagcatgcaggctgtgtctgcaccagaagaggctcccacagactctgctcccgagaagccaagtgatgctggggaggatggcgcgcctgaagacgcagccgaggtgggagcacgggcaggctcaggcgggaagaaggaggcatcgtccagtaagaccgtcccggacgggaagctggtgaaagcttcctttgctccaataagctttgcaatcaaggccaaagaaaatgatctgcttcccctggaaaaaaatcgtgttaagctagatgatgacagtgatgatgatgaagaaagcaaagaaggccaagaaagttctagtagtgctgcaaacactaacccagcagttgccccaccctgtgtagttgttgaggagaagaagcctcaacttacccaggaggagctagaagcaaagcaagcaaagcaaaagctggaagatcgcctcgcagctgctgcccgggaaaagctggcccaggcgtctaaggagtcaaaagagaaacagcttcaagcagaacgtaaaaggaaagcggcgttatttttacagaccctcaaaaatcctctgccggaagcagaagctgggaaaattgaggagagtcctttcagtgtcgaggaatccagcactacgccctgccctctactgactggaggcaggcctctgcctactttagaagttaaaccacccgataggccttcgagcaaaagcaaagatccaccgagagaagaagagaaagaaaagaaaaagaaaaagcacaaaaaaagatctcgaacaagatcacgttctcccaagtaccattcgtcatccaagtccaggtctagatcacactcaaaagcaaagcattctcttcccagtgcctatcggacagtgcggcggtcgaggtcccgctcccggtcccctcggaggagagcccactcccctgagagacggagggaagagaggagtgtgcccactgcctaccgcgtgagccgcagccctggggccagcaggaagcggacccgctccagaagtccccacgagaagaagaagaagaggcggtcccggtcgcggaccaagtccaaggccaggtctcagtcggtgtcacccagcaagcaggcagcgccccggcccgcggcccccgcggcccactcggcgcactcagccagcgtctcccctgtggagagtcggggctccagccaggagcgctccaggggagtctctcaggaaaaagaagcccagatctcttcagcaatcgtttcttccgtgcagagcaaaatcactcaggatctcatggccaaagtcagagcgatgcttgcagcttccaaaaacctgcaaaccagcgcttcctgagacggggccagcggaggcagagccgggaggctgcgtgggcttctgggcaggctcacgcagacgccggccacaccatccacctggccgcctccatggacccttggtggcttttgtaaattaatttttgatgacattttgagttttaagatttctgaccagcagtctcttacctgtatatttgtaaatatatcatgtttctgtgaaaatgtattatgaaataaaatgggaggaaacaccttttctagctag

SEQ ID NO: 1012 - DNA, 1328 bp, Homo sapiens
ccgcagcccatcggcatggctcaagagtttgtgaactgcaaaatccagcctgggaaggtggttgtgttcatcaagcccacctgcccgtactgcaggagggcccaagagatcctcagtcaattgcccatcaaacaagggcttctggaatttgtcgatatcacagccaccaaccacactaacgagattcaagattatttgcaacagctcacgggagcaagaacggtgcctcgagtctttattggtaaagattgtataggcggatgcagtgatctagtctctttgcaacagagtggggaactgctgacgcggctaaagcagattggagctctgcagtaaccacagaacaggccccatgctgacgtccctcctcaagagctggatggcattgcaaatgatgacagcacttctggtggatgaatttgggggcacaaacagcttttttcctcttttggctcagtatttaaaagtggaccaacttgctcttaatcacagggcaagaaggttgaccgggccatcttggttttcttctggatgagctctttggttttcagaagactgtgacaagttctggcccaggattcgctcactgaccctcaattgtcctctttggcatgcgtttcttactgttctccatgtgtcggcatgtctctacctctaagccagtgtttttcaactatgtttatccagactccttctccacaatgatgaatccacagttggttatctgctactgcccattagctaaaatcattttgctgcttgactttatggagtttgtattatgaaatcagtggtattttgaatgtgttctttctaactacatgcatctctccactcaactccaccccatcccatcccaccttgaaaatcgctgctctgaaccagtgttctccaccttgtcctccacacatctcataggaaatgttcaacaattctgtgaaaggtcacaggacccaattggagaaatcatatgaaaagcatagttggtcttggtgtcatatggatcagaggcacaagtgcagaggctgtggtcatgcggaacactctgttatttaagatggctatccagataatcctgaacactgtgtatttattttatttagactaccagcaaagattaaagcatgaaatgtaaaacatctgataaaacttacagccccctacaccaagagtgtatctgtgaaagagctcctacactttgaaaacttaagaatcccttatcatgaagtttgcctgttctagaattgtaagattgttaatttccttcaatctctagtgacaacacttaatttcttttctaataaaaaaaacctatagatgattcagtg

SEQ ID NO: 1013 - DNA, 4302 bp, Homo sapiens
agcaagctgagctcagagcgaagctggcgagccaaggagataaagaaccctcggtggggatgcccagagggtgcatgctccacgcccctcgaaaccgattctcattgctgctgctgcaaagcaacccgaagtgcgccacctacccgactgaggctgcgcaagccccggggtctgggcggggtggtcctcgtgcgcgccgcgtcgccgtggagacgagggcgggcccgcgcgagactggcgtctagaggcgcgcgaagcgctgaggcgggcgtggaccgcgcgggagttaagaagcaggtcccggatcgccgtataccgccgggttttctcccaacgtcaggcccgatggctcggcttccccagttagaaggggaagataaaagactttgattcatgaagaatctgctcactgagaagtgtatatcaagccacaatttccatcaaaaagtgattaagcagagaatggagaagaaggttgattccaggtattttaaggatggtgcagttaagaaaccttattctgcaaagacactgtccaacaagaagtcttctgcatcctttgggatccggagggagttacctagtaccagtcatctagtgcagtatcgtggcacacatacttgtacccgacagggccggttaagagaactgcgcatcagatgcgtggccagaaagttcttatatttatggattcgaatgacttttggaagagtatttccctctaaagccagattttactatgagcagcgattactacggaaggtcttcgaagaatggaaagaggagtggtgggttttccagcacgagtggaaactctgtgttcgagctgactgtcactacaggtattacctgtacaacctgatgttccagacgtggaagacctatgtgcgtcagcagcaggagatgaggaacaagtacattagagccgaggttcatgatgcaaagcaaaagatgcgacaggcctggaagtcctggttgatctacgtggttgttcgtaggaccaaacttcagatgcagactacagctctggagtttaggcaacggattatcttacgggtgtggtggagcacgtggaggcagcgactaggacaggtccgtgtgagccgtgccctccatgcctctgctttgaagcacagggccctgagcctccaggtgcaggcttggtcacagtggcgggaacagctcctgtatgtccagaaggagaaacaaaaggttgtctctgcagtgaaacatcatcagcactggcaaaaacggagatttctaaaggcctggcttgaatacctgcaagtccgcagagtgaagagacagcagaatgagatggctgagcgattccatcatgtcactgtgctccagatatacttctgtgactggcagcaggcctgggagcggagggagagcttgtacgctcaccatgcccaggtggagaaactggccaggaagatggccctgcggcgcgcctttactcactggaaacactacatgctgctgtgtgcagaagaagctgcccagtttgagatggcagaagagcaccacaggcacagccagctgtatttttgctttagagccctaaaagacaatgtgacccacgctcatctccagcaaataagaaggaatcttgctcaccagcagcatggtgtcacgctgctgcacaggttctggaacctctggcggtctcagattgagcagaaaaaggaaagagagctgctccccttactgcatgctgcctgggaccactacagaatagcactgctgtgcaaatgtatcgaattgtggctacagtatactcagaagaggcggtacaagcagctgctacaggccagagcggatggtcatttccagcagagagccctgcctgctgccttccacacatggaacagactctggcgatggcgccaccaggaaaatgtcctcagtgcaagagcaacacgtttccacagggagacattagagaagcaagtattttctctctggaggcagaagatgtttcagcatcgagaaaaccgcctggcagagagaatggccatccttcacgcagagcgacagcttctgtataggtcttggttcatgtggcaccagcaggcagcagcacgtcaccaggagcaggagtggcaaacagtggcctgtgcccaccaccgccacgggcggctcaagaaagctttctgcctctggagggaaagtgcccaagggctcagaacagagaggacgggcagggtgcgggcagcagaattccacatggcccagctcctgcgttgggcctggagccagtggagggagtgcctggccctgcggggagcggagcggcagaagctgatgcgagcagacctgcaccaccagcacagcgtgctgcacagggcgctgcaggcatgggtgacttaccagggcagggtgcgaagcatcctccgggaggtggcagccagggagagccagcacaacaggcagctgctgcgcggggcattacgtcgctggaaagagaacaccatggcccgagtggatgaagccaaaaaaacctttcaagcaagtactcattacagaaggaccatatgttccaaggtcctggtccagtggcgggaagctgtgtcagtgcagatgtattaccgacagcaggaggactgtgccatctgggaggcccagaaggtgctggacaggggctgtctgcggacctggtttcagcgctggtgggactgcagccggaggtcagcccagcagagactgcagctggagagggcagtgcaacaccaccaccggcagctgctgctggaggggctggcccggtggaagacgcaccatctgcagtgtgtcaggaagaggctcctgcacaggcagagcacccaactgctggcacagagactcagccggacctgcttccgccagtggagacaacagctggcagccaggaggcaggagcagcgggcgacagtgcgggccctgtggttctgggccttctcgctgcaggcaaaggtgtgggccacgtggctggcctttgtactggaaaggaggagaaagaaggcgcggctgcagtgggcgctccaggcctaccaggggcagctcctccaggagggtgccacgcggctcctgcgctttgcagccagcatgaaggcctcccggcagcagctgcaggcccagcagcaggtccaggcggctcacagtctccatcgtgccgtccgccgctgtgccacgctctggaaacagaaagtgctgggccggggcgggaagcctcagcccctggcagccatcgcacccagcaggaaagtgacgtttgagggtccccttctcaaccgcattgctgctggggctggggatggcacccttgagaccaagaggccacaggcttctcggcctctgggagctctgggccgcctggctgctgaggagccccacgccctggagctcaacactgcccactcagcgaggaagcagccgcgacgcccacacttcctgttggagcctgcgcagagccagaggcctcagaagccacaggaacatggcctaggcatggctcagccagcagccccctccctgacgcggcccttcctggcagaggccccgacagcactggtcccacacagccccctgcctggggccctgtcaagcgcccctggcccgaagcagcccccgacggcaagcacaggcccggagctgctgctgctgcctctttcctccttcatgccctgcggggcggctgcaccagccagggtgtcagcacagcgggctactcctagggataagcccccggtcccctcatccctggccagtgtccctgacccccatctactccttcctggggacttctcagccaccagggctgggcctggactttcaactgcaggcagcctggaccttgaggctgaacttgaggagatccagcagcaactactgcactaccagaccaccaagcagaacctctggtcctgtcggcggcaagcgagcagcctgcgcaggtggctggagctgaacagagaggagccggggcctgaggaccaggaagtagagcagcaggtgcagaaagagctggaacaggtggaaatgcagatccagctgctggcagaggagctccaggctcagcgccagcccattggcgcctgcgttgcccgcatccaggccctgcggcaggccctgtgctagcgtgttcgcaccaggaacgcaggtgctgggctgtcggggaggcctcaggccacctccaggaacagaacacagttttaagtttgattttttttatttcaaaatgctttgcaattaaatgaattactgttcaaaaaaaaaaaaaaaaaaaaaaaaaaaaaaaaaaaaaaaaaaaaaaaaaaa

SEQ ID NO: 1014 - DNA, 4209 bp, Homo sapiens
agcaagctgagctcagagcgaagctggcgagccaaggagataaagaaccctcggtggggatgcccagagggtgcatgctccacgcccctcgaaaccgattctcattgctgctgctgcaaagcaacccgaagtgcgccacctacccgactgaggctgcgcaagccccggggtctgggcggggtggtcctcgtgcgcgccgcgtcgccgtggagacgagggcgggcccgcgcgagactggcgtctagaggcgcgcgaagcgctgaggcgggcgtggaccgcgcgggagttaagaagcaggtcccggatcgccgtataccgccgggttttctcccaacgtcaggcccgatggctcggcttccccagttagaaggggaagataaaagactttgattcatgaagaatctgctcactgagaagtgtatatcaagccacaatttccatcaaaaagtgattaagcagagaatggagaagaaggttgattccaggtattttaaggatggtgcagttaagaaaccttattctgcaaagacactgtccaacaagaagtcttctgcatcctttgggatccggagggagttacctagtaccagtcatctagtgcagtatcgtggcacacatacttgtacccgacagggccggttaagagaactgcgcatcagatgcgtggccagaaagttcttatatttatggattcgaatgacttttggaagagtatttccctctaaagccagattttactatgagcagcgattactacggaaggtcttcgaagaatggaaagaggagtggtgggttttccagcacgagtggaaactctgtgttcgagctgactgtcactacaggtattacctgtacaacctgatgttccagacgtggaagacctatgtgcgtcagcagcaggagatgaggaacaagtacattagagccgaggttcatgatgcaaagcaaaagatgcgacaggcctggaagtcctggttgatctacgtggttgttcgtaggaccaaacttcagatgcagactacagctctggagtttaggcaacggattatcttacgggtgtggtggagcacgtggaggcagcgactaggacaggtccgtgtgagccgtgccctccatgcctctgctttgaagcacagggccctgagcctccaggtgcaggcttggtcacagtggcgggaacagctcctgtatgtccagaaggagaaacaaaaggttgtctctgcagtgaaacatcatcagcactggcaaaaacggagatttctaaaggcctggcttgaatacctgcaagtccgcagagtgaagagacagcagaatgagatggctgagcgattccatcatgtcactgtgctccagatatacttctgtgactggcagcaggcctgggagcggagggagagcttgtacgctcaccatgcccaggtggagaaactggccaggaagatggccctgcggcgcgcctttactcactggaaacactacatgctgctgtgtgcagaagaagctgcccagtttgagatggcagaagagcaccacaggcacagccagctgctgctgcacaggttctggaacctctggcggtctcagattgagcagaaaaaggaaagagagctgctccccttactgcatgctgcctgggaccactacagaatagcactgctgtgcaaatgtatcgaattgtggctacagtatactcagaagaggcggtacaagcagctgctacaggccagagcggatggtcatttccagcagagagccctgcctgctgccttccacacatggaacagactctggcgatggcgccaccaggaaaatgtcctcagtgcaagagcaacacgtttccacagggagacattagagaagcaagtattttctctctggaggcagaagatgtttcagcatcgagaaaaccgcctggcagagagaatggccatccttcacgcagagcgacagcttctgtataggtcttggttcatgtggcaccagcaggcagcagcacgtcaccaggagcaggagtggcaaacagtggcctgtgcccaccaccgccacgggcggctcaagaaagctttctgcctctggagggaaagtgcccaagggctcagaacagagaggacgggcagggtgcgggcagcagaattccacatggcccagctcctgcgttgggcctggagccagtggagggagtgcctggccctgcggggagcggagcggcagaagctgatgcgagcagacctgcaccaccagcacagcgtgctgcacagggcgctgcaggcatgggtgacttaccagggcagggtgcgaagcatcctccgggaggtggcagccagggagagccagcacaacaggcagctgctgcgcggggcattacgtcgctggaaagagaacaccatggcccgagtggatgaagccaaaaaaacctttcaagcaagtactcattacagaaggaccatatgttccaaggtcctggtccagtggcgggaagctgtgtcagtgcagatgtattaccgacagcaggaggactgtgccatctgggaggcccagaaggtgctggacaggggctgtctgcggacctggtttcagcgctggtgggactgcagccggaggtcagcccagcagagactgcagctggagagggcagtgcaacaccaccaccggcagctgctgctggaggggctggcccggtggaagacgcaccatctgcagtgtgtcaggaagaggctcctgcacaggcagagcacccaactgctggcacagagactcagccggacctgcttccgccagtggagacaacagctggcagccaggaggcaggagcagcgggcgacagtgcgggccctgtggttctgggccttctcgctgcaggcaaaggtgtgggccacgtggctggcctttgtactggaaaggaggagaaagaaggcgcggctgcagtgggcgctccaggcctaccaggggcagctcctccaggagggtgccacgcggctcctgcgctttgcagccagcatgaaggcctcccggcagcagctgcaggcccagcagcaggtccaggcggctcacagtctccatcgtgccgtccgccgctgtgccacgctctggaaacagaaagtgctgggccggggcgggaagcctcagcccctggcagccatcgcacccagcaggaaagtgacgtttgagggtccccttctcaaccgcattgctgctggggctggggatggcacccttgagaccaagaggccacaggcttctcggcctctgggagctctgggccgcctggctgctgaggagccccacgccctggagctcaacactgcccactcagcgaggaagcagccgcgacgcccacacttcctgttggagcctgcgcagagccagaggcctcagaagccacaggaacatggcctaggcatggctcagccagcagccccctccctgacgcggcccttcctggcagaggccccgacagcactggtcccacacagccccctgcctggggccctgtcaagcgcccctggcccgaagcagcccccgacggcaagcacaggcccggagctgctgctgctgcctctttcctccttcatgccctgcggggcggctgcaccagccagggtgtcagcacagcgggctactcctagggataagcccccggtcccctcatccctggccagtgtccctgacccccatctactccttcctggggacttctcagccaccagggctgggcctggactttcaactgcaggcagcctggaccttgaggctgaacttgaggagatccagcagcaactactgcactaccagaccaccaagcagaacctctggtcctgtcggcggcaagcgagcagcctgcgcaggtggctggagctgaacagagaggagccggggcctgaggaccaggaagtagagcagcaggtgcagaaagagctggaacaggtggaaatgcagatccagctgctggcagaggagctccaggctcagcgccagcccattggcgcctgcgttgcccgcatccaggccctgcggcaggccctgtgctagcgtgttcgcaccaggaacgcaggtgctgggctgtcggggaggcctcaggccacctccaggaacagaacacagttttaagtttgattttttttatttcaaaatgctttgcaattaaatgaattactgttcaaaaaaaaaaaaaaaaaaaaaaaaaaaaaaaaaaaaaaaaaaaaaaaaaaa

SEQ ID NO: 1015 - DNA, 2100 bp, Homo sapiens
cgccgcggggccggatcctccgcgcggccgagtccatctcctgggaaatggggcggacagtgtttccttgactgactattgtgagcgccctctctctccggcggagcggagaccatggcccccactcaggcccccgggccccgctggaattcggagggcccctgggtaatggggcagagagatgggacctggggcaaaggctaagcgaaggagagctggagcgggtgaactaagagcgggggcgagatctgaggatggaaggctttgggggtgtcggaggcagagggacccgggggtttgcagcgaagggtgtctggagagggagagctgaggaggggccggttctgggggctgcagaacggggatttatggtgtcgactgggagcaggaggagggtcttcgaggggcctgggggcgggggactaagatggacgcctgggaagggaactgggaggcagcggggtgcctgggggccgagggctgaggacggggtgcggaggcgcactctgggaatgccgagagggtcccgcagagacgtcagggcgccgtgcgggccggcggggagctggggggctaggggcggacgccgacgtgatggcccttcccgcaggcgccgcggctctgctactgctgctgcccgccaccatgttccacctgctcctggcggcccgttcgggccccgcgcgcctgctgggtccacccgcgtccctgcccgggctggaggtgctgtggagcccacgggcgctgctgctgtggctcgcctggctcggcctgcaggcggcgctctacctactgccggcgcgcaaggtgcgggccccgctcgcggacgctcgggggagggaagcgaatgggctcggcgagggaaaggacgccccgggccttatcagagcccccttggacccgcagtggccgaggggcaggaattgaaggacaagagtcgcctgcgctatcctattaacggcttccaggccctggtgctgacagccctgttggtggggctggggatgtcagcggggctgcctctgggggcgctcccggaaatgctcctgcccttggcgtttgtcgccaccctcaccgctttcatcttcagcctctttctctacatgaaggcgcaggtagccccagtttcggccctggcacctggggggaactcaggcaatccgatttacgacttttttctgggacgagagctcaaccctcgtatctgtttcttcgacttcaaatatttctgtgaactgcgacccggcctcatcggctgggtcctcatcaacctggccctgttgatgaaggaggcagagcttcgaggcagtccctcactggccatgtggctggtcaatggcttccagttgctctacgtgggtgatgccctctggcacgaggaggccgtcctcaccaccatggatatcacacatgacgggtttggcttcatgctggcgtttggggacatggcctgggtgcccttcacctacagcctgcaggcccagttcctgctgcaccacccgcagcccctggggttgcccatggcctctgtcatctgcctcatcaatgctactggttactacatcttccgtggggcgaattcccagaaaaacactttccgaaagaatccttctgaccccagagtggctgggcttgagaccatctctacagccacagggcggaaactgctggtgtctgggtggtggggtatggtccgccatcccaactatcttggagacctcatcatggctctggcttggtccttgccctgcggggtgtcacacctgctgccctacttctacctcctctacttcaccgcgctgctggtgcaccgtgaggcccgggatgagcggagtgcctgcagaagtacggcctggcctggcaggagtactgccggcgtgtgccttaccgcatcatgccctacatctactgaagcggctccaccaccccaggtggggcatgtgcccactcatccaccagcacacccaggaccaggagcctcgacacacttgggactcaagggcttgcaccccacccagccctgaggatgaacaacctcagagaagaggtggtttagagcaaggaaaaaaatgaaaccagtgaccaaaaaaaaaaaaaaaa

SEQ ID NO: 1016 - DNA, 1432 bp, Homo sapiens
ttttactgaagttgctagaagtttacagaaaaggaagtgcaggaacatttcacaaatctacaatctgtgagtatcacatcctgtatagctgtaaacactggaataaggaagggctgatgactttcagaagatgaaggtaagtagaaaccgttgatgggactgagaaaccagagttaaaacctctttggagcttctgaggactcagctggaaccaacgggcacagttggcaacaccatcatgacatcacaacctgttcccaatgagaccatcatagtgctcccatcaaatgtcatcaacttctcccaagcagagaaacccgaacccaccaaccaggggcaggatagcctgaagaaacatctacacgcagaaatcaaagttattgggactatccagatcttgtgtggcatgatggtattgagcttggggatcattttggcatctgcttccttctctccaaattttacccaagtgacttctacactgttgaactctgcttacccattcataggaccctttttttttatcatctctggctctctatcaatcgccacagagaaaaggttaaccaagcttttggtgcatagcagcctggttggaagcattctgagtgctctgtctgccctggtgggtttcattatcctgtctgtcaaacaggccaccttaaatcctgcctcactgcagtgtgagttggacaaaaataatataccaacaagaagttatgtttcttacttttatcatgattcactttataccacggactgctatacagccaaagccagtctggctggaactctctctctgatgctgatttgcactctgctggaattctgcctagctgtgctcactgctgtgctgcggtggaaacaggcttactctgacttccctggggtgagtgtgctggccggcttcacttaaccttgcctagtgtatcttatccctgcactgtgttgagtatgtcaccaagagtggtagaaggaacaaccagccaatcacgagatacacatgggagggcatttgcattgtgatggaagacagagaagaaaagcagatggcaattgagtagctgataagctgaaaattcactggatatgaaaatagttaatcatgagaaatcaactgattcaatcttcctattttgtcagcgaagggaatgagactctgggaagttaaatgactggcctggcattatgctatgagtttgtgcctttgctgaggacactagaacctggcttgcctcccttataagcagaaacaatttctgccacaaccactagtctctttaatagtattgacttggtaaagggcatttacacacgtaactggatccagtgaatgtcttatgctctgcatttgcccctggtgatcttaaaattcgtttgcctttttaaagctatattaaaaatgtattgttgaatcaaaaaaaaaaaaaaa

SEQ ID NO: 1017 - DNA, 1460 bp, Homo sapiens
ttttactgaagttgctagaagtttacagaaaaggaagtgcaggaacatttcacaaatctacaatctgtgagtatcacatcctgtatagctgtaaacactggaataaggaagggctgatgactttcagaagatgaaggtaagtagaaaccgttgatgggactgagaaaccagagttaaaacctctttggagcttctgaggactcagctggaaccaacgggcacagttggcaacaccatcatgacatcacaacctgttcccaatgagaccatcatagtgctcccatcaaatgtcatcaacttctcccaagcagagaaacccgaacccaccaaccaggggcaggatagcctgaagaaacatctacacgcagaaatcaaagttattgggactatccagatcttgtgtggcatgatggtattgagcttggggatcattttggcatctgcttccttctctccaaattttacccaagtgacttctacactgttgaactctgcttacccattcataggaccctttttttttatcatctctggctctctatcaatcgccacagagaaaaggttaaccaagcttttggtgcatagcagcctggttggaagcattctgagtgctctgtctgccctggtgggtttcattatcctgtctgtcaaacaggccaccttaaatcctgcctcactgcagtggaactctctctctgatgctgatttgcactctgctggaattctgcctagctgtgctcactgctgtgctgcggtggaaacaggcttactctgacttccctgggagtgtacttttcctgcctcacagttacattggtaattctggcatgtcctcaaaaatgactcatgactgtggatatgaagaactattgacttcttaagaaaaaagggagaaatattaatcagaaagttgattcttatgataatatggaaaagttaaccattatagaaaagcaaagcttgagtttcctaaatgtaagcttttaaagtaatgaacattaaaaaaaaccattatttcactgtcatttaagatatgtgttcattggggatctcttgatttgcctgacattgacttcagcaaaagcacggggctgtaaattaccatttactagattagccaaatagtctgaatttccagaaaacaaggcagaatgatcattcccagaaacatttcccagaaaatgtttcccagaaaactagacagcatgatcattcaatggatcacagtgaagcaaaggacacaactttttattgtaccccttaattgtcaacaggagttaactgatttgttgtggtgctcagacttttttatacaggtgctagtgttttatcctatgtattttaactcattagtgcataaaggcaagccccatataatgaagtctcagggtatatgaaagtagctggcttcaaaataaaatttttgagtgcaaaaaaaaaaaaaaaaaaaaaaaaaaaaa

SEQ ID NO: 1018 - DNA, 1564 bp, Homo sapiens
ttttactgaagttgctagaagtttacagaaaaggaagtgcaggaacatttcacaaatctacaatctgtgagtatcacatcctgtatagctgtaaacactggaataaggaagggctgatgactttcagaagatgaaggtaagtagaaaccgttgatgggactgagaaaccagagttaaaacctctttggagcttctgaggactcagctggaaccaacgggcacagttggcaacaccatcatgacatcacaacctgttcccaatgagaccatcatagtgctcccatcaaatgtcatcaacttctcccaagcagagaaacccgaacccaccaaccaggggcaggatagcctgaagaaacatctacacgcagaaatcaaagttattgggactatccagatcttgtgtggcatgatggtattgagcttggggatcattttggcatctgcttccttctctccaaattttacccaagtgacttctacactgttgaactctgcttacccattcataggaccctttttttttatcatctctggctctctatcaatcgccacagagaaaaggttaaccaagcttttggtgcatagcagcctggttggaagcattctgagtgctctgtctgccctggtgggtttcattatcctgtctgtcaaacaggccaccttaaatcctgcctcactgcagtgtgagttggacaaaaataatataccaacaagaagttatgtttcttacttttatcatgattcactttataccacggactgctatacagccaaagccagtctggctggaactctctctctgatgctgatttgcactctgctggaattctgcctagctgtgctcactgctgtgctgcggtggaaacaggcttactctgacttccctgggagtgtacttttcctgcctcacagttacattggtaattctggcatgtcctcaaaaatgactcatgactgtggatatgaagaactattgacttcttaagaaaaaagggagaaatattaatcagaaagttgattcttatgataatatggaaaagttaaccattatagaaaagcaaagcttgagtttcctaaatgtaagcttttaaagtaatgaacattaaaaaaaaccattatttcactgtcatttaagatatgtgttcattggggatctcttgatttgcctgacattgacttcagcaaaagcacggggctgtaaattaccatttactagattagccaaatagtctgaatttccagaaaacaaggcagaatgatcattcccagaaacatttcccagaaaatgtttcccagaaaactagacagcatgatcattcaatggatcacagtgaagcaaaggacacaactttttattgtaccccttaattgtcaacaggagttaactgatttgttgtggtgctcagacttttttatacaggtgctagtgttttatcctatgtattttaactcattagtgcataaaggcaagccccatataatgaagtctcagggtatatgaaagtagctggcttcaaaataaaatttttgagtgcaaaaaaaaaaaaaaaaaaaaaaaaaaaaa

SEQ ID NO: 1019 - DNA, 2602 bp, Homo sapiens
ccgcctcgcgcctcccgcctcccgcctcccgcctccctccagctgcgagtgcggcctcggctggcggcggcaccaggccacagttgtaagggatcttgtggctgtcaggatggcagaggagcaggagttcacccagctctgcaagttgcctgcacagccctcacacccacactgcgtgaacaacacctaccgcagcgcacagcactcccaggctctgctccgagggctgctggctctccgggacagcggaatcctcttcgatgttgtgctggtggtggagggcagacacatcgaggcccatcgcatcctgctggctgcgtcctgcgattacttcagaggaatgtttgctgggggattgaaggagatggaacaggaagaggtcctgatccacggtgtgtcctacaatgctatgtgccaaatcctacatttcatatacacctccgagctggagctcagcctgagcaatgtacaagagacactggtggctgcctgccagcttcagatcccagaaattatccatttctgctgtgatttcctcatgtcctgggtggacgaagagaacattctcgatgtctaccggctggcagagctgtttgacttgagccgcctgactgagcaactggacacctatatcctcaaaaactttgtggccttctctcggactgacaagtaccgccagcttccattggagaaggtctactccctcctcagcagcaatcgcctggaggtctcctgcgagaccgaggtatatgagggggcccttctctaccattatagcctggagcaggtgcaggctgaccagatctcgctgcacgagcccccaaagctccttgagacagtgcggtttccgctgatggaagctgaggtcctgcagcggctgcatgacaagctggaccccagccctttgagggacacagtggccagcgccctcatgtaccaccggaacgagagcctacagcccagcctgcagagcccgcaaacggagctgcggtcggacttccagtgcgttgtgggcttcgggggcattcactccacgccgtccactgtcctcagcgaccaggccaagtatctaaaccccttactgggagagtggaagcacttcactgcctccctggccccccgcatgtccaaccagggcatcgcggtgctcaacaacttcgtatacttgattggaggggacaacaatgtccaaggatttcgagcagagtcccgatgctggaggtatgacccacggcacaaccgctggttccagatccagtccctgcagcaggagcacgccgacctgtccgtgtgtgttgtaggcaggtacatctacgctgtggcgggccgtgactaccacaatgacctgaatgctgtggagcgctacgaccctgccaccaactcctgggcatacgtggccccactcaagagggaggtgtatgcccacgcaggcgcgacgctggaggggaagatgtatatcacctgcggccgcagaggggaggattacctgaaagagacacactgctacgatccaggcagcaacacttggcacacactggctgatgggcctgtgcggcgcgcctggcacggcatggcaaccctcctcaacaagctgtatgtgatcgggggcagcaacaacgatgccggatacaggagggacgtgcaccaggtggcctgctacagctgcacgtctggacagtggtcatctgtctgcccactccctgctgggcacggtgagcctggcattgctgtgctggacaacaggatctatgtgttaggtggccgctcacacaaccgcggcagccgcacaggctacgtgcacatttacgatgtggagaaggactgctgggaggaagggccccagctggacaactccatctcaggcctggcggcctgtgtgctcaccctgccccgctccctgctccttgagccgccccgcgggacccctgaccgcagccaggccgacccggactttgcctctgaggtgatgagtgtgtctgactgggaggagtttgacaactccagtgaggactaggctccctgtgcctggcatcagagggaagggaggctggggctgcagggcagtgaaacccacgcagcctaggccagagcactttactccaggcagggcccctgcccctgttggccacagcttatgggccctgccctctttcttcacaccagccccttggccagcctgccgcaggcatctcagggccatgcagatcccaggctgtggattacgtcactgcaggaactgcttctgaaaggctttggccttcctcagtgagccctggaggggttggccttctctcctccctgcctagatcagtccttctccaaaaggacctgggagctggcagcctgggcaggggggctgaggcacgtggtagccctctttctgtgaatggggtggggctgtgggggcagctggggttggaggatgagagctcctgaggggcagaggagcagagatgcatcagctcgcctgggactggctctgtgataaaaagacccctcccgctgggttttcagaccccatgttgttggtcaatgaaataaagcatcttacagaaggtgttaactgttaaaaaaaaaaaaaaaaaaaaaaaaaaaaaaaaaa

SEQ ID NO: 1020 - DNA, 1880 bp, Homo sapiens
atgaggtgaactgcattaacctaaagtgctgcagagataaacttaaagcaggaagcaacataccatgaatgtactgcaagggaacacatttgtgtcatgtgaagagacatgacaaaaacagccctccttaaattatttgtggcaatagtgatcacattcattttaattttgccggaatatttcaagacaccgaaagaaagaacattggagctatcatgtctggaagtgtgtttgcaatctaattttacctattcactctcctccttaaatttttcttttgtgacttttctgcaaccagtaagggaaactcagattatcatgagaatctttctaaatccctccaattttcgtaacttcaccaggacttgccaagacatcacaggtgaatttaaaatgtgctcctcgtgtttggtttgtgagtctaaaggaaacatggattttatttctcaggaacaaacatcaaaagttcttatcaggagaggatcaatggaagtgaaagcaaatgattttcattcaccttgtcagcactttaacttcagtgtagctcctctggttgaccacttggaggaatataacactacctgtcatctaaaaaaccacactggaagatcaacaatcatggaggatgagccaagcaaggagaaatcgataaactacacttgtagaatcatggaatacccgaatgattgtatacacatttctttgcacctggagatggatataaaaaatatcacttgttccatgaagatcacttggtatattttagttctattagtttttatatttttgatcatcctcactatccgcaaaatacttgaaggccagagaagagtgcaaaagtggcagagtcatagagacaaacctacatctgttctcttaagaggaagtgattcggagaaactgagagcattgaatgtgcaggttctttcagcagagaccacgcagaggctgcctttggatcaagtccaggaagtgcttcccccaattccagaactataagttacttccacagtgcatcagtgagatcaatatacacgaatatccccgggcaagttggaccgagccctttgaagaatactcagaagtttattttgtgaatgagtagactggaaaatgtttgtgtccagctgaggatgcacagttggaaagcaggaggaatgctgactggttgatgaaaactagcttaagagcattcattcgctccatgagatcaagggaacaagagtgtttgcaagaagccattatgagtcatggaaaaaaagatgatgaaacccatggaaacagcaagagaattcccactctctctcttcttaaaaaaaatctatcattatacagcacagagtggagccaagtttttaattttgaggaaccaaaaacaggatcaaatatgaaaaccctttcttttattgggccacattgtagatgctgatttgataattgtttcctatgcagatagattatttttatttcacagattatttaaaagggaagagggcctggttgtttatttatatgtttgtttgcatttatgaatcttgctgccttttagcaccaggatgtttttaaaaaaattcaaagaggccaggcgcagtggctcatgcctgtaatcccagcactttgggattctgaggtgggaggatcatgaggtcaagggatcgagaccatcctggccaacatggtgaaaccctgtctctactaaaaacacaaaaattagctgggtgtggtggtgcgcgcctgtagtcccagctcctcaggaggctgaggcaggagaatcacttgaacctggcaggcagagtttgcagtgaaccaagatcacgccactgcattacagcctggtgcagagcaagactctgtctcaaaaaaaaaaaaaaaaaaaaaaa

SEQ ID NO: 1021 - DNA, 4539 bp, Homo sapiens
gaacgttgctgtggtagcgctcgggcgccatgttaggacgaaggggaaggaggagaagcgcttaaagcggcgggagcggtgcgggagaggggttggacccagggctgaggcaggcccccccctccctcccgcctcagtggatcatgcccagggcggcagcggcggcggttgcgggggggaagtgactgggcggtgccggcgccggagacgatgccgtttccagttacaacacagggatcacaacaaacacaaccgccacagaagcactatggcattacttctcctatcagcttagcagcccccaaggagactgactgcgtacttacacagaaactaattgagacattgaaaccctttggggtttttgaagaggaagaggaactgcagcgcaggattttaattttgggaaaactaaataacctggtaaaagagtggatacgagaaatcagtgaaagcaagaatcttccacaatctgtaattgaaaatgttggaggaaaaatttttacatttggatcttacagattaggagtgcatacaaaaggtgctgatattgatgcgttgtgtgttgcaccaagacatgttgatcgaagtgactttttcacctcattctatgataagttgaaattacaggaagaagtaaaagatttaagagctgttgaagaggcattcgtaccagttattaaactctgttttgatgggatagagattgatattttgtttgcaagattagcactgcagacaattcctgaagatttggatctacgagatgacagtctgctaaaaaatttagatataagatgtataagaagtcttaacggttgcagggtaaccgatgaaattttacatctagtaccaaacattgacaacttcaggttaactctgagagctatcaaactatgggccaaacgccacaacatctattccaatatattaggtttcctcggtggtgtttcctgggctatgctagtagcaagaacttgccagctttatccaaatgcaatagcatcaactcttgtacataaatttttcttggtattttctaaatgggaatggccaaatccagtgctattgaaacagcctgaagaatgcaatcttaatttgcctgtatgggacccaagggtaaaccccagtgataggtaccatcttatgcctataattacaccagcatacccacaacagaactccacgtacaatgtgtccgtttcaacacggatggtcatggttgaggagtttaaacaaggtcttgctatcacagatgaaattttgctgagtaaggcagagtggtccaaactttttgaagctccaaacttctttcaaaagtacaagcattatattgtacttctagcaagtgcaccaacagaaaaacaacgcctggaatgggtgggcttggtggaatcaaaaatccgaatcctggttggaagcttggagaagaatgaatttattacactggctcatgtgaatccccagtcatttccagcacccaaagaaaatcccgacaaggaagaatttcgcacgatgtgggtgattgggttagtgtttaaaaaaacagaaaactctgaaaacctcagtgttgatctcacctatgatattcagtctttcacagatacagtttataggcaagcaataaacagcaagatgtttgaggtggatatgaaaattgctgcaatgcatgtaaaaagaaagcaactccatcaactactacctaatcatgtgcttcagaaaaagaaaaagcattcaacagaaggtgtcaaattgacagctctcaatgacagcagcctcgacttgtctatggacagtgataacagcatgtctgtgccttcacctactagtgctacgaagaccagtccattgaacagttctggcagctctcagggcagaaacagtcctgctccagctgtaacagcagcatctgtgaccaacatacaggctactgaagtttctgtgccacaagtaaattccagtgaaagctcagggggtacatcgagtgaaagcattcctcaaactgccacacaaccagccatttctccaccaccaaagcctacggtctccagagttgtttcttcaacacgtctggtaaacccaccacctagatcttcaggaaatgcagcaacttcaggaaatgcagcaacaaaaatacctactcctatagtaggagtcaagaggacatcctcacctcataaagaagagagtcccaagaaaaccaaaacagaagaggatgaaacaagtgaagatgctaactgtcttgctttgagtggacatgataaaacagaagcaaaggaacaacttgatacagagacaagtacaactcaatcagaaactattcagacagcggcttctctgttggcctctcagaaaacatccagtacagacctttctgatatccctgctctccctgcaaatcctattcctgttatcaagaattcaataaaactgagattgaatcggtaaaaacaacctcaggggtccataaacaatatctgccaactcaacctgttgtcttcaaatgctaaaaaaggagaatggagggtacaagactagacatgactgaaatggatttgggttttttggtgacctcccttactgggctaatcagcacttgatcggaagtccaggttagtatgtgaagccaggagtactattattattgtgttagcaacagttgcattaactatttcaaaaattactgcctttaaaaaaaacaacctcaagctatatttgtattcataattgacatctggattgggtttatgtttgatgcattgtttggaaaatttgcaatacaaactggcataagaattacttattctgatgatgcacttttatgtatttttcattagaaagtagaactaattttagattttcagcttgatggattttcagtttttcctgaagaattttctttaccattagtcttcaaattggatactgttgtgcagtggtgtactgttatacttcagagaaagggtaagagtacatctagttcagttcctatgaggtagctgtaacccttaaaaatgaaacgtcaactctagggtacatttgacattgaaagaatagttaggaaataacttggttttgatagggtcatgattaagaaatgatatattggttttatttatggaattgttttatagtgcatacaaatcagcgatcagccagcaaatatttttctttgagcttgtgaaagctctgtgttcttttgccttcaatctgttgtcttcaaaacaaacaaacaaaaaaagcttcttgcgcctttccctcccctgttttcttcctttttctttttgcttgtatgcacaaggtaggacttacttcgtaagaaacaaaatgccagtattttcttaagccatgatgtgaaaccaatgaccctgtgaccacatggcacagaacactaaattttggtcccatggctgaaacttgagggtgactaaaagtaatgcctgtgaaacatgatatctatctgggatggccatttgatctctaaaaggaattttgtacactccacagaactcctatctatagtaaaattgattttcagttttaaatgtgggcaaaaaggcattttctccaagattttaaaactaattcttatttttaaatggtttaccaaaatttgtcagtacattttacgtgtagaagcattttaaaaatcatttctagcaagcacttgacatctagtcagctctctactcctttattttgttttatcaaaagattaagagctcctttctttgaataaaataatttctcataattaagcagtagaagatctatcttcacaaagtatgagggatgccagatgttgataaacttactctttctgaatctggacaaagtcgacttaacagatttttctgatgagcatgttttatgaatcctccattgtgctccattctatcacatgtgcatttttcatgttaaactgcaattacttaatctcttcccctatccttctaaattaattttctgaagttggagtgtagtcttttcccccttaggctatgcattaatcgaagctttcttttcaccatgactttataatgtctagtaaacaatatttctacttcccacatctttgctttacacagtcaccttgcccttccttccaccaccgaagaaaaaagatggtcatactaacaggtgaaatgtacaaggtgtctgtgtgttttgtgtagcttcagagttagattgaaattaccaggcacagatttagtcttgtcattttgtttacacattggggaaaacaattcagtttattaaacgtttcatgtaactgcacccaagttttgccaagctggaaacttggaccttttctgtgtagtgactttttaattatagttttcataacctggagatcagactgttgctttcgcatgatgtatgtagtgtctcatgactggagtttgctttgttttatagtatctgtactccttgtatttttcaagagctattttgtaaacagatgatgtatttctccattgaaaacacaataaaaaaaaaacagcacaaaaaaaaaaaaaaaaaaaaaaaaaaaaaaaa

SEQ ID NO: 1022 - DNA, 1500 bp, Homo sapiens
gaattccaaacagcctctaccttgcgagccgtcttccccaggcctgcgtccgagtctccgccgctgcgggcccgctccgacgcggaagatctgactgcagccatgagcagcaatgagtgcttcaagtgtggacgatctggccactgggcccgggaatgtcctactggtggaggccgtggtcgtggaatgagaagccgtggcagaggtggttttacctcggatagaggtttccagtttgtttcctcgtctcttccagatatttgttatcgctgtggtgagtctggtcatcttgccaaggattgtgatcttcaggaggatgcctgctataactgcggtagaggtggccacattgccaaggactgcaaggagcccaagagagagcgagagcaatgctgctacaactgtggcaaaccaggccatctggctcgtgactgcgaccatgcagatgagcagaaatgctattcttgtggagaattcggacacattcaaaaagactgcaccaaagtgaagtgctataggtgtggtgaaactggtcatgtagccatcaactgcagcaagacaagtgaagtcaactgttaccgctgtggcgagtcagggcaccttgcacgggaatgcacaattgaggctacagcctaattattttcctttgtcgcccctcctttttctgattgatggttgtattattttctctgaatcctcttcactggccaaaggttggcagatagaggcaactcccaggccagtgagctttacttgccgtgtaaaaggaggaaaggggtggaaaaaaaccgactttctgcatttaactacaaaaaaagtttatgtttagtttggtagaggtgttatgtataatgctttgttaaagaaccccctttccgtgccactggtgaatagggattgatgaatgggaagagttgagtcagaccagtaagcccgtcctgggttccttgaacatgttcccatgtaggaggtaaaaccaattctggaagtgtctatgaacttccataaataactttaattttagtataatgatggtcttggattgtctgacctcagtagctattaaataacatcaagtaacatctgtatcaggccctacatagaacatacagttgagtgggagtaaacaaaaagataaacatgcgtgttaatggctgttcgagagaaatcggaataaaagcctaaacaggaacaacttcatcacagtgttgatgttggacacatagatggtgatggcaaaggtttagaacacattattttcaaagactaaatctaaaacccagagtaaacatcaatgctcagagttagcataatttggagctattcaggaattgcagagaaatgcattttcacagaaatcaagatgttatttttgtatactatatcacttagacaactgtgtttcatttgctgtaatcagtttttaaaagtcagatggaaagagcaactgaagtcctagaaaatagaaatgtaattttaaactattccaataaagctgga

SEQ ID NO: 1023 - DNA, 1750 bp, Homo sapiens
gcggactgcgcatgtgcaggacccagcaggtctagagcttttctgtgtttctccggacttcgagccatggcggtgacggaagcgagcctgttgcgccagtgccccctgcttctgccccagaaccggtcgaaaaccgtgtatgagggattcatctcggctcagggaagagacttccaccttaggatagtgttgcctgaagatttacaactgaagaatgcaagattattatgtagttggcagctgagaacaatacttagtggataccatcgaatagtacaacagagaatgcagcactctcctgatctaatgagctttatgatggagttgaagatgcttttggaagttgccttaaagaatagacaagagctgtatgcactacctcctcctccccagttctactcaagccttattgaagagataggaactcttggttgggataaacttgtgtatgcggatacctgcttcagtaccatcaagttaaaagcagaagatgcttctggtagagagcatttaatcactctcaagttgaaggcaaagtatcctgcagaatcaccagattattttgtggattttcctgttccattttgtgcctcctggacacctcagagctccttaataagcatttatagtcagtttttggcagcaatagaatcactaaaggcattctgggatgttatggatgaaatcgatgagaagacctgggtacttgagccagaaaaacctccacggagtgcaacagcacgcagaattgcattaggtaataatgtttccataaatatagaggtagaccccaggcatcctactatgcttcctgagtgcttctttcttggagctgaccatgtggtaaaacccctgggaattaagctgagcaggaacatacatttgtgggatccagaaaatagtgtgttacaaaatttgaaagatgttttagaaattgattttccagctcgtgctatcctggaaaaatctgattttactatggattgtggaatttgttatgcttatcaacttgacggtaccattcctgatcaagtgtgtgataattctcagtgtggacaacctttccatcaaatatgcttatatgagtggctgagaggactactaactagtagacagagttttaacatcatatttggtgaatgtccatattgtagtaagccaattaccttaaaaatgtctggaaggaaacactgaaataagaatacaacatttcggtgaagagctggaaacttaaaaaattatcaaaaggaattttggtatcatcttcagagaaaaaataaagcaagaaatactaacatcaaaaggacaggtatgatgatgcgataataataaacatctgcgtttgtctcttcactaagagtaaactgggaaattgtaggccaaagtccagttgaactttctaagtctgtgatccccgtgctgactgtggaagtgtatttataccaagatggagatcttgacttcttgaatatatctggactggtaaaatcttgatgaggctcataaaatgagtttgggaattgtgtatagctgattttttgtgggaaactgtttacttcattcaaaggttcttgagactcttgatatttctgtcttctccttgtgctttcctatggaaaaaatacatatatagtttagtttgttagacgtgagttatccaagtatttattttgtgtagtgtgtaagaatgctaaataaaatgttatacaagatcaaaaaaaaaaaaaaaaaaaaaaaaaaaaaaaaaaaa

SEQ ID NO: 1024 - DNA, 2983 bp, Homo sapiens
aaacccgcgtagccgagggagatgcagcgcgcggcgatggtggcatgtggagcctcccaccaccacctaggtcctgagatgcgctgaagcccagcctgtctgccatcatcccccagcatggaccgtgggagcctcctgcccttccagctatggtgcccccggccctttggcacctactcacagaaccagccacgcccgccttctgcggccctcaagccatcagcctgccctgagcctggtggcggggccgagccagaccatgggcctgcccactcagagaacacaccacccgccttggccactgaggtccctgcctcccagccggctccgctcctctcagcagcagctgctggtgatgagggtcgagtcctcctggacacgtggtatgtcatcaagcccgggaatacaaaggagaaggtggccttctttgtggcccaccagtgtggtgggggcagccgggccagctccatgaaggtcaaggggcactggggcagcgatagctccaaggccaagcggcggaggcgctgtcttgaccccaccaaggctcctcctgacccagggggccgggagggcccccctgctgctgaggagggccccgcctcagccggtgaggacgtggacctgctctctgtggccgagatggtggccctggtggaacagcgggcagccctggccctgcagagctacccacgaccgaccaccccagcgcctgtagtctttgtgtccgccgagcaaggtggaccggccaagggggtgggatctgaacggcggtccggtggtggggactgcagccgtgtagccgaggccgtggcccactttgaagcgcagagggacagccctcccaccaagggcctccgcaaggaagagcggcccgggccaggccctggggaggtgcgcatcgccttccgcatctccaacggccgggagccccgtgcaccagacagcggcctgcccagtgggggcgggggcaggcctggttgtgcctaccctggcagcccaggtcctggggcccgagccaaggacaagatcacatgtgacttataccagctcatcagcccctcgcgggatgccctccccagcaacgtggagttcctgctggccagggcggatgaggccagtgagggtgacagcccggcacccgccaggcctgaggacactcccccggcgccccctccgccccctgcccgggactgcggagcgtcaggcttccacgtggacgtggtggtgacgggcgtggtagatgagtgcatcttctttggcaaggacggcaccaagaacgtgaaggaggagactgtgtgcctgacggtcagcccggaggaaccgccgcctccgggccagctcttctttctccagaaccgcgggccggacgggcccccggagccacccccggccgactccccggccactgcgcccggcccagacgatgccgagggcacggcggacacctccctgtgccgcttgtaccggcacgtgtcgcacgacttcctagagatccgcttcaagattcagcggctgctggagccgcgacagtacatgctgctgctgcccgagcacgtgctggtcaagatcttcagcttcctgcccacgcgcgcgctggccgccctcaagtgcacctgccaccacttcaagggcatcatcgaggcgtttggcgtgcgggccacagactcgcgctggagccgagacccgctctaccgcgatgatccgtgcaaacagtgccgcaagagatacgagaagggcgacgtgtcgctctgccgctggcaccccaagccctaccaccatgacctgccttacggacgttcctactggatgtgctgccgtcgagccgaccgcgagactcccggctgccgcctgggcctccacgataacaactgggtgctgccctgcaatgggccaggcgggggccgggccggccgggaggaggggaggtgaagccgggggaggggaggggagagcccaccacgcccacccctcccctctccccccgggagccgagggtccggactgggccgcctgcccattcccctactccaggcagcattgatccctcaccggaactgagctggggttcagcaggggtgacccaggaaagccctctgcttgatcctgttgattttctactcttcagaaccagggccgtggaccctctgagaagggtgttttttttttttttatcagcatctcactttcttctccattcagccccaaccccctccctgccatgctttccaccccaaggacccaccagcagggagcagacggcagctaattttggtaccacttaagggtccccccattctggcccccatcctctccctcaccccaattctttctcgctggagctgttatttcccaagaagccgcatcgcccaaggttggcacctctcctaacctgccacacgacagctctcacctctctaggaattgggggctgtcaggtcacaggtgggatctggcatttttttatgacagtccatttctagatggtttgcctattaaagaagtgggggggaaatactgttttctccttaacctcaagctaccagtctctcctcttccgcgtagaggaagaggggggcagacaaaaaaaaagctgaagtataaaaaccctcctcctcccgttattatttaagctactgccatcaaccccacccccataaagctgtgaagccctttgcctcgcttttgacagcgtgggggggccccgtgggcagggacttcggatttgcatttctgggttgtttttccttccactctggggtctcgttcaggcattggggtctcctcaccccagccacatgtttctttaagaatcctttggtcaaccaggaccttgatttttcaggcattttggtctggggtatttttgtttgttctctctgttttttgttttcttttttttctttccatcgtggttctggaagcttctagcgtgtggcatctgaccaattttgaattggtcctttctataaaatcaatatttata

SEQ ID NO: 1025 - DNA, 3669 bp, Homo sapiens
tactgcaggagttggcaaactttttccataaagagccagataatgggtattttaagctttgcaggccatgtggtctttgttctgctattcagctctgctgttgaagatgaaagcatccataaacaaatgagcatgtttcaataaaactttatttacaaagacagcgagctggattaggcttctgggccatagtttgctgacctctctggcctgtaggcatgtggaagtttcaaggtttaaagggtcattttggttttgagctgtctggagggagatgagccagagaaagattgaggcatatgttacttagtaggttcaaactgcagtgaaagtgatcatgtcggactcatgcgcaagattgcctccagattaggtcattcacatcaagtcattccaaaataaaatagtcattaacagagccctaaattgaagagtccagaaatcaagttgagagcctctttttgctccggacccactgtaatcttagctatgtcacccttccccactctgagcctctgtttatctgtgtgcagcttgaggagaaagctaggctagaacaggcaccctcgtgttttctttctttttttttcccaagatgggttctctctcagtcacccaggctggagtgcagtggtatgatcacagcatcacagctcactgcagcctccacctcctgggctcaagcgatactcccacctcagcctcccaactagctgggactacaggtggcatgtggagcctcccaccaccacctaggtcctgagatgcgctgaagcccagcctgtctgccatcatcccccagcatggaccgtgggagcctcctgcccttccagctatggtgcccccggccctttggcacctactcacagaaccagccacgcccgccttctgcggccctcaagccatcagcctgccctgagcctggtggcggggccgagccagaccatgggcctgcccactcagagaacacaccacccgccttggccactgaggtccctgcctcccagccggctccgctcctctcagcagcagctgctggtgatgagggtcgagtcctcctggacacgtggtatgtcatcaagcccgggaatacaaaggagaaggtggccttctttgtggcccaccagtgtggtgggggcagccgggccagctccatgaaggtcaaggggcactggggcagcgatagctccaaggccaagcggcggaggcgctgtcttgaccccaccaaggctcctcctgacccagggggccgggagggcccccctgctgctgaggagggccccgcctcagccggtgaggacgtggacctgctctctgtggccgagatggtggccctggtggaacagcgggcagccctggccctgcagagctacccacgaccgaccaccccagcgcctgtagtctttgtgtccgccgagcaaggtggaccggccaagggggtgggatctgaacggcggtccggtggtggggactgcagccgtgtagccgaggccgtggcccactttgaagcgcagagggacagccctcccaccaagggcctccgcaaggaagagcggcccgggccaggccctggggaggtgcgcatcgccttccgcatctccaacggccgggagccccgtgcaccagacagcggcctgcccagtgggggcgggggcaggcctggttgtgcctaccctggcagcccaggtcctggggcccgagccaaggacaagatcacatgtgacttataccagctcatcagcccctcgcgggatgccctccccagcaacgtggagttcctgctggccagggcggatgaggccagtgagggtgacagcccggcacccgccaggcctgaggacactcccccggcgccccctccgccccctgcccgggactgcggagcgtcaggcttccacgtggacgtggtggtgacgggcgtggtagatgagtgcatcttctttggcaaggacggcaccaagaacgtgaaggaggagactgtgtgcctgacggtcagcccggaggaaccgccgcctccgggccagctcttctttctccagaaccgcgggccggacgggcccccggagccacccccggccgactccccggccactgcgcccggcccagacgatgccgagggcacggcggacacctccctgtgccgcttgtaccggcacgtgtcgcacgacttcctagagatccgcttcaagattcagcggctgctggagccgcgacagtacatgctgctgctgcccgagcacgtgctggtcaagatcttcagcttcctgcccacgcgcgcgctggccgccctcaagtgcacctgccaccacttcaagggcatcatcgaggcgtttggcgtgcgggccacagactcgcgctggagccgagacccgctctaccgcgatgatccgtgcaaacagtgccgcaagagatacgagaagggcgacgtgtcgctctgccgctggcaccccaagccctaccaccatgacctgccttacggacgttcctactggatgtgctgccgtcgagccgaccgcgagactcccggctgccgcctgggcctccacgataacaactgggtgctgccctgcaatgggccaggcgggggccgggccggccgggaggaggggaggtgaagccgggggaggggaggggagagcccaccacgcccacccctcccctctccccccgggagccgagggtccggactgggccgcctgcccattcccctactccaggcagcattgatccctcaccggaactgagctggggttcagcaggggtgacccaggaaagccctctgcttgatcctgttgattttctactcttcagaaccagggccgtggaccctctgagaagggtgttttttttttttttatcagcatctcactttcttctccattcagccccaaccccctccctgccatgctttccaccccaaggacccaccagcagggagcagacggcagctaattttggtaccacttaagggtccccccattctggcccccatcctctccctcaccccaattctttctcgctggagctgttatttcccaagaagccgcatcgcccaaggttggcacctctcctaacctgccacacgacagctctcacctctctaggaattgggggctgtcaggtcacaggtgggatctggcatttttttatgacagtccatttctagatggtttgcctattaaagaagtgggggggaaatactgttttctccttaacctcaagctaccagtctctcctcttccgcgtagaggaagaggggggcagacaaaaaaaaagctgaagtataaaaaccctcctcctcccgttattatttaagctactgccatcaaccccacccccataaagctgtgaagccctttgcctcgcttttgacagcgtgggggggccccgtgggcagggacttcggatttgcatttctgggttgtttttccttccactctggggtctcgttcaggcattggggtctcctcaccccagccacatgtttctttaagaatcctttggtcaaccaggaccttgatttttcaggcattttggtctggggtatttttgtttgttctctctgttttttgttttcttttttttctttccatcgtggttctggaagcttctagcgtgtggcatctgaccaattttgaattggtcctttctataaaatcaatatttata

SEQ ID NO: 1026 - DNA, 3543 bp, Homo sapiens
agcttactcatacaaaatggtatttttaccatctttatttcaaaacctgtgacatgtactaggaaacgaagaaaaaaattgtattttttaccacgtttaatgatgtatttctaactgctatggtaaagctgtcttactcctaaaagcacaagttttcttttttttttcttgaactcctgagatcaggagttcaagaccagcctggccaacatggtgaaaccctgtctctactaaaaatacaaaaattagctgggcgtggtggcgcacgcctgtagtcccagctactcgggaggctgaagcagaagaattgcttgaacctgggaggcagaggttgcagtgagctgagatcatgccactgcactctagcctgggtgacagagtgagactgcgtctaagaaaaaaaaagaagaattagttgggcttggcggccaaggaggttgaagctacattgagctgtgacagaaccactgcactccagcctgggtgacagcgtgagatcatctcaaacaaaaagcaaaacaaaacaaaaataaaatgaaaaagccagagtgcccagctttgagtcctggcttcacctctcatcagctgtgtgacctagggtggcatgtggagcctcccaccaccacctaggtcctgagatgcgctgaagcccagcctgtctgccatcatcccccagcatggaccgtgggagcctcctgcccttccagctatggtgcccccggccctttggcacctactcacagaaccagccacgcccgccttctgcggccctcaagccatcagcctgccctgagcctggtggcggggccgagccagaccatgggcctgcccactcagagaacacaccacccgccttggccactgaggtccctgcctcccagccggctccgctcctctcagcagcagctgctggtgatgagggtcgagtcctcctggacacgtggtatgtcatcaagcccgggaatacaaaggagaaggtggccttctttgtggcccaccagtgtggtgggggcagccgggccagctccatgaaggtcaaggggcactggggcagcgatagctccaaggccaagcggcggaggcgctgtcttgaccccaccaaggctcctcctgacccagggggccgggagggcccccctgctgctgaggagggccccgcctcagccggtgaggacgtggacctgctctctgtggccgagatggtggccctggtggaacagcgggcagccctggccctgcagagctacccacgaccgaccaccccagcgcctgtagtctttgtgtccgccgagcaaggtggaccggccaagggggtgggatctgaacggcggtccggtggtggggactgcagccgtgtagccgaggccgtggcccactttgaagcgcagagggacagccctcccaccaagggcctccgcaaggaagagcggcccgggccaggccctggggaggtgcgcatcgccttccgcatctccaacggccgggagccccgtgcaccagacagcggcctgcccagtgggggcgggggcaggcctggttgtgcctaccctggcagcccaggtcctggggcccgagccaaggacaagatcacatgtgacttataccagctcatcagcccctcgcgggatgccctccccagcaacgtggagttcctgctggccagggcggatgaggccagtgagggtgacagcccggcacccgccaggcctgaggacactcccccggcgccccctccgccccctgcccgggactgcggagcgtcaggcttccacgtggacgtggtggtgacgggcgtggtagatgagtgcatcttctttggcaaggacggcaccaagaacgtgaaggaggagactgtgtgcctgacggtcagcccggaggaaccgccgcctccgggccagctcttctttctccagaaccgcgggccggacgggcccccggagccacccccggccgactccccggccactgcgcccggcccagacgatgccgagggcacggcggacacctccctgtgccgcttgtaccggcacgtgtcgcacgacttcctagagatccgcttcaagattcagcggctgctggagccgcgacagtacatgctgctgctgcccgagcacgtgctggtcaagatcttcagcttcctgcccacgcgcgcgctggccgccctcaagtgcacctgccaccacttcaagggcatcatcgaggcgtttggcgtgcgggccacagactcgcgctggagccgagacccgctctaccgcgatgatccgtgcaaacagtgccgcaagagatacgagaagggcgacgtgtcgctctgccgctggcaccccaagccctaccaccatgacctgccttacggacgttcctactggatgtgctgccgtcgagccgaccgcgagactcccggctgccgcctgggcctccacgataacaactgggtgctgccctgcaatgggccaggcgggggccgggccggccgggaggaggggaggtgaagccgggggaggggaggggagagcccaccacgcccacccctcccctctccccccgggagccgagggtccggactgggccgcctgcccattcccctactccaggcagcattgatccctcaccggaactgagctggggttcagcaggggtgacccaggaaagccctctgcttgatcctgttgattttctactcttcagaaccagggccgtggaccctctgagaagggtgttttttttttttttatcagcatctcactttcttctccattcagccccaaccccctccctgccatgctttccaccccaaggacccaccagcagggagcagacggcagctaattttggtaccacttaagggtccccccattctggcccccatcctctccctcaccccaattctttctcgctggagctgttatttcccaagaagccgcatcgcccaaggttggcacctctcctaacctgccacacgacagctctcacctctctaggaattgggggctgtcaggtcacaggtgggatctggcatttttttatgacagtccatttctagatggtttgcctattaaagaagtgggggggaaatactgttttctccttaacctcaagctaccagtctctcctcttccgcgtagaggaagaggggggcagacaaaaaaaaagctgaagtataaaaaccctcctcctcccgttattatttaagctactgccatcaaccccacccccataaagctgtgaagccctttgcctcgcttttgacagcgtgggggggccccgtgggcagggacttcggatttgcatttctgggttgtttttccttccactctggggtctcgttcaggcattggggtctcctcaccccagccacatgtttctttaagaatcctttggtcaaccaggaccttgatttttcaggcattttggtctggggtatttttgtttgttctctctgttttttgttttcttttttttctttccatcgtggttctggaagcttctagcgtgtggcatctgaccaattttgaattggtcctttctataaaatcaatatttata

SEQ ID NO: 1027 - DNA, 3117 bp, Homo sapiens
agcttactcatacaaaatggtatttttaccatctttatttcaaaacctgtgacatgtactaggaaacgaagaaaaaaattgtattttttaccacgtttaatgatgtatttctaactgctatggtaaagctgtcttactcctaaaagcacaagttttcttttttttttcttgaactcctgagatcaggagttcaagaccagcctggccaacatggtgaaaccctgtctctactaaaaatacaaaaattagctgggcgtggtggcgcacgcctgtagtcccagctactcgggaggctgaagcagaagaattgcttgaacctgggaggcagaggttgcagtgagctgagatcatgccactgcactctagcctgggtgacagagtgagactgcgtctaagaaaaaaaaagaagaattagttgggcttggcggccaaggaggttgaagctacattgagctgtgacagaaccactgcactccagcctgggtgacagcgtgagatcatctcaaacaaaaagcaaaacaaaacaaaaataaaatgaaaaagccagagtgcccagctttgagtcctggcttcacctctcatcagctgtgtgacctagggtggcatgtggagcctcccaccaccacctaggtcctgagatgcgctgaagcccagcctgtctgccatcatcccccagcatggaccgtgggagcctcctgcccttccagctatggtgcccccggccctttggcacctactcacagaaccagccacgcccgccttctgcggccctcaagccatcagcctgccctgagcctggtggcggggccgagccagaccatgggcctgcccactcagagaacacaccacccgccttggccactgaggtccctgcctcccagccggctccgctcctctcagcagcagctgctggtgatgagggtcgagtcctcctggacacgtggtatgtcatcaagcccgggaatacaaaggagaaggtggccttctttgtggcccaccagtgtggtgggggcagccgggccagctccatgaaggtcaaggggcactggggcagcgatagctccaaggccaagcggcggaggcgctgtcttgaccccaccaaggctcctcctgacccagggggccgggagggcccccctgctgctgaggagggccccgcctcagccggtgaggacgtggacctgctctctgtggccgagatggtggccctggtggaacagcgggcagccctggccctgcagagctacccacgaccgaccaccccagcgcctgtagtctttgtgtccgccgagcaaggtggaccggccaagggggtgggatctgaacggcggtccggtggtggggactgcagccgtgtagccgaggccgtggcccactttgaagcgcagagggacagccctcccaccaagaacgtgaaggaggagactgtgtgcctgacggtcagcccggaggaaccgccgcctccgggccagctcttctttctccagaaccgcgggccggacgggcccccggagccacccccggccgactccccggccactgcgcccggcccagacgatgccgagggcacggcggacacctccctgtgccgcttgtaccggcacgtgtcgcacgacttcctagagatccgcttcaagattcagcggctgctggagccgcgacagtacatgctgctgctgcccgagcacgtgctggtcaagatcttcagcttcctgcccacgcgcgcgctggccgccctcaagtgcacctgccaccacttcaagggcatcatcgaggcgtttggcgtgcgggccacagactcgcgctggagccgagacccgctctaccgcgatgatccgtgcaaacagtgccgcaagagatacgagaagggcgacgtgtcgctctgccgctggcaccccaagccctaccaccatgacctgccttacggacgttcctactggatgtgctgccgtcgagccgaccgcgagactcccggctgccgcctgggcctccacgataacaactgggtgctgccctgcaatgggccaggcgggggccgggccggccgggaggaggggaggtgaagccgggggaggggaggggagagcccaccacgcccacccctcccctctccccccgggagccgagggtccggactgggccgcctgcccattcccctactccaggcagcattgatccctcaccggaactgagctggggttcagcaggggtgacccaggaaagccctctgcttgatcctgttgattttctactcttcagaaccagggccgtggaccctctgagaagggtgttttttttttttttatcagcatctcactttcttctccattcagccccaaccccctccctgccatgctttccaccccaaggacccaccagcagggagcagacggcagctaattttggtaccacttaagggtccccccattctggcccccatcctctccctcaccccaattctttctcgctggagctgttatttcccaagaagccgcatcgcccaaggttggcacctctcctaacctgccacacgacagctctcacctctctaggaattgggggctgtcaggtcacaggtgggatctggcatttttttatgacagtccatttctagatggtttgcctattaaagaagtgggggggaaatactgttttctccttaacctcaagctaccagtctctcctcttccgcgtagaggaagaggggggcagacaaaaaaaaagctgaagtataaaaaccctcctcctcccgttattatttaagctactgccatcaaccccacccccataaagctgtgaagccctttgcctcgcttttgacagcgtgggggggccccgtgggcagggacttcggatttgcatttctgggttgtttttccttccactctggggtctcgttcaggcattggggtctcctcaccccagccacatgtttctttaagaatcctttggtcaaccaggaccttgatttttcaggcattttggtctggggtatttttgtttgttctctctgttttttgttttcttttttttctttccatcgtggttctggaagcttctagcgtgtggcatctgaccaattttgaattggtcctttctataaaatcaatatttata

SEQ ID NO: 1028 - DNA, 2951 bp, Homo sapiens
gctgcgggtggcatgtggagcctcccaccaccacctaggtcctgagatgcgctgaagcccagcctgtctgccatcatcccccagcatggaccgtgggagcctcctgcccttccagctatggtgcccccggccctttggcacctactcacagaaccagccacgcccgccttctgcggccctcaagccatcagcctgccctgagcctggtggcggggccgagccagaccatgggcctgcccactcagagaacacaccacccgccttggccactgaggtccctgcctcccagccggctccgctcctctcagcagcagctgctggtgatgagggtcgagtcctcctggacacgtggtatgtcatcaagcccgggaatacaaaggagaaggtggccttctttgtggcccaccagtgtggtgggggcagccgggccagctccatgaaggtcaaggggcactggggcagcgatagctccaaggccaagcggcggaggcgctgtcttgaccccaccaaggctcctcctgacccagggggccgggagggcccccctgctgctgaggagggccccgcctcagccggtgaggacgtggacctgctctctgtggccgagatggtggccctggtggaacagcgggcagccctggccctgcagagctacccacgaccgaccaccccagcgcctgtagtctttgtgtccgccgagcaaggtggaccggccaagggggtgggatctgaacggcggtccggtggtggggactgcagccgtgtagccgaggccgtggcccactttgaagcgcagagggacagccctcccaccaagggcctccgcaaggaagagcggcccgggccaggccctggggaggtgcgcatcgccttccgcatctccaacggccgggagccccgtgcaccagacagcggcctgcccagtgggggcgggggcaggcctggttgtgcctaccctggcagcccaggtcctggggcccgagccaaggacaagatcacatgtgacttataccagctcatcagcccctcgcgggatgccctccccagcaacgtggagttcctgctggccagggcggatgaggccagtgagggtgacagcccggcacccgccaggcctgaggacactcccccggcgccccctccgccccctgcccgggactgcggagcgtcaggcttccacgtggacgtggtggtgacgggcgtggtagatgagtgcatcttctttggcaaggacggcaccaagaacgtgaaggaggagactgtgtgcctgacggtcagcccggaggaaccgccgcctccgggccagctcttctttctccagaaccgcgggccggacgggcccccggagccacccccggccgactccccggccactgcgcccggcccagacgatgccgagggcacggcggacacctccctgtgccgcttgtaccggcacgtgtcgcacgacttcctagagatccgcttcaagattcagcggctgctggagccgcgacagtacatgctgctgctgcccgagcacgtgctggtcaagatcttcagcttcctgcccacgcgcgcgctggccgccctcaagtgcacctgccaccacttcaagggcatcatcgaggcgtttggcgtgcgggccacagactcgcgctggagccgagacccgctctaccgcgatgatccgtgcaaacagtgccgcaagagatacgagaagggcgacgtgtcgctctgccgctggcaccccaagccctaccaccatgacctgccttacggacgttcctactggatgtgctgccgtcgagccgaccgcgagactcccggctgccgcctgggcctccacgataacaactgggtgctgccctgcaatgggccaggcgggggccgggccggccgggaggaggggaggtgaagccgggggaggggaggggagagcccaccacgcccacccctcccctctccccccgggagccgagggtccggactgggccgcctgcccattcccctactccaggcagcattgatccctcaccggaactgagctggggttcagcaggggtgacccaggaaagccctctgcttgatcctgttgattttctactcttcagaaccagggccgtggaccctctgagaagggtgttttttttttttttatcagcatctcactttcttctccattcagccccaaccccctccctgccatgctttccaccccaaggacccaccagcagggagcagacggcagctaattttggtaccacttaagggtccccccattctggcccccatcctctccctcaccccaattctttctcgctggagctgttatttcccaagaagccgcatcgcccaaggttggcacctctcctaacctgccacacgacagctctcacctctctaggaattgggggctgtcaggtcacaggtgggatctggcatttttttatgacagtccatttctagatggtttgcctattaaagaagtgggggggaaatactgttttctccttaacctcaagctaccagtctctcctcttccgcgtagaggaagaggggggcagacaaaaaaaaagctgaagtataaaaaccctcctcctcccgttattatttaagctactgccatcaaccccacccccataaagctgtgaagccctttgcctcgcttttgacagcgtgggggggccccgtgggcagggacttcggatttgcatttctgggttgtttttccttccactctggggtctcgttcaggcattggggtctcctcaccccagccacatgtttctttaagaatcctttggtcaaccaggaccttgatttttcaggcattttggtctggggtatttttgtttgttctctctgttttttgttttcttttttttctttccatcgtggttctggaagcttctagcgtgtggcatctgaccaattttgaattggtcctttctataaaatcaatatttata

SEQ ID NO: 1029 - DNA, 3669 bp, Homo sapiens
tactgcaggagttggcaaactttttccataaagagccagataatgggtattttaagctttgcaggccatgtggtctttgttctgctattcagctctgctgttgaagatgaaagcatccataaacaaatgagcatgtttcaataaaactttatttacaaagacagcgagctggattaggcttctgggccatagtttgctgacctctctggcctgtaggcatgtggaagtttcaaggtttaaagggtcattttggttttgagctgtctggagggagatgagccagagaaagattgaggcatatgttacttagtaggttcaaactgcagtgaaagtgatcatgtcggactcatgcgcaagattgcctccagattaggtcattcacatcaagtcattccaaaataaaatagtcattaacagagccctaaattgaagagtccagaaatcaagttgagagcctctttttgctccggacccactgtaatcttagctatgtcacccttccccactctgagcctctgtttatctgtgtgcagcttgaggagaaagctaggctagaacaggcaccctcgtgttttctttctttttttttcccaagatgggttctctctcagtcacccaggctggagtgcagtggtatgatcacagcatcacagctcactgcagcctccacctcctgggctcaagcgatactcccacctcagcctcccaactagctgggactacaggtggcatgtggagcctcccaccaccacctaggtcctgagatgcgctgaagcccagcctgtctgccatcatcccccagcatggaccgtgggagcctcctgcccttccagctatggtgcccccggccctttggcacctactcacagaaccagccacgcccgccttctgcggccctcaagccatcagcctgccctgagcctggtggcggggccgagccagaccatgggcctgcccactcagagaacacaccacccgccttggccactgaggtccctgcctcccagccggctccgctcctctcagcagcagctgctggtgatgagggtcgagtcctcctggacacgtggtatgtcatcaagcccgggaatacaaaggagaaggtggccttctttgtggcccaccagtgtggtgggggcagccgggccagctccatgaaggtcaaggggcactggggcagcgatagctccaaggccaagcggcggaggcgctgtcttgaccccaccaaggctcctcctgacccagggggccgggagggcccccctgctgctgaggagggccccgcctcagccggtgaggacgtggacctgctctctgtggccgagatggtggccctggtggaacagcgggcagccctggccctgcagagctacccacgaccgaccaccccagcgcctgtagtctttgtgtccgccgagcaaggtggaccggccaagggggtgggatctgaacggcggtccggtggtggggactgcagccgtgtagccgaggccgtggcccactttgaagcgcagagggacagccctcccaccaagggcctccgcaaggaagagcggcccgggccaggccctggggaggtgcgcatcgccttccgcatctccaacggccgggagccccgtgcaccagacagcggcctgcccagtgggggcgggggcaggcctggttgtgcctaccctggcagcccaggtcctggggcccgagccaaggacaagatcacatgtgacttataccagctcatcagcccctcgcgggatgccctccccagcaacgtggagttcctgctggccagggcggatgaggccagtgagggtgacagcccggcacccgccaggcctgaggacactcccccggcgccccctccgccccctgcccgggactgcggagcgtcaggcttccacgtggacgtggtggtgacgggcgtggtagatgagtgcatcttctttggcaaggacggcaccaagaacgtgaaggaggagactgtgtgcctgacggtcagcccggaggaaccgccgcctccgggccagctcttctttctccagaaccgcgggccggacgggcccccggagccacccccggccgactccccggccactgcgcccggcccagacgatgccgagggcacggcggacacctccctgtgccgcttgtaccggcacgtgtcgcacgacttcctagagatccgcttcaagattcagcggctgctggagccgcgacagtacatgctgctgctgcccgagcacgtgctggtcaagatcttcagcttcctgcccacgcgcgcgctggccgccctcaagtgcacctgccaccacttcaagggcatcatcgaggcgtttggcgtgcgggccacagactcgcgctggagccgagacccgctctaccgcgatgatccgtgcaaacagtgccgcaagagatacgagaagggcgacgtgtcgctctgccgctggcaccccaagccctaccaccatgacctgccttacggacgttcctactggatgtgctgccgtcgagccgaccgcgagactcccggctgccgcctgggcctccacgataacaactgggtgctgccctgcaatgggccaggcgggggccgggccggccgggaggaggggaggtgaagccgggggaggggaggggagagcccaccacgcccacccctcccctctccccccgggagccgagggtccggactgggccgcctgcccattcccctactccaggcagcattgatccctcaccggaactgagctggggttcagcaggggtgacccaggaaagccctctgcttgatcctgttgattttctactcttcagaaccagggccgtggaccctctgagaagggtgttttttttttttttatcagcatctcactttcttctccattcagccccaaccccctccctgccatgctttccaccccaaggacccaccagcagggagcagacggcagctaattttggtaccacttaagggtccccccattctggcccccatcctctccctcaccccaattctttctcgctggagctgttatttcccaagaagccgcatcgcccaaggttggcacctctcctaacctgccacacgacagctctcacctctctaggaattgggggctgtcaggtcacaggtgggatctggcatttttttatgacagtccatttctagatggtttgcctattaaagaagtgggggggaaatactgttttctccttaacctcaagctaccagtctctcctcttccgcgtagaggaagaggggggcagaaaaaaaaaaagctgaagtataaaaaccctcctcctcccgttattatttaagctactgccatcaaccccacccccataaagctgtgaagccctttgcctcgcttttgacagcgtgggggggccccgtgggcagggacttcggatttgcatttctgggttgtttttccttccactctggggtctcgttcaggcattggggtctcctcaccccagccacatgtttctttaagaatcctttggtcaaccaggaccttgatttttcaggcattttggtctggggtatttttgtttgttctctctgttttttgttttcttttttttctttccatcgtggttctggaagcttctagcgtgtggcatctgaccaattttgaattggtcctttctataaaatcaatatttata

SEQ ID NO: 1030 - DNA, 3543 bp, Homo sapiens
agcttactcatacaaaatggtatttttaccatctttatttcaaaacctgtgacatgtactaggaaacgaagaaaaaaattgtattttttaccacgtttaatgatgtatttctaactgctatggtaaagctgtcttactcctaaaagcacaagttttcttttttttttcttgaactcctgagatcaggagttcaagaccagcctggccaacatggtgaaaccctgtctctactaaaaatacaaaaattagctgggcgtggtggcgcacgcctgtagtcccagctactcgggaggctgaagcagaagaattgcttgaacctgggaggcagaggttgcagtgagctgagatcatgccactgcactctagcctgggtgacagagtgagactgcgtctaagaaaaaaaaagaagaattagttgggcttggcggccaaggaggttgaagctacattgagctgtgacagaaccactgcactccagcctgggtgacagcgtgagatcatctcaaacaaaaagcaaaacaaaacaaaaataaaatgaaaaagccagagtgcccagctttgagtcctggcttcacctctcatcagctgtgtgacctagggtggcatgtggagcctcccaccaccacctaggtcctgagatgcgctgaagcccagcctgtctgccatcatcccccagcatggaccgtgggagcctcctgcccttccagctatggtgcccccggccctttggcacctactcacagaaccagccacgcccgccttctgcggccctcaagccatcagcctgccctgagcctggtggcggggccgagccagaccatgggcctgcccactcagagaacacaccacccgccttggccactgaggtccctgcctcccagccggctccgctcctctcagcagcagctgctggtgatgagggtcgagtcctcctggacacgtggtatgtcatcaagcccgggaatacaaaggagaaggtggccttctttgtggcccaccagtgtggtgggggcagccgggccagctccatgaaggtcaaggggcactggggcagcgatagctccaaggccaagcggcggaggcgctgtcttgaccccaccaaggctcctcctgacccagggggccgggagggcccccctgctgctgaggagggccccgcctcagccggtgaggacgtggacctgctctctgtggccgagatggtggccctggtggaacagcgggcagccctggccctgcagagctacccacgaccgaccaccccagcgcctgtagtctttgtgtccgccgagcaaggtggaccggccaagggggtgggatctgaacggcggtccggtggtggggactgcagccgtgtagccgaggccgtggcccactttgaagcgcagagggacagccctcccaccaagggcctccgcaaggaagagcggcccgggccaggccctggggaggtgcgcatcgccttccgcatctccaacggccgggagccccgtgcaccagacagcggcctgcccagtgggggcgggggcaggcctggttgtgcctaccctggcagcccaggtcctggggcccgagccaaggacaagatcacatgtgacttataccagctcatcagcccctcgcgggatgccctccccagcaacgtggagttcctgctggccagggcggatgaggccagtgagggtgacagcccggcacccgccaggcctgaggacactcccccggcgccccctccgccccctgcccgggactgcggagcgtcaggcttccacgtggacgtggtggtgacgggcgtggtagatgagtgcatcttctttggcaaggacggcaccaagaacgtgaaggaggagactgtgtgcctgacggtcagcccggaggaaccgccgcctccgggccagctcttctttctccagaaccgcgggccggacgggcccccggagccacccccggccgactccccggccactgcgcccggcccagacgatgccgagggcacggcggacacctccctgtgccgcttgtaccggcacgtgtcgcacgacttcctagagatccgcttcaagattcagcggctgctggagccgcgacagtacatgctgctgctgcccgagcacgtgctggtcaagatcttcagcttcctgcccacgcgcgcgctggccgccctcaagtgcacctgccaccacttcaagggcatcatcgaggcgtttggcgtgcgggccacagactcgcgctggagccgagacccgctctaccgcgatgatccgtgcaaacagtgccgcaagagatacgagaagggcgacgtgtcgctctgccgctggcaccccaagccctaccaccatgacctgccttacggacgttcctactggatgtgctgccgtcgagccgaccgcgagactcccggctgccgcctgggcctccacgataacaactgggtgctgccctgcaatgggccaggcgggggccgggccggccgggaggaggggaggtgaagccgggggaggggaggggagagcccaccacgcccacccctcccctctccccccgggagccgagggtccggactgggccgcctgcccattcccctactccaggcagcattgatccctcaccggaactgagctggggttcagcaggggtgacccaggaaagccctctgcttgatcctgttgattttctactcttcagaaccagggccgtggaccctctgagaagggtgttttttttttttttatcagcatctcactttcttctccattcagccccaaccccctccctgccatgctttccaccccaaggacccaccagcagggagcagacggcagctaattttggtaccacttaagggtccccccattctggcccccatcctctccctcaccccaattctttctcgctggagctgttatttcccaagaagccgcatcgcccaaggttggcacctctcctaacctgccacacgacagctctcacctctctaggaattgggggctgtcaggtcacaggtgggatctggcatttttttatgacagtccatttctagatggtttgcctattaaagaagtgggggggaaatactgttttctccttaacctcaagctaccagtctctcctcttccgcgtagaggaagaggggggcagaaaaaaaaaaagctgaagtataaaaaccctcctcctcccgttattatttaagctactgccatcaaccccacccccataaagctgtgaagccctttgcctcgcttttgacagcgtgggggggccccgtgggcagggacttcggatttgcatttctgggttgtttttccttccactctggggtctcgttcaggcattggggtctcctcaccccagccacatgtttctttaagaatcctttggtcaaccaggaccttgatttttcaggcattttggtctggggtatttttgtttgttctctctgttttttgttttcttttttttctttccatcgtggttctggaagcttctagcgtgtggcatctgaccaattttgaattggtcctttctataaaatcaatatttata

SEQ ID NO: 1031 - DNA, 3117 bp, Homo sapiens
agcttactcatacaaaatggtatttttaccatctttatttcaaaacctgtgacatgtactaggaaacgaagaaaaaaattgtattttttaccacgtttaatgatgtatttctaactgctatggtaaagctgtcttactcctaaaagcacaagttttcttttttttttcttgaactcctgagatcaggagttcaagaccagcctggccaacatggtgaaaccctgtctctactaaaaatacaaaaattagctgggcgtggtggcgcacgcctgtagtcccagctactcgggaggctgaagcagaagaattgcttgaacctgggaggcagaggttgcagtgagctgagatcatgccactgcactctagcctgggtgacagagtgagactgcgtctaagaaaaaaaaagaagaattagttgggcttggcggccaaggaggttgaagctacattgagctgtgacagaaccactgcactccagcctgggtgacagcgtgagatcatctcaaacaaaaagcaaaacaaaacaaaaataaaatgaaaaagccagagtgcccagctttgagtcctggcttcacctctcatcagctgtgtgacctagggtggcatgtggagcctcccaccaccacctaggtcctgagatgcgctgaagcccagcctgtctgccatcatcccccagcatggaccgtgggagcctcctgcccttccagctatggtgcccccggccctttggcacctactcacagaaccagccacgcccgccttctgcggccctcaagccatcagcctgccctgagcctggtggcggggccgagccagaccatgggcctgcccactcagagaacacaccacccgccttggccactgaggtccctgcctcccagccggctccgctcctctcagcagcagctgctggtgatgagggtcgagtcctcctggacacgtggtatgtcatcaagcccgggaatacaaaggagaaggtggccttctttgtggcccaccagtgtggtgggggcagccgggccagctccatgaaggtcaaggggcactggggcagcgatagctccaaggccaagcggcggaggcgctgtcttgaccccaccaaggctcctcctgacccagggggccgggagggcccccctgctgctgaggagggccccgcctcagccggtgaggacgtggacctgctctctgtggccgagatggtggccctggtggaacagcgggcagccctggccctgcagagctacccacgaccgaccaccccagcgcctgtagtctttgtgtccgccgagcaaggtggaccggccaagggggtgggatctgaacggcggtccggtggtggggactgcagccgtgtagccgaggccgtggcccactttgaagcgcagagggacagccctcccaccaagaacgtgaaggaggagactgtgtgcctgacggtcagcccggaggaaccgccgcctccgggccagctcttctttctccagaaccgcgggccggacgggcccccggagccacccccggccgactccccggccactgcgcccggcccagacgatgccgagggcacggcggacacctccctgtgccgcttgtaccggcacgtgtcgcacgacttcctagagatccgcttcaagattcagcggctgctggagccgcgacagtacatgctgctgctgcccgagcacgtgctggtcaagatcttcagcttcctgcccacgcgcgcgctggccgccctcaagtgcacctgccaccacttcaagggcatcatcgaggcgtttggcgtgcgggccacagactcgcgctggagccgagacccgctctaccgcgatgatccgtgcaaacagtgccgcaagagatacgagaagggcgacgtgtcgctctgccgctggcaccccaagccctaccaccatgacctgccttacggacgttcctactggatgtgctgccgtcgagccgaccgcgagactcccggctgccgcctgggcctccacgataacaactgggtgctgccctgcaatgggccaggcgggggccgggccggccgggaggaggggaggtgaagccgggggaggggaggggagagcccaccacgcccacccctcccctctccccccgggagccgagggtccggactgggccgcctgcccattcccctactccaggcagcattgatccctcaccggaactgagctggggttcagcaggggtgacccaggaaagccctctgcttgatcctgttgattttctactcttcagaaccagggccgtggaccctctgagaagggtgttttttttttttttatcagcatctcactttcttctccattcagccccaaccccctccctgccatgctttccaccccaaggacccaccagcagggagcagacggcagctaattttggtaccacttaagggtccccccattctggcccccatcctctccctcaccccaattctttctcgctggagctgttatttcccaagaagccgcatcgcccaaggttggcacctctcctaacctgccacacgacagctctcacctctctaggaattgggggctgtcaggtcacaggtgggatctggcatttttttatgacagtccatttctagatggtttgcctattaaagaagtgggggggaaatactgttttctccttaacctcaagctaccagtctctcctcttccgcgtagaggaagaggggggcagaaaaaaaaaaagctgaagtataaaaaccctcctcctcccgttattatttaagctactgccatcaaccccacccccataaagctgtgaagccctttgcctcgcttttgacagcgtgggggggccccgtgggcagggacttcggatttgcatttctgggttgtttttccttccactctggggtctcgttcaggcattggggtctcctcaccccagccacatgtttctttaagaatcctttggtcaaccaggaccttgatttttcaggcattttggtctggggtatttttgtttgttctctctgttttttgttttcttttttttctttccatcgtggttctggaagcttctagcgtgtggcatctgaccaattttgaattggtcctttctataaaatcaatatttata

SEQ ID NO: 1032 - DNA, 2951 bp, Homo sapiens
gctgcgggtggcatgtggagcctcccaccaccacctaggtcctgagatgcgctgaagcccagcctgtctgccatcatcccccagcatggaccgtgggagcctcctgcccttccagctatggtgcccccggccctttggcacctactcacagaaccagccacgcccgccttctgcggccctcaagccatcagcctgccctgagcctggtggcggggccgagccagaccatgggcctgcccactcagagaacacaccacccgccttggccactgaggtccctgcctcccagccggctccgctcctctcagcagcagctgctggtgatgagggtcgagtcctcctggacacgtggtatgtcatcaagcccgggaatacaaaggagaaggtggccttctttgtggcccaccagtgtggtgggggcagccgggccagctccatgaaggtcaaggggcactggggcagcgatagctccaaggccaagcggcggaggcgctgtcttgaccccaccaaggctcctcctgacccagggggccgggagggcccccctgctgctgaggagggccccgcctcagccggtgaggacgtggacctgctctctgtggccgagatggtggccctggtggaacagcgggcagccctggccctgcagagctacccacgaccgaccaccccagcgcctgtagtctttgtgtccgccgagcaaggtggaccggccaagggggtgggatctgaacggcggtccggtggtggggactgcagccgtgtagccgaggccgtggcccactttgaagcgcagagggacagccctcccaccaagggcctccgcaaggaagagcggcccgggccaggccctggggaggtgcgcatcgccttccgcatctccaacggccgggagccccgtgcaccagacagcggcctgcccagtgggggcgggggcaggcctggttgtgcctaccctggcagcccaggtcctggggcccgagccaaggacaagatcacatgtgacttataccagctcatcagcccctcgcgggatgccctccccagcaacgtggagttcctgctggccagggcggatgaggccagtgagggtgacagcccggcacccgccaggcctgaggacactcccccggcgccccctccgccccctgcccgggactgcggagcgtcaggcttccacgtggacgtggtggtgacgggcgtggtagatgagtgcatcttctttggcaaggacggcaccaagaacgtgaaggaggagactgtgtgcctgacggtcagcccggaggaaccgccgcctccgggccagctcttctttctccagaaccgcgggccggacgggcccccggagccacccccggccgactccccggccactgcgcccggcccagacgatgccgagggcacggcggacacctccctgtgccgcttgtaccggcacgtgtcgcacgacttcctagagatccgcttcaagattcagcggctgctggagccgcgacagtacatgctgctgctgcccgagcacgtgctggtcaagatcttcagcttcctgcccacgcgcgcgctggccgccctcaagtgcacctgccaccacttcaagggcatcatcgaggcgtttggcgtgcgggccacagactcgcgctggagccgagacccgctctaccgcgatgatccgtgcaaacagtgccgcaagagatacgagaagggcgacgtgtcgctctgccgctggcaccccaagccctaccaccatgacctgccttacggacgttcctactggatgtgctgccgtcgagccgaccgcgagactcccggctgccgcctgggcctccacgataacaactgggtgctgccctgcaatgggccaggcgggggccgggccggccgggaggaggggaggtgaagccgggggaggggaggggagagcccaccacgcccacccctcccctctccccccgggagccgagggtccggactgggccgcctgcccattcccctactccaggcagcattgatccctcaccggaactgagctggggttcagcaggggtgacccaggaaagccctctgcttgatcctgttgattttctactcttcagaaccagggccgtggaccctctgagaagggtgttttttttttttttatcagcatctcactttcttctccattcagccccaaccccctccctgccatgctttccaccccaaggacccaccagcagggagcagacggcagctaattttggtaccacttaagggtccccccattctggcccccatcctctccctcaccccaattctttctcgctggagctgttatttcccaagaagccgcatcgcccaaggttggcacctctcctaacctgccacacgacagctctcacctctctaggaattgggggctgtcaggtcacaggtgggatctggcatttttttatgacagtccatttctagatggtttgcctattaaagaagtgggggggaaatactgttttctccttaacctcaagctaccagtctctcctcttccgcgtagaggaagaggggggcagaaaaaaaaaaagctgaagtataaaaaccctcctcctcccgttattatttaagctactgccatcaaccccacccccataaagctgtgaagccctttgcctcgcttttgacagcgtgggggggccccgtgggcagggacttcggatttgcatttctgggttgtttttccttccactctggggtctcgttcaggcattggggtctcctcaccccagccacatgtttctttaagaatcctttggtcaaccaggaccttgatttttcaggcattttggtctggggtatttttgtttgttctctctgttttttgttttcttttttttctttccatcgtggttctggaagcttctagcgtgtggcatctgaccaattttgaattggtcctttctataaaatcaatatttata

SEQ ID NO: 1033 - DNA, 2983 bp, Homo sapiens
aaacccgcgtagccgagggagatgcagcgcgcggcgatggtggcatgtggagcctcccaccaccacctaggtcctgagatgcgctgaagcccagcctgtctgccatcatcccccagcatggaccgtgggagcctcctgcccttccagctatggtgcccccggccctttggcacctactcacagaaccagccacgcccgccttctgcggccctcaagccatcagcctgccctgagcctggtggcggggccgagccagaccatgggcctgcccactcagagaacacaccacccgccttggccactgaggtccctgcctcccagccggctccgctcctctcagcagcagctgctggtgatgagggtcgagtcctcctggacacgtggtatgtcatcaagcccgggaatacaaaggagaaggtggccttctttgtggcccaccagtgtggtgggggcagccgggccagctccatgaaggtcaaggggcactggggcagcgatagctccaaggccaagcggcggaggcgctgtcttgaccccaccaaggctcctcctgacccagggggccgggagggcccccctgctgctgaggagggccccgcctcagccggtgaggacgtggacctgctctctgtggccgagatggtggccctggtggaacagcgggcagccctggccctgcagagctacccacgaccgaccaccccagcgcctgtagtctttgtgtccgccgagcaaggtggaccggccaagggggtgggatctgaacggcggtccggtggtggggactgcagccgtgtagccgaggccgtggcccactttgaagcgcagagggacagccctcccaccaagggcctccgcaaggaagagcggcccgggccaggccctggggaggtgcgcatcgccttccgcatctccaacggccgggagccccgtgcaccagacagcggcctgcccagtgggggcgggggcaggcctggttgtgcctaccctggcagcccaggtcctggggcccgagccaaggacaagatcacatgtgacttataccagctcatcagcccctcgcgggatgccctccccagcaacgtggagttcctgctggccagggcggatgaggccagtgagggtgacagcccggcacccgccaggcctgaggacactcccccggcgccccctccgccccctgcccgggactgcggagcgtcaggcttccacgtggacgtggtggtgacgggcgtggtagatgagtgcatcttctttggcaaggacggcaccaagaacgtgaaggaggagactgtgtgcctgacggtcagcccggaggaaccgccgcctccgggccagctcttctttctccagaaccgcgggccggacgggcccccggagccacccccggccgactccccggccactgcgcccggcccagacgatgccgagggcacggcggacacctccctgtgccgcttgtaccggcacgtgtcgcacgacttcctagagatccgcttcaagattcagcggctgctggagccgcgacagtacatgctgctgctgcccgagcacgtgctggtcaagatcttcagcttcctgcccacgcgcgcgctggccgccctcaagtgcacctgccaccacttcaagggcatcatcgaggcgtttggcgtgcgggccacagactcgcgctggagccgagacccgctctaccgcgatgatccgtgcaaacagtgccgcaagagatacgagaagggcgacgtgtcgctctgccgctggcaccccaagccctaccaccatgacctgccttacggacgttcctactggatgtgctgccgtcgagccgaccgcgagactcccggctgccgcctgggcctccacgataacaactgggtgctgccctgcaatgggccaggcgggggccgggccggccgggaggaggggaggtgaagccgggggaggggaggggagagcccaccacgcccacccctcccctctccccccgggagccgagggtccggactgggccgcctgcccattcccctactccaggcagcattgatccctcaccggaactgagctggggttcagcaggggtgacccaggaaagccctctgcttgatcctgttgattttctactcttcagaaccagggccgtggaccctctgagaagggtgttttttttttttttatcagcatctcactttcttctccattcagccccaaccccctccctgccatgctttccaccccaaggacccaccagcagggagcagacggcagctaattttggtaccacttaagggtccccccattctggcccccatcctctccctcaccccaattctttctcgctggagctgttatttcccaagaagccgcatcgcccaaggttggcacctctcctaacctgccacacgacagctctcacctctctaggaattgggggctgtcaggtcacaggtgggatctggcatttttttatgacagtccatttctagatggtttgcctattaaagaagtgggggggaaatactgttttctccttaacctcaagctaccagtctctcctcttccgcgtagaggaagaggggggcagaaaaaaaaaaagctgaagtataaaaaccctcctcctcccgttattatttaagctactgccatcaaccccacccccataaagctgtgaagccctttgcctcgcttttgacagcgtgggggggccccgtgggcagggacttcggatttgcatttctgggttgtttttccttccactctggggtctcgttcaggcattggggtctcctcaccccagccacatgtttctttaagaatcctttggtcaaccaggaccttgatttttcaggcattttggtctggggtatttttgtttgttctctctgttttttgttttcttttttttctttccatcgtggttctggaagcttctagcgtgtggcatctgaccaattttgaattggtcctttctataaaatcaatatttata

SEQ ID NO: 1034 - DNA, 3103 bp, Homo sapiens
ctgtgacactgccagcagcgcgcagagggagggatgggggcgggtatcggcgtaggggccctcggaaagaacggatattgctgtgacaccgcggggacgctctgaagggacgagtgtcggtgtggcaccggtgcacgctgaaggagccggcggaaccgggtggccatggggatgtgggcatcgctggacgctttgtgggagatgccggccgagaagcgtatcttcggggccgtgctgctcttttcctggacagtgtatctttgggagaccttcctagcacagcggcagagaaggatatataaaacaacaactcatgtaccaccggagttaggacagatcatggattctgaaacatttgagaaatctcgactctatcaactggataaaagcactttcagcttctggtcaggactctattcagagactgaaggcactcttattcttctctttggaggaataccttatctctggagactttctggacggttctgtggttatgctggctttggaccagaatatgagatcactcagtccctggtgtttctgctgttggctacacttttcagtgcattgactggtttgccatggagtctttataatacttttgtgatagaagaaaaacatggcttcaatcaacagactttggggttcttcatgaaagatgcaatcaagaaatttgttgtgactcagtgtattttgttgcctgtgtcttcacttctactttacattattaaaattgggggtgactatttttttatttatgcctggctgttcacattagttgtgtctctggttcttgtcacaatctatgctgattatattgcccctttatttgacaaattcacacctctgcctgagggaaagcttaaagaagaaattgaagtaatggcaaagagtattgactttcctttgacgaaggtgtatgttgtggaaggatctaaacgctcttcccacagcaatgcttatttttatggcttcttcaagaacaagcgaatagttttgtttgacactctactagaagagtactctgtactaaacaaagacatccaggaggattctggcatggaaccccgcaatgaggaagaagggaacagtgaagaaataaaagctaaagttaaaaataagaaacaaggatgtaaaaatgaggaggtactcgctgtactaggccatgaactggggcactggaagttgggacatacagtcaaaaatatcattattagccagatgaattctttcctgtgtttttttttatttgctgtattaattggtcgaaaggagctttttgctgcatttggtttttatgatagccaacccactcttattggactattgatcatcttccagtttattttttcaccttacaatgaggttctttctttttgcctaacagtcctaagccgcagatttgagtttcaagctgatgcatttgccaagaaacttgggaaggctaaagacttatattctgctttaatcaaacttaacaaagataacttgggattccctgtttctgactggttgttctcaatgtggcattattctcatcctccactgctagagagacttcaagctttgaaaactatgaagcaacactgagatgtccaggatctgtgactgaagacatttctgattatttctgtcctggcagcatgttccagctcttgatgtttttaaacttttttttagaagaaaaattaagtacagaaaagcccagatttaaatacatttaatatgtcattttaaaaatgattttaataattcatttcttaaaacactgaatgaattttgaagcttaatgtttttaaaggcatagttttatctttgacatctaatttaccatcaagttgtaaaattatttggaaaaatacagaactcgttttatttgtatacttatatggaatctgcatgtgaggtgtttgagggcatatgtttgaaagagggagcatcaccacaggaatcctttctgtgaggtggaaacagtggtcctgaatcattgtgctcacacctaacttgaaatctggtcttactttcatgctgttatgatttcacctggtgaatcagtgttttaaataagaaaggtaatagttggtaaggccaatgttatttaaatgaaagtagttagaaaaatgctctcctattctaccaaatttttaatttctttcttccctttcttgctacacagtgatcaagagtttctcatagtgctttgaagttagaaattatgtataggatattttaaatcattgagttttgtggggtttttttgtttgtttgtttcttttgttttttggaaaatccgtgtctttatctttttttcccacgtggtagatatgatcccattggaggtaaattgtagcttcttctcattcatgcagtaaataatacatcctttcactcagcagagatggccatattaaacacgttttgctatgttaaaagtggcagaacaggaaagacgaattaaaaataacattttttaagcgacataaggatgaaatactgatgaatctctgtgacattacagggaaaaaaatatagttttctatctctttcaagggcagaagagttttcatttttatttttgtaattttatctgtaagtcataaatattacttaatcaggcctgattctacttttgaaaattacagttcttgaaatgcagataatgtttactttgaaaacaaatgtcatgaatgatttccagtttttaaagctatatgtttcactgcttcatatctctgtccactttctgaatgagaacttattttgtgcctagagctctcactcactgataatgcttattaccttctgggcatttattccaaagtgggatcaactgtacgcctttggtatctgaccataaagtcttttgctccgctgacatttgggtgatgtcttcacatggaaatataataaaaataaaaatctagtttaatactgcattatttattttcctaaggctaaagaggagcagtcctatgcttttattcagcatcctttatctgtgacttcatgctctgataactgcctttccttccttctgtgcctttgaatacaaatttcagttctgcaaaagtgaaacattaaacattgccaacgcaaatgt

SEQ ID NO: 1035 - DNA, 2024 bp, Homo sapiens
agtgaaggacttgaaattatggcagatggagaatggagccgacttgatggaatgaaggcaagtggagggatgtcggaacaggctgctttggctggattagcaccgggtgtaggcgggacacttagtcattctcccttggcccagacgatgccgccgtggagacagctgaggaagcaaaggagcctgctgaagctgacatcactgagctctgccgggacatgttctccaaaatggccacttacctgactggggaactgacggccaccagtgaagactataagctcctggaaaatatgaataaactcaccagcttgaagtatcttgaaatgaaagatattgctataaacattagtaggaacttaaaggacttaaaccagaaatatgctggactgcagccttatctggatcagatcaatgtcattgaagagcaggtagcagctcttgagcaggcagcttacaagttggatgcatattcaaaaaaactggaagccaagtacaagaagctggagaagcgatgagaaacttatttctatgggacagagtcttttttttttaatgtggaagaatgtcttataaaacctgaatcctgaggctgatgaattgtgaaaattcctcaaaaggaaattatgctggtcatcacaggaacatctcaacgttcgagtaaactggaggactgtggctattcctgaaccttctttgagacagaatccctcagaatctcacacttataacttcctaccttttacttgaatgctttgccatattcaggacagagactctcacaaagttcagaaaacagctggacttaccagtaaaatcaaatgagaggacctattttctctggtagtggttgattactacattattttcttaagtggctggttttttagttactatgtaaatggtcgtttttctgttaatgatgctaatgtgttgtaaacaagattctaaatttaaaaaggaaaacaaaacaaacttgttctttgcagcttatcaccttgtgaatgtcggtaacttacttttccataatattgcaaataacataaaatcttaaaataattccaagctgagtcttctagattgagcagaaatggtgaaaggagtattgataacttggcgtatgtgatgggcccctcttgtttattttctatgtgagtcacattgacatgcgatcagtttgggaaatgtgatgaaaacaaagactagatgggtatgtgtgtttatgtgttgggtagggaggtgacgattgccactcataaaataaaggattttataaaataccttcctactgtgtatgtaggatttggggggatcttagggacctaatcgacttctttgcacactaaaaacatcagacaatgggacatactgactgaccagtctaggttgaaagataggcagccttacccagaacacaacattagcagctgggaaggtgtctgaggtccccaattacatatcccaaagagtttcttacttctgtttctgtcatttcccctctgttccagacagtcatcatttatcctctgttcttcctggactgttgctgtggtctcttctcatcttaactgtcccttccaaccaccctccacactgctgccagagcaatcttaaaaatgtaaactggccctattactcctgcttagaaccctgtagtgacttatcatggcctctgaaaaatctagactttcattatgcatacaagtcccttgtgtttttttgtttgtttatagacagggtctctattgtcacccaggctggagtgtggtggtgtgataatagctcaccttgacctcctaggctcaactgatcttcccacctcagcctcctgaatagctgggactaccagcacgctccaccatgccttgctaattattttttatacagatggagtctcactatgttgtccaggctggtcttgaactggcctcaagtgattctcttaccacagcctgccagagtgctgagattgtaggcatgaaccaccgtgcctaacataaggcccctatttaaacatttttctt

SEQ ID NO: 1036 - DNA, 1958 bp, Homo sapiens
ccggaaacagcgcggggtccgctatggcggcggcagccgagggcgtactggcgacccggagtgatgagcccgcccgagacgatgccgccgtggagacagctgaggaagcaaaggagcctgctgaagctgacatcactgagctctgccgggacatgttctccaaaatggccacttacctgactggggaactgacggccaccagtgaagactataagctcctggaaaatatgaataaactcaccagcttgaagtatcttgaaatgaaagatattgctataaacattagtaggaacttaaaggacttaaaccagaaatatgctggactgcagccttatctggatcagatcaatgtcattgaagagcaggtagcagctcttgagcaggcagcttacaagttggatgcatattcaaaaaaactggaagccaagtacaagaagctggagaagcgatgagaaacttatttctatgggacagagtcttttttttttaatgtggaagaatgtcttataaaacctgaatcctgaggctgatgaattgtgaaaattcctcaaaaggaaattatgctggtcatcacaggaacatctcaacgttcgagtaaactggaggactgtggctattcctgaaccttctttgagacagaatccctcagaatctcacacttataacttcctaccttttacttgaatgctttgccatattcaggacagagactctcacaaagttcagaaaacagctggacttaccagtaaaatcaaatgagaggacctattttctctggtagtggttgattactacattattttcttaagtggctggttttttagttactatgtaaatggtcgtttttctgttaatgatgctaatgtgttgtaaacaagattctaaatttaaaaaggaaaacaaaacaaacttgttctttgcagcttatcaccttgtgaatgtcggtaacttacttttccataatattgcaaataacataaaatcttaaaataattccaagctgagtcttctagattgagcagaaatggtgaaaggagtattgataacttggcgtatgtgatgggcccctcttgtttattttctatgtgagtcacattgacatgcgatcagtttgggaaatgtgatgaaaacaaagactagatgggtatgtgtgtttatgtgttgggtagggaggtgacgattgccactcataaaataaaggattttataaaataccttcctactgtgtatgtaggatttggggggatcttagggacctaatcgacttctttgcacactaaaaacatcagacaatgggacatactgactgaccagtctaggttgaaagataggcagccttacccagaacacaacattagcagctgggaaggtgtctgaggtccccaattacatatcccaaagagtttcttacttctgtttctgtcatttcccctctgttccagacagtcatcatttatcctctgttcttcctggactgttgctgtggtctcttctcatcttaactgtcccttccaaccaccctccacactgctgccagagcaatcttaaaaatgtaaactggccctattactcctgcttagaaccctgtagtgacttatcatggcctctgaaaaatctagactttcattatgcatacaagtcccttgtgtttttttgtttgtttatagacagggtctctattgtcacccaggctggagtgtggtggtgtgataatagctcaccttgacctcctaggctcaactgatcttcccacctcagcctcctgaatagctgggactaccagcacgctccaccatgccttgctaattattttttatacagatggagtctcactatgttgtccaggctggtcttgaactggcctcaagtgattctcttaccacagcctgccagagtgctgagattgtaggcatgaaccaccgtgcctaacataaggcccctatttaaacatttttctt

SEQ ID NO: 1037 - DNA, 2299 bp, Homo sapiens
gggaagcgcgccgcgcacctcatggttccggggacagttagggcggcggatggaggtcagcggtggtgctcgctgcggtttggaatcacttgctaggagtcttgtctctctgccacccaggacatcatggcagctcacctggtaaagcgatgcacgtgcctcctgagagaagctgctcgtcaggcccctgccatggctccagttggccgactgagacttgcctgggtagcccataagactctgacttcctcagccacctcacccatttcccacctcccaggttccttgatggagccggtggagaaggaacgagcatctactccctacatagagaagcaggtggaccacctcatcaagaaggccacaaggccagaggagctcctggagctacttggtggcagtcacgacttggacagcaatcaagcagcaatggtacttatccggctctctcacttgctgtctgagaagccagaagataaaggcttgctcatacaggatgcccactttcatcaacttctctgtctgctcaacagtcagattgcctcggtctggcatggtaccctctcgaagctgctgggaagcctgtatgctctgggcatccccaaggcctccaaggagctgcagtcggtggagcaggaggtccgctggcgcatgcggaagctcaagtacaagcacctggccttcctggcagagtcctgtgccaccctctcacaggagcagcactcgcaggagctgctggctgagctgctcacacacctggaaaggcgttggacagaaattgaagattcccacacattagtgaccgtcatgatgaaggtgggacacctctcggagccactaatgaaccgcctggaagacaagtgcctggagttggtggagcactttggccccaatgagctgcggaaggtgctggtgatgctggcagctcagagccggcggtccgtgcccttgctgcgggccatctcctaccacctggtgcagaagcccttctctctgacgaaagatgtgctcttggacgtggcctatgcctatggcaaactcagctttcaccagacccaggtgtcccagcgcctggccaccgacctgctatccctcatgcccagcctgacttctggtgaggtggcccactgtgccaagtccttcgccttactcaagtggctcagcctgcccctgtttgaggcctttgcccagcacgtcctgaacagagcgcaggacatcaccctgccccacctgtgcagcgtacttctggcttttgcgcgtctgaacttccatccagaccaagaggatcagttcttcagcctggtacatgagaagctggggtcagagctgccaggcctggagccagccctgcaggtggacctggtgtgggccctgtgtgtgctgcagcaggcacgggaagcagagctgcaagccgtcctccaccctgaatttcacatccaatttctagggggcaagtctcagaaggatcagaacaccttccagaagctgctccacatcaacgccactgccctgctggagtaccccgagtactcgggtccccttctgcctgcctcggctgtggcccctgggccctcagcccttgacaggaaggtgacccccctgcaaaaggagctgcaggagacgctgaaggggctgctggggagcgccgacaagggcagcctcgaggtggccacgcagtatggctgggtgctggatgctgaggtgctgctggacagtgacggcgagtttctgcccgtaagggactttgtggcacctcaccttgcccagccaactgggagccagtcaccacctccagggtctaagaggctagcgttcttgcggtgggagttccccaacttcaacagccgaagcaaggacttgctgggtcgctttgttctggcccggcgacacatagtggctgcaggcttcctgatagtggacgtcccattctatgagtggctggaactcaagtctgaatggcagaaaggcgcctacctcaaggacaagatgcgcaaagcggtggctgaggagctggccaagtgacttgtgccagcagcatggactgcgtgcctctccgccggaggtctagctgtgggcggccaagaagggtcacccttgaggacaaacctctgtgcaggaccttggccagagtggggagggtggccagccactctgagggacagaacgtcctcttgtgtataataaacctttaattttggtgttggacccctggggccttcccaggcttggtcaccctctgcactgtcaaaaaaaaaaaaaaaaaaaaaaaaaaaaaaaaaaaaaaaaaaaaaaaaaaaaa

SEQ ID NO: 1038 - DNA, 1956 bp, Homo sapiens
gggaagcgcgccgcgcacctcatggttccggggacagttagggcggcggatggaggtcagcggtggtgctcgctgcggtttggaatcacttgctaggagtcttgtctctctgccacccaggacatcatggcagctcacctggtaaagcgatgcacgtgcctcctgagagaagctgctcgtcaggcccctgccatggctccagttggccgactgagacttgcctgggtagcccataagactctgacttcctcagccacctcacccatttcccacctcccaggttccttgatggagccggtggagaaggaacgagcatctactccctacatagagaagcaggtggaccacctcatcaagaaggccacaaggccagaggagctcctggagctacttggtggcagtcacgacttggacagcaatcaagcagcaatggtacttatccggctctctcacttgctgtctgagaagccagaagataaaggcttgctcatacaggatgcccactttcatcaacttctctgtctgctcaacagtcagattgcctcggtctggcatggtaccctctcgaagctgctgggaagcctgtatgctctgggcatccccaaggcctccaaggagctgcagtcggtggagcaggaggtccgctggcgcatgcggaagctcaagtacaagcacctggccttcctggcagagtcctgtgccaccctctcacaggagcagcactcgcaggagctgctggctgagctgctcacacacctggaaaggcgttggacagaaattgaagattcccacacattagtgaccgtcatgatgaaggtgggacacctctcggagccactaatgaaccgcctggaagacaagcacgtcctgaacagagcgcaggacatcaccctgccccacctgtgcagcgtacttctggcttttgcgcgtctgaacttccatccagaccaagaggatcagttcttcagcctggtacatgagaagctggggtcagagctgccaggcctggagccagccctgcaggtggacctggtgtgggccctgtgtgtgctgcagcaggcacgggaagcagagctgcaagccgtcctccaccctgaatttcacatccaatttctagggggcaagtctcagaaggatcagaacaccttccagaagctgctccacatcaacgccactgccctgctggagtaccccgagtactcgggtccccttctgcctgcctcggctgtggcccctgggccctcagcccttgacaggaaggtgacccccctgcaaaaggagctgcaggagacgctgaaggggctgctggggagcgccgacaagggcagcctcgaggtggccacgcagtatggctgggtgctggatgctgaggtgctgctggacagtgacggcgagtttctgcccgtaagggactttgtggcacctcaccttgcccagccaactgggagccagtcaccacctccagggtctaagaggctagcgttcttgcggtgggagttccccaacttcaacagccgaagcaaggacttgctgggtcgctttgttctggcccggcgacacatagtggctgcaggcttcctgatagtggacgtcccattctatgagtggctggaactcaagtctgaatggcagaaaggcgcctacctcaaggacaagatgcgcaaagcggtggctgaggagctggccaagtgacttgtgccagcagcatggactgcgtgcctctccgccggaggtctagctgtgggcggccaagaagggtcacccttgaggacaaacctctgtgcaggaccttggccagagtggggagggtggccagccactctgagggacagaacgtcctcttgtgtataataaacctttaattttggtgttggacccctggggccttcccaggcttggtcaccctctgcactgtcaaaaaaaaaaaaaaaaaaaaaaaaaaaaaaaaaaaaaaaa

SEQ ID NO: 1039 - DNA, 1935 bp, Homo sapiens
gggaagcgcgccgcgcacctcatggttccggggacagttagggcggcggatggagggtttggaatcacttgctaggagtcttgtctctctgccacccaggacatcatggcagctcacctggtaaagcgatgcacgtgcctcctgagagaagctgctcgtcaggcccctgccatggctccagttggccgactgagacttgcctgggtagcccataagactctgacttcctcagccacctcacccatttcccacctcccaggttccttgatggagccggtggagaaggaacgagcatctactccctacatagagaagcaggtggaccacctcatcaagaaggccacaaggccagaggagctcctggagctacttggtggcagtcacgacttggacagcaatcaagcagcaatggtacttatccggctctctcacttgctgtctgagaagccagaagataaaggcttgctcatacaggatgcccactttcatcaacttctctgtctgctcaacagtcagattgcctcggtctggcatggtaccctctcgaagctgctgggaagcctgtatgctctgggcatccccaaggcctccaaggagctgcagtcggtggagcaggaggtccgctggcgcatgcggaagctcaagtacaagcacctggccttcctggcagagtcctgtgccaccctctcacaggagcagcactcgcaggagctgctggctgagctgctcacacacctggaaaggcgttggacagaaattgaagattcccacacattagtgaccgtcatgatgaaggtgggacacctctcggagccactaatgaaccgcctggaagacaagcacgtcctgaacagagcgcaggacatcaccctgccccacctgtgcagcgtacttctggcttttgcgcgtctgaacttccatccagaccaagaggatcagttcttcagcctggtacatgagaagctggggtcagagctgccaggcctggagccagccctgcaggtggacctggtgtgggccctgtgtgtgctgcagcaggcacgggaagcagagctgcaagccgtcctccaccctgaatttcacatccaatttctagggggcaagtctcagaaggatcagaacaccttccagaagctgctccacatcaacgccactgccctgctggagtaccccgagtactcgggtccccttctgcctgcctcggctgtggcccctgggccctcagcccttgacaggaaggtgacccccctgcaaaaggagctgcaggagacgctgaaggggctgctggggagcgccgacaagggcagcctcgaggtggccacgcagtatggctgggtgctggatgctgaggtgctgctggacagtgacggcgagtttctgcccgtaagggactttgtggcacctcaccttgcccagccaactgggagccagtcaccacctccagggtctaagaggctagcgttcttgcggtgggagttccccaacttcaacagccgaagcaaggacttgctgggtcgctttgttctggcccggcgacacatagtggctgcaggcttcctgatagtggacgtcccattctatgagtggctggaactcaagtctgaatggcagaaaggcgcctacctcaaggacaagatgcgcaaagcggtggctgaggagctggccaagtgacttgtgccagcagcatggactgcgtgcctctccgccggaggtctagctgtgggcggccaagaagggtcacccttgaggacaaacctctgtgcaggaccttggccagagtggggagggtggccagccactctgagggacagaacgtcctcttgtgtataataaacctttaattttggtgttggacccctggggccttcccaggcttggtcaccctctgcactgtcaaaaaaaaaaaaaaaaaaaaaaaaaaaaaaaaaaaaaaaa

SEQ ID NO: 1040 - DNA, 6666 bp, Homo sapiens
gcctgccggctgcagacgcctgcgagcaggttgtttttataagaggcgtcattggcgcccgagctgtgaccgccgccactggggcagccagcacaatcgggcggaggtggcgctgccccttcagacctgaaagatgtctgaaaattccagtgacagtgattcatcttgtggttggactgtcatcagtcatgaggggtcagatatagaaatgttgaattctgtgacccccactgacagctgtgagcccgccccagaatgttcatctttagagcaagaggagcttcaagcattgcagatagagcaaggagaaagcagccaaaatggcacagtgcttatggaagaaactgcttatccagctttggaggaaaccagctcaacaattgaggcagaggaacaaaagatacccgaagacagtatctatattggaactgccagtgatgattctgatattgttacccttgagccacctaagttagaagaaattggaaatcaagaagttgtcattgttgaagaagcacagagttcagaagactttaacatgggctcttcctctagcagccagtatactttctgtcagccagaaactgtattttcatctcagcctagtgacgatgaatcaagtagtgatgaaaccagtaatcagcccagtcctgcctttagacgacgccgtgctaggaagaagaccgtttctgcttcagaatctgaagaccggctagttgctgaacaagaaactgaaccttctaaggagttgagtaaacgtcagttcagtagtggtctcaataagtgtgttatacttgctttggtgattgcaatcagcatgggatttggccatttctatggcacaattcagattcagaagcgtcaacagttagtcagaaagatacatgaagatgaattgaatgatatgaaggattatctttcccagtgtcaacaggaacaagaatcttttatagattataagtcattgaaagaaaatcttgcaaggtgttggacacttactgaagcagagaagatgtcctttgaaactcagaaaacgaaccttgctacagaaaatcagtatttaagagtatccttggagaaggaagaaaaagccttatcctcattacaggaagagttaaacaaactaagagaacagattagaatattggaagataaagggacaagtactgaattagttaaagaaaatcagaaacttaagcagcatttggaagaggaaaagcagaaaaaacacagctttcttagtcaaagggagactctgttgacagaagcaaagatgctaaagagagaactggagagagaacgactagtaactacggctttaaggggggaactccagcagttaagtggtagtcagttacatggcaagtcagattctcccaatgtatatactgaaaaaaaggaaatagcaatcttacgggaaagactcactgagctggaacggaagctaaccttcgaacagcagcgttctgatttgtgggaaagattgtatgttgaggcaaaagatcaaaatggaaaacaaggaacagatggaaaaaagaaagggggcagaggaagccacagggctaaaaataagtcaaaggaaacatttttgggttcagttaaggaaacatttgatgccatgaagaattctaccaaggagtttgtaaggcatcataaagagaaaattaagcaggctaaagaagctgtgaaggaaaatctgaaaaaattctcagattcagttaaatccactttcagacactttaaagataccaccaagaatatctttgatgaaaagggtaataaaagatttggtgctacaaaagaagcagctgaaaaaccaagaacagtttttagtgactatttacatccacagtataaggcacctacagaaaaccatcataatagaggccctactatgcaaaatgatggaaggaaagaaaagccagttcactttaaagaattcagaaaaaatacaaattcaaagaaatgcagtcctgggcatgattgtagagaaaattctcattctttcagaaaggcttgttctggtgtatttgattgtgctcaacaagagtccatgagcctttttaacacagtggtgaatcctataaggatggatgaatttagacagataattcaaaggtacatgttaaaagaactggatactttttgtcactggaacgaacttgatcagttcatcaataagtttttcctaaacggtgtctttatacatgatcagaagctcttcactgactttgttaatgatgttaaagattatcttagaaacatgaaggaatatgaagtagataatgatggagtatttgagaagttggatgaatatatatatagacacttctttggtcacactttttcccctccatatggacccaggtcggtttacataaaaccgtgtcattacagtagtttgtaacatttgtagattggatagcatttttatgatttgatgagtttcttgtaaggttaccgtttctaagagttgtgctttatggccactgagagaattcagaataaattgaaagatggagtctaaaaattattagctgttacaaatggaacatttcattataacgtgatcactttgacttgagcaaatggtttaatttttatcttaaaaatcagttaagaatatataaaatcctactttggccaagtttgtttcttttcattatagtttatatgaaaagatcaccttaagtgaaattattttcctttaatcttttatgtatttattcacttttggaagctaggaatgagcaacacaaattttactctgaagtcagaagagctcatatataataattctaatgtcccacctattttcacttgtccattccatgtaccagcttagttatgatacttagtcacataattatctttgataaaggtagaggcacaaagaggcaaactaagcaagtcaaattctaatgtgtgtacttcataataattttttatccattttcatctttatattctgtaacatgaaacttacctaatcttcaaatgttagcttcattttttacctttgaaatacttaatctttctgaataaatataatgtgtctataaaataatgagactgattctggtgtctttagtcattaagctggtatctagtcctataatgaacaaaggtgaagctgccttgaggagacaagtgaaaaatttttgcttcaaaggagctcacaagctaagtaaataaatgaaattaaggtatggggcatggtggcctcaggctgtctggaggtgtttggaaaggcttcttgagtgaggtggcctttgaactgaacttagtttttaaagtagcttttggaagagaaatgaggatttgctatgcagacagggaagggaatttcacttaaaaggaaggtcatttggagatgtgaagatacactgctttaaggaagcagggtagagctggaggataagagatgcagaccatgaagggccccattttatgctaaaggttttgtcctgtaggacatggagaacttctgaagaattttcaaggcgggtgggataagattatattgtattttagattacagtagtccccccttatcttcaggatatatgttccaagacccccagtggatgctggaaaccagggatagaacataattctatatatactatgcatgaatttctttttccttctttacaatctcacacataggtttgttcttactatagatcttaccaatctcagcatacttttatttctcttgagaaccttcaccctttcacttaaaggaggcgctttatagcttctctttggcatatccaaatgccagcatcactgttgtattttggggtcattattaagttacttaatcatccttaatccttatcttagggatacttgaacacaaacactgtggtaggataacagtatatctgattaacagactgctactaggtgattaatgggtgggtagtgtaaatacacaagaaaaggatgattcacatcccatgtgggatggagcagaactgcattatttcattacattactcagaacaggcatataattgaaaacttatgaattatttttttttaattatttgagatggaatcttgctttgtcagccaggctggagtgcagtgacacgatctcagctcactgcaacctctgtctcctgggttcaggtgattctcctccctagtctcccaagtagctgggactataggcacgtgccaccacacccggctaattttcatatttttagtagagatggggtttcaccatgttggccaggctgttcttgaaatcctgacctcaagtgatccacacatgtctacctcccaaagtgctgggattacagtcgtgagccactgtaccccgcctaaaactgatgaattatttctgaaattttctatttaacattttcagaccacagttgaccacaggtaacggaaacctcaatcacagaaagtaaagccgtggatacggtgggactaatgtattggtagcagcctagaggattgatgggaaaggtatgaagctagaaggtggtcaatataatacagacatgagctgatgaacatctaaactgggactatactagtaggagaggaaaggaaaaaacatttggaaaatagtaacattgatatttcttgtgaaggagaagtagaaagtaacagtgacttctagatttctgggttgggtcatcttgttggatagtagtaccactgagatagggaattcaaggtttggggcaagggtaattggagatgagaattgtgtttggaggtaactactgacattcaagtggagagggttagttggcagttagttctatggtcatctcttttgccgagactgtatatttatcagactcctgggagaacaccaacatccatggggttgtagggaaggctaaggacaggagtggggagtggtaccttgaaaatccaaaagccatctcaagtaaaaggaataaatgtgtcatgctttttaaaaagttgatgtgcggaaaatgttttcttggcttggaaactgggcggccaggggatgacagtatggacttccagtgaagtagtgacggaagcctgatcatagacattaaggaaagcggtgtaggtgttgtgagcttttgctgtaagaaaaagttgagacttttgttttgctttgtttgtgagagatgtgtatgtatttctgctgagtgataaagccagcggggagggactgatttttataggaaaggaggaaaaataatggaaacacatctcattattttattgtcacatttcttttctttgttatcttttgagtgtttcccttttttgccagtagagttattgtctattttttctttctataggacaaaaaaactaatacagactcctttatttttatatggatatactaggattgtaattcagatatttaatatcttttatcagtgttcagatcatagattaatggagaaaacatttaaaattgttttaaatttaaatacattgaactctaacatagatgaaaaatgtgtttactgctttcagtcgacctgataaaaagcaacgtatggtaaatattgaaaactccaggcatcgaaaacaagagcagaagcaccttcagccacagccttataaaagggaaggtaaatggcataaatatggtcgcactaatggaagacaaatggcaaatcttgaaatagaattggggcaattaccttttgatcctcaatactgattcacaattgagttaaattagacaactgtaagagaaaaatttatgctttgtataatgtttggtattgaaactaatgaaattaccaagatgacaatgtcttttcttttgtttctaagtatcagtttgataactttatattattcctcagaagcattagttaaaagtctactaacctgcattttcctgtagtttagcttcgttgaattttttttgacactggaaatgttcaactgtagttttattaaggaagccaggcatgcaacagattttgtgcatgaaatgagacttcctttcagtgtaagagcttaaagcaagctcagtcatacatgacaaagtgtaattaacactgatgtttgtgttaaatttgcagcagagcttgagaaaagtacattgttctggaatttcatcattaacattttataatcttacactcacttcttgtctttttgtgggttcaagagccctctgacttgtgaagaatttgctgccctcttaagagcttgctgacttgttttcttgtgaaattttttgcacatctgaatatcgtggaagaaacaataaaactacaccatgaggaaaactaaaggtctttatttaaaatctggcattgtattaacatgtaattttatactatgtggtattttatacatttcctcagtagtgatatttggtaaagcagttcatacagcttttttctaagttccatgaatcttacccagtgtttaccgaagtatttaagcagcatctgaatatttccacccagcaatgttaatttatctaggaaagttcagaatttcatcttcatgttgaatttcccttttaacttccgttcatagacatatatgtgacttccaattcgaccctctggcaagtgagtgtggaagaaaacagcagttcttttataattgcttgaaattaggaaagcgcttatttcctagaagcaaataaatgtttaagtaaataaaggctacattttgctg

SEQ ID NO: 1041 - DNA, 6698 bp, Homo sapiens
acggcatgcactgcggcgcccagccggtcaccgcctgccggctgcagacgcctgcgagcaggttgtttttataagaggcgtcattggcgcccgagctgtgaccgccgccactggggcagccagcacaatcgggcggaggtggcgctgccccttcagacctgaaagatgtctgaaaattccagtgacagtgattcatcttgtggttggactgtcatcagtcatgaggggtcagatatagaaatgttgaattctgtgacccccactgacagctgtgagcccgccccagaatgttcatctttagagcaagaggagcttcaagcattgcagatagagcaaggagaaagcagccaaaatggcacagtgcttatggaagaaactgcttatccagctttggaggaaaccagctcaacaattgaggcagaggaacaaaagatacccgaagacagtatctatattggaactgccagtgatgattctgatattgttacccttgagccacctaagttagaagaaattggaaatcaagaagttgtcattgttgaagaagcacagagttcagaagactttaacatgggctcttcctctagcagccagtatactttctgtcagccagaaactgtattttcatctcagcctagtgacgatgaatcaagtagtgatgaaaccagtaatcagcccagtcctgcctttagacgacgccgtgctaggaagaagaccgtttctgcttcagaatctgaagaccggctagttgctgaacaagaaactgaaccttctaaggagttgagtaaacgtcagttcagtagtggtctcaataagtgtgttatacttgctttggtgattgcaatcagcatgggatttggccatttctatggcacaattcagattcagaagcgtcaacagttagtcagaaagatacatgaagatgaattgaatgatatgaaggattatctttcccagtgtcaacaggaacaagaatcttttatagattataagtcattgaaagaaaatcttgcaaggtgttggacacttactgaagcagagaagatgtcctttgaaactcagaaaacgaaccttgctacagaaaatcagtatttaagagtatccttggagaaggaagaaaaagccttatcctcattacaggaagagttaaacaaactaagagaacagattagaatattggaagataaagggacaagtactgaattagttaaagaaaatcagaaacttaagcagcatttggaagaggaaaagcagaaaaaacacagctttcttagtcaaagggagactctgttgacagaagcaaagatgctaaagagagaactggagagagaacgactagtaactacggctttaaggggggaactccagcagttaagtggtagtcagttacatggcaagtcagattctcccaatgtatatactgaaaaaaaggaaatagcaatcttacgggaaagactcactgagctggaacggaagctaaccttcgaacagcagcgttctgatttgtgggaaagattgtatgttgaggcaaaagatcaaaatggaaaacaaggaacagatggaaaaaagaaagggggcagaggaagccacagggctaaaaataagtcaaaggaaacatttttgggttcagttaaggaaacatttgatgccatgaagaattctaccaaggagtttgtaaggcatcataaagagaaaattaagcaggctaaagaagctgtgaaggaaaatctgaaaaaattctcagattcagttaaatccactttcagacactttaaagataccaccaagaatatctttgatgaaaagggtaataaaagatttggtgctacaaaagaagcagctgaaaaaccaagaacagtttttagtgactatttacatccacagtataaggcacctacagaaaaccatcataatagaggccctactatgcaaaatgatggaaggaaagaaaagccagttcactttaaagaattcagaaaaaatacaaattcaaagaaatgcagtcctgggcatgattgtagagaaaattctcattctttcagaaaggcttgttctggtgtatttgattgtgctcaacaagagtccatgagcctttttaacacagtggtgaatcctataaggatggatgaatttagacagataattcaaaggtacatgttaaaagaactggatactttttgtcactggaacgaacttgatcagttcatcaataagtttttcctaaacggtgtctttatacatgatcagaagctcttcactgactttgttaatgatgttaaagattatcttagaaacatgaaggaatatgaagtagataatgatggagtatttgagaagttggatgaatatatatatagacacttctttggtcacactttttcccctccatatggacccaggtcggtttacataaaaccgtgtcattacagtagtttgtaacatttgtagattggatagcatttttatgatttgatgagtttcttgtaaggttaccgtttctaagagttgtgctttatggccactgagagaattcagaataaattgaaagatggagtctaaaaattattagctgttacaaatggaacatttcattataacgtgatcactttgacttgagcaaatggtttaatttttatcttaaaaatcagttaagaatatataaaatcctactttggccaagtttgtttcttttcattatagtttatatgaaaagatcaccttaagtgaaattattttcctttaatcttttatgtatttattcacttttggaagctaggaatgagcaacacaaattttactctgaagtcagaagagctcatatataataattctaatgtcccacctattttcacttgtccattccatgtaccagcttagttatgatacttagtcacataattatctttgataaaggtagaggcacaaagaggcaaactaagcaagtcaaattctaatgtgtgtacttcataataattttttatccattttcatctttatattctgtaacatgaaacttacctaatcttcaaatgttagcttcattttttacctttgaaatacttaatctttctgaataaatataatgtgtctataaaataatgagactgattctggtgtctttagtcattaagctggtatctagtcctataatgaacaaaggtgaagctgccttgaggagacaagtgaaaaatttttgcttcaaaggagctcacaagctaagtaaataaatgaaattaaggtatggggcatggtggcctcaggctgtctggaggtgtttggaaaggcttcttgagtgaggtggcctttgaactgaacttagtttttaaagtagcttttggaagagaaatgaggatttgctatgcagacagggaagggaatttcacttaaaaggaaggtcatttggagatgtgaagatacactgctttaaggaagcagggtagagctggaggataagagatgcagaccatgaagggccccattttatgctaaaggttttgtcctgtaggacatggagaacttctgaagaattttcaaggcgggtgggataagattatattgtattttagattacagtagtccccccttatcttcaggatatatgttccaagacccccagtggatgctggaaaccagggatagaacataattctatatatactatgcatgaatttctttttccttctttacaatctcacacataggtttgttcttactatagatcttaccaatctcagcatacttttatttctcttgagaaccttcaccctttcacttaaaggaggcgctttatagcttctctttggcatatccaaatgccagcatcactgttgtattttggggtcattattaagttacttaatcatccttaatccttatcttagggatacttgaacacaaacactgtggtaggataacagtatatctgattaacagactgctactaggtgattaatgggtgggtagtgtaaatacacaagaaaaggatgattcacatcccatgtgggatggagcagaactgcattatttcattacattactcagaacaggcatataattgaaaacttatgaattatttttttttaattatttgagatggaatcttgctttgtcagccaggctggagtgcagtgacacgatctcagctcactgcaacctctgtctcctgggttcaggtgattctcctccctagtctcccaagtagctgggactataggcacgtgccaccacacccggctaattttcatatttttagtagagatggggtttcaccatgttggccaggctgttcttgaaatcctgacctcaagtgatccacacatgtctacctcccaaagtgctgggattacagtcgtgagccactgtaccccgcctaaaactgatgaattatttctgaaattttctatttaacattttcagaccacagttgaccacaggtaacggaaacctcaatcacagaaagtaaagccgtggatacggtgggactaatgtattggtagcagcctagaggattgatgggaaaggtatgaagctagaaggtggtcaatataatacagacatgagctgatgaacatctaaactgggactatactagtaggagaggaaaggaaaaaacatttggaaaatagtaacattgatatttcttgtgaaggagaagtagaaagtaacagtgacttctagatttctgggttgggtcatcttgttggatagtagtaccactgagatagggaattcaaggtttggggcaagggtaattggagatgagaattgtgtttggaggtaactactgacattcaagtggagagggttagttggcagttagttctatggtcatctcttttgccgagactgtatatttatcagactcctgggagaacaccaacatccatggggttgtagggaaggctaaggacaggagtggggagtggtaccttgaaaatccaaaagccatctcaagtaaaaggaataaatgtgtcatgctttttaaaaagttgatgtgcggaaaatgttttcttggcttggaaactgggcggccaggggatgacagtatggacttccagtgaagtagtgacggaagcctgatcatagacattaaggaaagcggtgtaggtgttgtgagcttttgctgtaagaaaaagttgagacttttgttttgctttgtttgtgagagatgtgtatgtatttctgctgagtgataaagccagcggggagggactgatttttataggaaaggaggaaaaataatggaaacacatctcattattttattgtcacatttcttttctttgttatcttttgagtgtttcccttttttgccagtagagttattgtctattttttctttctataggacaaaaaaactaatacagactcctttatttttatatggatatactaggattgtaattcagatatttaatatcttttatcagtgttcagatcatagattaatggagaaaacatttaaaattgttttaaatttaaatacattgaactctaacatagatgaaaaatgtgtttactgctttcagtcgacctgataaaaagcaacgtatggtaaatattgaaaactccaggcatcgaaaacaagagcagaagcaccttcagccacagccttataaaagggaaggtaaatggcataaatatggtcgcactaatggaagacaaatggcaaatcttgaaatagaattggggcaattaccttttgatcctcaatactgattcacaattgagttaaattagacaactgtaagagaaaaatttatgctttgtataatgtttggtattgaaactaatgaaattaccaagatgacaatgtcttttcttttgtttctaagtatcagtttgataactttatattattcctcagaagcattagttaaaagtctactaacctgcattttcctgtagtttagcttcgttgaattttttttgacactggaaatgttcaactgtagttttattaaggaagccaggcatgcaacagattttgtgcatgaaatgagacttcctttcagtgtaagagcttaaagcaagctcagtcatacatgacaaagtgtaattaacactgatgtttgtgttaaatttgcagcagagcttgagaaaagtacattgttctggaatttcatcattaacattttataatcttacactcacttcttgtctttttgtgggttcaagagccctctgacttgtgaagaatttgctgccctcttaagagcttgctgacttgttttcttgtgaaattttttgcacatctgaatatcgtggaagaaacaataaaactacaccatgaggaaaactaaaggtctttatttaaaatctggcattgtattaacatgtaattttatactatgtggtattttatacatttcctcagtagtgatatttggtaaagcagttcatacagcttttttctaagttccatgaatcttacccagtgtttaccgaagtatttaagcagcatctgaatatttccacccagcaatgttaatttatctaggaaagttcagaatttcatcttcatgttgaatttcccttttaacttccgttcatagacatatatgtgacttccaattcgaccctctggcaagtgagtgtggaagaaaacagcagttcttttataattgcttgaaattaggaaagcgcttatttcctagaagcaaataaatgtttaagtaaataaaggctacattttgctg

SEQ ID NO: 1042 - DNA, 1769 bp, Homo sapiens
gcgcggaggtgagtcggtgtgttgtggactcgtggtgctggctgccgctgttcaggcggccgggaacgggcggtggggagcgggcggagctggccctgcctctgcctggccggcgccgcagtcggcgcgggccgcgcccgccgccgccaactgccctgagcgcttgctgaggccgagggagacgtcggggcctgcacctggagggagcctgccgcgctggccccgaggagggggcgttgccatggcgacagcctctcccgctgctgacggggggcgggggcggccctgggaaggagggctggtctcctggccccccgcccctccccttactctcccctggacttggatgggcccgagttgggggcaacaccccgggcattggggctttccagctctcacagaaccttcagcatccccagctgccggtcttggcatcttcgaagtaaggagagttttagatgcttctggatgttcaatgctagcacctttacagactggagcagctcgattttcttcgtatttactttcaagagcaagaaaagtgctgggctcccacttattttctccctgtggtgttccggagttctgctccatatccaccagaaagctggcggcccacggctttggcgcatccatggcggcaatggtgtccttccctccccagaggtatcactactttttagtgctggactttgaggccacgtgcgacaagccacagattcatcctcaggaaatcatcgagttccccatcctaaagctaaatggccggaccatggagattgagtctacctttcacatgtatgtccagcctgtagtccatccacagcttaccccattctgtacagagctcaccgggattattcaagccatggtggatggtcagccaagcctgcagcaagtgctggagagggtcgatgaatggatggcgaaggaaggcctcttagatccaaacgtcaagtcaatttttgtcacctgtggagactgggacttaaaagtcatgctcccaggccagtgccagtacttgggcttgccagtggcggattacttcaagcagtggattaatctgaaaaaggcttacagcttcgccatgggctgctggcccaagaatggacttctagacatgaacaagggcctcagcctgcaacacataggccggccccacagcggcattgacgactgcaagaacattgccaacatcatgaagacactcgcctatcgaggcttcatcttcaagcagacatcgaagccgttctgattggccgaggacaggatggggcaggacagggtagctgtttggcccagcccagaatcctcctctccctcaccagaggggaagagggagagtggcatagctctgtgtccagagtgtccccagctgccctgtgggctcatgcccttggcgtgggcttgtgcccttgcaagggcttggccacttggcccttctggagcagacactttgtgccccccatccccacccctcaatctcagcccagtatcagcccctcccattgcgggcctgggctagggggacccaggcactcaccgcctcctccctggtacacaggcttctgtggggccaccaagcccctcctgtgccccctcccatccatagtgcatggtgtgtggtgcccccagggctccaggacagatcaggccccaccttgtgtctacccccatccccgctgtgaacgtgccactgaataaagtcggggaaacgaggcactgggtgtgtgtgcaaagccaaaaaaaaaaaaaaaaaaaaaaaaaaa

SEQ ID NO: 1043 - DNA, 1603 bp, Homo sapiens
gcaccgccggaagtttctgccgcggctttgcggggacgggggagtggtagtgggggctgcagctgccggacccaggcactgacccttgacctccggtggctcccccatctctcaggcgcgatggctacgggcgcggatgtacgggacattctagaactcgggggtccagaaggggatgcagcctctgggaccatcagcaagaaggacattatcaacccggacaagaaaaaatccaagaagtcctctgagacactgactttcaagaggcccgagggcatgcaccgggaagtctatgccttgctctactctgacaagaaggatgcacccccactgctacccagtgacactggccagggataccgtacagtgaaggccaagttgggctccaagaaggtgcggccttggaagtggatgccattcaccaacccggcccgcaaggacggagcaatgttcttccactggcgacgtgcagcggaggagggcaaggactacccctttgccaggttcaataagactgtgcaggtgcctgtgtactcggagcaggagtaccagctttatctccacgatgatgcttggactaaggcagaaactgaccacctctttgacctcagccgccgctttgacctgcgttttgttgttatccatgaccggtatgaccaccagcagttcaagaagcgttctgtggaagacctgaaggagcggtactaccacatctgtgctaagcttgccaacgtgcgggctgtgccaggcacagaccttaagataccagtatttgatgctgggcacgaacgacggcggaaggaacagcttgagcgtctctacaaccggaccccagagcaggtggcagaggaggagtacctgctacaggagctgcgcaagattgaggcccggaagaaggagcgggagaaacgcagccaggacctgcagaagctgatcacagcggcagacaccactgcagagcagcggcgcacggaacgcaaggcccccaaaaagaagctaccccagaaaaaggaggctgagaagccggctgttcctgagactgcaggcatcaagtttccagacttcaagtctgcaggtgtcacgctgcggagccaacggatgaagctgccaagctctgtgggacagaagaagatcaaggccctggaacagatgctgctggagcttggtgtggagctgagcccgacacctacggaggagctggtgcacatgttcaatgagctgcgaagcgacctggtgctgctctacgagctcaagcaggcctgtgccaactgcgagtatgagctgcagatgctgcggcaccgtcatgaggcactggcccgggctggtgtgctagggggccctgccacaccagcatcaggcccaggcccggcctctgctgagccggcagtgactgaacccggacttggtcctgaccccaaggacaccatcattgatgtggtgggcgcacccctcacgcccaattcgagaaagcgacgggagtcggcctccagctcatcttccgtgaagaaagccaagaagccgtgagaggccccacggggtgtgggcgacgctgttatgtaaatagagctgctgagttggaccaggcaaaaaaaaaaaaaaaaaa

SEQ ID NO: 1044 - DNA, 1563 bp, Homo sapiens
gcaccgccggaagtttctgccgcggctttgcggggacgggggagtggtagtgggggctgcagctgccggacccaggcgcgatggctacgggcgcggatgtacgggacattctagaactcgggggtccagaaggggatgcagcctctgggaccatcagcaagaaggacattatcaacccggacaagaaaaaatccaagaagtcctctgagacactgactttcaagaggcccgagggcatgcaccgggaagtctatgccttgctctactctgacaagaaggatgcacccccactgctacccagtgacactggccagggataccgtacagtgaaggccaagttgggctccaagaaggtgcggccttggaagtggatgccattcaccaacccggcccgcaaggacggagcaatgttcttccactggcgacgtgcagcggaggagggcaaggactacccctttgccaggttcaataagactgtgcaggtgcctgtgtactcggagcaggagtaccagctttatctccacgatgatgcttggactaaggcagaaactgaccacctctttgacctcagccgccgctttgacctgcgttttgttgttatccatgaccggtatgaccaccagcagttcaagaagcgttctgtggaagacctgaaggagcggtactaccacatctgtgctaagcttgccaacgtgcgggctgtgccaggcacagaccttaagataccagtatttgatgctgggcacgaacgacggcggaaggaacagcttgagcgtctctacaaccggaccccagagcaggtggcagaggaggagtacctgctacaggagctgcgcaagattgaggcccggaagaaggagcgggagaaacgcagccaggacctgcagaagctgatcacagcggcagacaccactgcagagcagcggcgcacggaacgcaaggcccccaaaaagaagctaccccagaaaaaggaggctgagaagccggctgttcctgagactgcaggcatcaagtttccagacttcaagtctgcaggtgtcacgctgcggagccaacggatgaagctgccaagctctgtgggacagaagaagatcaaggccctggaacagatgctgctggagcttggtgtggagctgagcccgacacctacggaggagctggtgcacatgttcaatgagctgcgaagcgacctggtgctgctctacgagctcaagcaggcctgtgccaactgcgagtatgagctgcagatgctgcggcaccgtcatgaggcactggcccgggctggtgtgctagggggccctgccacaccagcatcaggcccaggcccggcctctgctgagccggcagtgactgaacccggacttggtcctgaccccaaggacaccatcattgatgtggtgggcgcacccctcacgcccaattcgagaaagcgacgggagtcggcctccagctcatcttccgtgaagaaagccaagaagccgtgagaggccccacggggtgtgggcgacgctgttatgtaaatagagctgctgagttggaccaggcaaaaaaaaaaaaaaaaaa

SEQ ID NO: 1045 - DNA, 1784 bp, Homo sapiens
gcaccgccggaagtttctgccgcggctttgcggggacgggggagtggtagtgggggctgcagctgccggacccaggtgcggaagtgcgagggcccaggtggctgaaggggccgttaggaacatccaagcggtggggcacaggcagatccccgacctgacctggaccacccttctcctcttggcccgccccttcaactcgcctccgcttaggtctggattggccccgccccctgacctgagcctggtccttcttcaggcactgacccttgacctccggtggctcccccatctctcaggcgcgatggctacgggcgcggatgtacgggacattctagaactcgggggtccagaaggggatgcagcctctgggaccatcagcaagaaggacattatcaacccggacaagaaaaaatccaagaagtcctctgagacactgactttcaagaggcccgagggcatgcaccgggaagtctatgccttgctctactctgacaagaaggatgcacccccactgctacccagtgacactggccagggataccgtacagtgaaggccaagttgggctccaagaaggtgcggccttggaagtggatgccattcaccaacccggcccgcaaggacggagcaatgttcttccactggcgacgtgcagcggaggagggcaaggactacccctttgccaggttcaataagactgtgcaggtgcctgtgtactcggagcaggagtaccagctttatctccacgatgatgcttggactaaggcagaaactgaccacctctttgacctcagccgccgctttgacctgcgttttgttgttatccatgaccggtatgaccaccagcagttcaagaagcgttctgtggaagacctgaaggagcggtactaccacatctgtgctaagcttgccaacgtgcgggctgtgccaggcacagaccttaagataccagtatttgatgctgggcacgaacgacggcggaaggaacagcttgagcgtctctacaaccggaccccagagcaggtggcagaggaggagtacctgctacaggagctgcgcaagattgaggcccggaagaaggagcgggagaaacgcagccaggacctgcagaagctgatcacagcggcagacaccactgcagagcagcggcgcacggaacgcaaggcccccaaaaagaagctaccccagaaaaaggaggctgagaagccggctgttcctgagactgcaggcatcaagtttccagacttcaagtctgcaggtgtcacgctgcggagccaacggatgaagctgccaagctctgtgggacagaagaagatcaaggccctggaacagatgctgctggagcttggtgtggagctgagcccgacacctacggaggagctggtgcacatgttcaatgagctgcgaagcgacctggtgctgctctacgagctcaagcaggcctgtgccaactgcgagtatgagctgcagatgctgcggcaccgtcatgaggcactggcccgggctggtgtgctagggggccctgccacaccagcatcaggcccaggcccggcctctgctgagccggcagtgactgaacccggacttggtcctgaccccaaggacaccatcattgatgtggtgggcgcacccctcacgcccaattcgagaaagcgacgggagtcggcctccagctcatcttccgtgaagaaagccaagaagccgtgagaggccccacggggtgtgggcgacgctgttatgtaaatagagctgctgagttggaccaggcaaaaaaaaaaaaaaaaaa

SEQ ID NO: 1046 - DNA, 3288 bp, Homo sapiens
ggggggtgttcatctccgcgaccaggaaacgggaaagatggcgacggctccgcgacgttgaggccgcgttgggcggttcagactcagggtgatggcaggagagctggctgacaaaaaggaccgtgatgcatcaccttccaaggaggaaaggaagcgatcacggactcctgacagagagcgggatagagaccgggaccggaagtcttccccatctaaagatagaaagcggcatcgttcaagggatagacgtcgaggaggcagccgttctcgctctcgttcccgttccaaatctgcagaaagagaacgacggcacaaagaacgagaacgagataaggagcgggatcggaataagaaggaccgagatcgagacaaggatgggcacagacgggacaaggaccgtaaacgatccagcttatctcctggtcgaggaaaagactttaaatctcggaaggacagagactctaagaaggatgaagaggatgaacatggtgataagaagcctaaggcccagccattatccctggaggagcttctggccaagaaaaaggctgaggaagaagctgaggctaagcccaagttcctctctaaagcagaacgagaggctgaagctctaaagcgacggcagcaggaggtggaagagcggcagaggatgcttgaagaagagaggaagaaaaggaaacagttccaagacttgggcaggaagatgttggaagatcctcaggaacgggaacgtcgggaacgcagggagaggatggaacgggagaccaatggaaatgaggatgaggaagggcggcagaagatccgggaagagaaggataagagcaaggaactgcatgccattaaggagcgttacctgggtggcatcaaaaagcggcgccgaacgagacatctcaatgaccggaaatttgtttttgagtgggatgcatctgaggacacatccattgactacaaccccctgtacaaagaacggcaccaggtgcagttgttagggcgaggcttcattgcaggcattgacctcaagcagcagaagcgagagcagtcacgtttctatggagacctaatggagaagaggcgaaccctggaagaaaaggagcaggaggaggcaagactccgcaaacttcgtaagaaggaagccaagcagcgctgggatgatcgtcattggtctcagaaaaagttagatgagatgacggacagggactggcggatcttccgtgaggactacagcatcaccaccaaaggtggcaagatccccaatcccatccgatcctggaaagactcttctctgcccccacacatcttggaggtcattgataagtgtggctacaaggaaccaacacctatacagcgtcaggcaattcccattgggctacagaatcgtgacatcattggtgtggctgagactggcagtggcaagacagcagccttcctcatccctctgctggtctggatcaccacacttcccaaaattgacaggatcgaagagtcagaccaaggcccttatgccatcatcctggctcccacccgtgagttggctcaacagattgaggaagagaccatcaagtttgggaaaccgctaggtatccgcactgtggctgtcattggtggcatctccagagaagaccagggcttcaggctgcgcatgggttgtgagattgtgattgctacccctgggcgtttgattgatgtgctggagaaccgctacctggtgctgagccgctgtacctatgtggttctggatgaggcagataggatgattgacatgggctttgagccagatgtccagaagatcctggagcacatgcctgtcagcaaccagaagccagacacggatgaggctgaggaccctgagaagatgctggccaactttgagtcgggaaaacataagtaccgccaaacagtcatgttcacggccaccatgcccccagcggtggagcgtctggccaggagctatcttcggcgacctgctgtggtgtacattggctccgcaggcaagccccatgagcgtgtggaacagaaggtcttcctcatgtcagagtcagaaaagaggaaaaagctgctggcaatcttggagcaaggctttgacccacccatcattatttttgtcaaccagaagaagggctgcgacgtgttggccaaatccctggagaagatggggtacaatgcttgcacactgcacggtggaaaaggccaggagcagcgagagtttgcgttgtccaacctcaaggctggggccaaggatattttggtggctacagatgtggctggtcgtggtattgacatccaagatgtgtctatggttgtcaactatgatatggccaaaaatattgaagattacatccaccgcattggccgcacgggacgagcaggcaagagtggggtggccatcaccttcctcacaaaagaggactctgctgtgttctacgagctgaagcaagctatcctggaaagcccagtgtcttcctgtccccccgaactagccaaccacccagatgcccagcataagccaggcaccatcctcaccaagaagcgccgggaagagaccatctttgcctgacacagcactcttcctgtgggctgagggcatctccaaagctgcctgatgcctgtttttcagaaccctcacatccctctttccaggtcctcactcttgggatatgggggcttaggaaaacaatccaactccctagcccagaccctcaggtcaggaggcctgcgtgtggggctgcaaaaggagaggacgacgctgtcggaggcagggagagcaaattaccacagcttcttggcccagttctgcccttctttgctttgggattgcactgggccatcagctcatgccaggctatgggggcagccagttggcattgctccccagactgaacagaaacctggccgccggatgggacctcctttggcacagacttgactgtgtaactgcataaactgcagtagcatcattgccctagatgccccaggagacctggcaccatgaggattacagacagtggaatcttactgtcatctggacagctgttttcctgtttggatggtaaaggaagttgagagtctttagacctgtgcacagccccgcaccaaggggtgctgtatgctctaggcatcccctcccccaggggattttctaagtagatggggggacacggtgaactggctgtgtccatctttgtcactgagtgaaatctctgttttctattctctgagaagataagtttgtatgttctgagaataaatacatgaatattaagactgttaaaaaaaaaaaaaaaaaaaaaa

SEQ ID NO: 1047 - DNA, 951 bp, Homo sapiens
attggtgggatgagcaatccgagttcccggatgagggaacattctgcagtataaagggagcagggaaggcgggagacagcgcagtttgaatcgcggtgcgacgaaggagtaggtggtgggatctcaccgtgggtccgattagccttttctctgccttgcttgcttgagcttcagcggaattcgaaatggctggcggtaaggctggaaaggactccggaaaggccaagacaaaggcggtttcccgctcgcagagagccggcttgcagttcccagtgggccgtattcatcgacacctaaaatctaggacgaccagtcatggacgtgtgggcgcgactgccgctgtgtacagcgcagccatcctggagtacctcaccgcagaggtacttgaactggcaggaaatgcatcaaaagacttaaaggtaaagcgtattacccctcgtcacttgcaacttgctattcgtggagatgaagaattggattctctcatcaaggctacaattgctggtggtggtgtcattccacacatccacaaatctctgattgggaagaaaggacaacagaagactgtctaaaggatgcctggattccttgttatctcaggactctaaatactctaacagctgtccagtgttggtgattccagtggactgtatctctgtgaaaaacacaattttgcctttttgtaattctatttgagcaagttggaagtttaattagctttccaaccaaccaaatttctgcattcgagtcttaaccatatttaagtgttactgtggcttcaaagaagctattgattctgaagtagtgggttttgattgagttgactgtttttaaaaaactgtttggattttaattgtgatgcagaagttatagtaacaaacatttggttttgtacagacattatttccactctggtggataagttcaataaaggtcatatcccaaacaaaa

SEQ ID NO: 1048 - DNA, 1897 bp, Homo sapiens
acatggcggcggcggccctgcggagtggctggtgccgctgtccacggagatgcctcggcagtggaatccaatttctttccagccacaacctaccccatgggtcgacctatcagatgcgccggccgggcggagagctgccactgtccaaatcatattcttctggaaacagaaaaggctttctgtccggcttgctagataatgtcaaacaagaattagccaaaaacaaagaaatgaaagaaagtataaaaaaattccgtgacgaggccagaaggctagaagaatcagacgtgctccaggaggccagaaggaaatacaaaaccatcgagtcagaaaccgtgcggacgagcgaggtgctacggaagaagcttggggagctgacgggcaccgtgaaggagagccttcacgaagtcagtaaaagtgatctcggccggaaaatcaaggagggcgtggaggaagcagccaagacggccaagcagtcggccgagtcggtatccaaaggcggggagaagctgggcaggacagcggccttcagagccctctcccagggggtggagtccgtgaagaaggaaattgacgacagcgtcctgggacagaccgggccctaccggaggccccagcgactccggaagagaacggagtttgcgggagataagttcaaggaggagaaagtgtttgagccaaacgaggaggccctgggggtcgtgctgcacaaggactccaagtggtaccagcagtggaaggacttcaaggagaacaacgtggtgtttaaccggttcttcgagatgaagatgaagtatgacgaaagcgacaacgcgttcatccgggcatcccgggcccttacggacaaggtcaccgacttgctggggggcctgttctccaagacagagatgtcggaggtgctcacggagatcctccgggtggacccggcctttgacaaggaccggtttctgaaacagtgcgagaacgacatcatccccaatgtcctggaggccatgatttctggagagcttgacattctcaaagactggtgctatgaagctacttacagccagctggcccaccccatccagcaggccaaggcactgggtctccagttccattctcgcatcctagacattgacaacgtcgacctggccatgggcaagatgatggagcaggggccggtgctgatcatcaccttccaggcacagctggtgatggtggtcaggaaccccaaaggcgaggtggtggagggtgacccggacaaggtgctgcggatgctgtacgtgtgggcgctctgccgagaccaggacgagctcaacccctacgcggcctggcggctcctggacatctcggcctccagcaccgagcagattctctgagtgtggtgccggagccaggtagccccggcctgggtcatcaggcacagaggcaccgcaacaccacctgcggcaactccagacctctgggaacaagactgcgggctctgcccccagctctgccaggacggctgcaagaccagctggcccgggaggggacaacgggctgttgcgggtgcgcggcagctggagacactcccccgcagggccaacccctgccctgttgctctgccctgcaggggtcccggcgcctggtcacctggggtgcacacaggtcacacagtgccaagaggccccagggcccagggactccccccacagcagggtgggacccgggacccgcggctcagtggcccgctagccacgtcagccaagccactttaggtccatttttttattttaacagtgctcttccatcttgtgcataagcctgagatttggaaagaataaaacaccgaattgcagaagagcaaaaaaaaaaaaaaaaaaaaaaaaaaaaaaaaaaaaaaaaaaaaaaaaaaaaaaaaaaaaaaaaaaaa

SEQ ID NO: 1049 - DNA, 6786 bp, Homo sapiens
gaggaaggcggctcgcggttcctccaccgcctccgccgccgcatcctccgcttgtgctaccgccgcgggcgctgggccgctctgctggtccggcatgagaccgtgagacgagagacgggtcggggccgccgacatgtttggccgctcgcggagctgggtgggcgggggccatggcaagacttcccgcaacatccactccttggaccacctcaagtatctgtaccacgttttgaccaaaaacaccacagtcacagaacagaaccggaacctgctagtggagaccatccgttccatcactgagatcctgatctggggagatcaaaatgacagctctgtatttgacttcttcctggagaagaatatgtttgttttcttcttgaacatcttgcggcaaaagtcgggccgttacgtgtgcgttcagctgctgcagaccttgaacatcctctttgagaacatcagtcacgagacctcactttattatttgctctcaaataactacgtaaattctatcatcgttcataaatttgacttttctgatgaggagattatggcctattatatatcgttcctgaaaacactttcgttaaaactcaacaaccacactgtccatttcttttataatgagcacaccaatgactttgccctgtacacagaagccatcaagtttttcaaccaccctgaaagcatggttagaattgctgtaagaaccataactttgaatgtctataaagtgtcattggataaccaggccatgctgcactacatccgagataaaactgctgttccttacttctccaatttggtctggttcattgggagccatgtgatcgaactcgatgactgcgtgcagactgatgaggagcatcggaatcggggtaaactgagtgatctggtggcagagcacctagaccacctgcactatctcaatgacatcctgatcatcaactgtgagttcctcaacgatgtgctcactgaccacctgctcaacaggctcttcctgcccctctacgtgtactcactggagaaccaggacaagggaggagaacggccgaaaattagcctgccggtgtctctttatcttctgtcacaggtcttcttaattatacatcatgcaccgctggtgaactcgttagctgaagtcattctgaatggtgatctgtctgagatgtacgctaagactgaacaggatattcagagaagttctgccaagcccagcattcggtgcttcattaaacccaccgagacactcgagcggtcccttgagatgaacaagcacaagggcaagaggcgggtgcaaaagagacccaactacaaaaacgttggggaagaagaagatgaggagaaagggcccaccgaggatgcccaagaagacgccgagaaggctaaaggtacagagggtggttcaaaaggcatcaagacgagtggggagagtgaagagatcgagatggtgatcatggagcgtagcaagctctcagagctggccgccagcacctccgtgcaggagcagaacaccacggacgaggagaaaagcgccgccgccacctgctctgagagcacgcaatggagcagacccttcctggatatggtgtaccacgcgctggacagcccggatgatgattaccatgccctgttcgtgctctgcctcctctatgccatgtctcataataaaggcatggatcctgaaaaattagagcgaatccagctccccgtgccaaatgcggccgagaagaccacctacaaccacccgctagctgaaagactcatcaggatcatgaacaacgctgcccagccagatgggaagatccggctggcgacgctggagctgagctgcctgcttctgaagcagcaagtcctgatgagtgctggctgcatcatgaaggacgtgcacctggcctgcctggagggtgcgagagaagaaagtgttcaccttgtacgacatttttataagggagaagacatttttttggacatgtttgaagatgagtataggagcatgacaatgaagcccatgaacgtggaatatctcatgatggacgcctccatcctgctgcccccaacaggcacgccactgacgggcattgacttcgtgaagcggctgccgtgtggcgatgtggagaagacccggcgggccatccgggtgttcttcatgctgcgttccctgtcactgcaattgcgaggggagcctgagacacagttgccgctgactcgggaggaggacctgatcaagactgatgatgtcctggatctgaataacagcgacttgattgcatgtacagtgatcaccaaggatggcggcatggtccagcgattcctggctgtggatatttaccagatgagtttggtggagcctgatgtgtccaggcttggctggggagtggtcaagtttgcaggcctattgcaggacatgcaggtgactggcgtggaggacgacagccgtgccctgaacatcaccatccacaagcctgcgtccagcccccattccaagcccttccccatcctccaggccaccttcatcttctcagaccacatccgctgcatcatcgccaagcagcgcctggccaaaggccgcatccaggcaaggcgcatgaagatgcagagaatagctgccctcctggacctcccaatccagcccaccactgaagtcctggggtttggactcggctcctccacctccactcagcacctgcctttccgcttctacgaccaggggcgccggggcagcagcgaccccacagtgcagcgctccgtgtttgcatcggtggacaaggtgccaggcttcgccgtggcccagtgcataaaccagcacagctccccgtccctgtcctcacagtcgccaccctccgccagcgggagccccagcggcagcgggagcaccagccactgcgactctggaggcaccagctcgtcctccaccccctccacagcccagagtccagcagatgcccccatgagtccagaactgcctaagcctcaccttcctgaccagttggtaatcgtcaacgaaacggaagcagactctaagcccagcaagaacgtggccaggagcgcagccgtggagacagccagcctgtcccccagcctcgtccctgcccggcagcccaccatttccctgctctgcgaggacacggctgacacgctgagcgtcgaatcgctgacccttgtccccccagttgacccccacagcctccgcagcctcaccggcatgcccccgctgtccacgccggctgccgcctgcacagagcccgtgggcgaagaggctgcatgtgctgagcctgtgggcaccgctgaggactgagtcagtgccggggcctccctttgtgtgtgtggccccgctggtagggaccccagtgccgctgactggcaagacacactgggagcacccaccattctgtgcggcccccagcagccatctcaaccacctatccctgcgctcccttgaatgggaagaagccccacgttgtccttgaattcctttttcactttgcatctcttcacgtgcaggctgggaccagcggagacaccgcggcgaatgcagatgactgcaccggccactcagggagctgcctgggctccgtgtctctgagccccgggtggcaggacccaccggcacctctttcttcctctgtcatatggctcctctgtcaccagccccagtgtgcacagaagaattggaccaggtcactgtacgtagaaatttgtagaaaagcagacttagataaacatctcctttggatatttatttccgcttttggcagcaggtgaacatttatttttaaaacttctatttaaaagaagtccaaaaacatcaacactaaggtttgatgtcatgtgaaaagtgtaataataacagttaagatttcatgatcattttcactggacctttcctgatattttgtttcagagttcttagtgtggctttttccatttatttaagtgattctttgttactcactaactctgcaagcctgtggaataatgaagtaccttcctggaaagtttggattattttttaaacaaaaacaagggagatacatgtattctcaggtacacacagagctgagagggctgaatggttttctgctatagcagccgagaggcctcccatcatggaaagatttctccaggaaaaggaggaatgtagccagctccccactcaggacgcttcctcatttctcttcaccaaaaccaaacagagacagcttccagcaccttcttcagtgttaccatctctaagaaggaaccagttgggaccgtgaagactcccgaccctgtggccatgatggaaatcaaaggaagacaccctctacgtcacctgccctcgactgtgtgtgcccacatgtgccgagagatggcccagagccagttcccctccagctgcaagggcatggtgtccccagagctctgagtctgtcactctccctctgctactgctgctgatctgaatatggaaaccccatggttcccttccccattcggactgggtgtgtacaagcaaggacccagatgcatcagacacagcccccaagatgttcctttctactcggccagctcgggagccagacacagcactcacagcccaggccgtgatccaccctccccaagtccaccagggccagcggcccctcacctctctggtcactggtgagaccttccacaactttcctccagacctgccagcagatgtgcccaccaggggcattaggtatccgccggagcctggccatagggtagtctcgggagccgcgctgagatcttttgccacctgcattttagaagaacatggtctctgtctcctcggcccagccagctgtcccggcaaggcctgccgagggcagttttcaacctcatgaaggaaacacagtcctgccaaggagggggagtggcgcccatggggacaggcctcagtccttagaagccctctgggtagctgtgcccacccagccttcatggctgcaggtacaaggacctttgcttccatagagaaaacgcacagctcagaaagggggccacatgggcagaaacccaaaggaaggacaaaccacgaccaccgtggccatctgcagaatccctggaagagaaggaaggcagggtggagcggggggaagaccatcatggagagaaggaccacagcatcaggagacgggacacgccacacccagcaggcagcctgtgtgttgcttaattttttaagagcaagaggggtagagaggatcaagctggccctggctggagatggctagcccctgagacatgcacttctggttttgaaatgactctgtctgtggggcagcagaaactagagaaggcaagtggctgccccaccccaaggcgtgaccaggaggaacagcctgcagctcactccatgccacacgggtgggccaccagcctgctgtcagaagtctctgggctccaactggtcttgtaaccactgagcactgaaggagagaggtcttggtcagggctggacagcatgcccgggaggaccagcagaggattaaaggtgactgggaggaccagcggaggataaaagacactgctcagggcagggcttctaccctgcatccctggccaagaaaagggcagtccccatgtgggcttgcagggtcactctcaggggcctctttcagctggggctggcaacttgcgtctgggggacacctccaggtgtgtggggtgaggatttcctataaccagggctcccagaagctttgcttatgtaaggaggtctgggagccagcccattggaggccaccagccattttggcttcaaaggaccccacctcacccaggtctcagcggcagtgggcacagctatgtcttcaggagctcccgtcaaacctcatagctggggcgctcccagacaggccagtccagacaggacacgctgggcccctggcatccagaggaagagccaggagtgtgggaaggcccacagtgggggctgtggcttctgacactcaggtcatagcctcagaggtctgaggtcagcccccacagacccatccggcccgccccccaagtccctgcagagagcacttagagttatggcccaggccctggtccacccttcccctgtgcacctccggctgggtttgccaagtcagggagcagggctggccgcaggaactcccaaaccttggctttgaatattgttgtggaggtgtgctcgtccctttctggacgtgcaaggtacctgtcccagcaggtcagatggggccagctgaggcgctcccccaggcaggaagggccagccttcaccatcgcgtgggattgggaggaggggcctccgtgagcagcccctcctctgccgctgtcccagcccagtccctctcccggagccttggcagcctcccacaacccagacacttgcgttcacaagcaacctaaggggcaggtgaagaagcgcagccctgccagacgcgctagattcctctaaggtctctgagatgcaccgttttttaaaaaggcgtggggtgaactgattttgatcttcttgtctagatgcaataaataaatctgaagcatttaatgtagtcatcttgacattgggcctacactgtacgagttccttatgtttccttgagctaaaaatatgtaaataatttttgtcccagtgagaaccgagggttagaaaacctcgatgcctctgagcctcgggaccgctctagggaagtacctgctttcgccagcatgactcatgcttcgtgggtactgaacacgagggtggaaatgaaaactggaacttccttgtaaatttaaacttggcaataaaagagaaaaaaagtt

SEQ ID NO: 1050 - DNA, 1605 bp, Homo sapiens
cagcgccggggcggagggtacgatggagaatttcacggcactgtttggggctcaggctgacccaccaccgcccccaaccgcactcggcttcggaccaggaaagcctccacccccgccaccgcctcctgcgggcgggggacccggcacggccccgcctcccaccgcggccacggctcctcctggcgcggacaagtcaggagctggctgtggccctttttacctcatgagggaactgccaggtagcacagagctgacaggcagcacgaatctgatcacacactacaacttggaacaagcctataataaattctgtgggaagaaggtgaaggagaagctaagtaacttcctgcctgacctgccagggatgattgatctgcctggttcccatgataacagcagcctccgctctctcattgagaagccccctattctcagtagctctttcaatcctatcacagggaccatgctggccggcttccgcctccacactggcccgttgccggagcagtgtcgtctgatgcatattcagcctcccaagaagaagaataagcacaagcacaaacagagccgtacccaggatcctgtccccccaggtaaacccagttaagttccgtatggagctctggactcctaaattcccctgaagaagaaaccaatgtactgtggtctcttgggacttgggacagggactctagcagcacctctgtatcctttctggccatttggacaaaagcagttgccccgacttgggattttcctgtagtcttcagtggttcataacagtagaggattttgagctttacaggtgataggtacctaatgtctcctacagaaacaccatctgattcagatcacaagaagaagaaaaagaaaaaagaagaggatcctgaacggaaaaggaagaagaaagagaagaagaaaaagaaggtagagtagaggcctattgccacaacccagtgagtttccccagatctcacccctgtcctaaataccctagagttctttgcctcaagttggacccaagattgaaaacccaaggcaggttgcaggtttctcctgtacagcctgatcaaagccaaggctagttcctagttgttcttaccctgcttctttctcccccagaatcgacatagtccagaccacccaggtatgggcagctcccaggccagcagcagcagcagcctacgctaataggaccactggactctttgccaggatggcttttcctgctgtactgaacctgctgataaaagctgccttccaggctcttggacactgccttgggagcatcctgcagctgggacagaggccagctcctgttgggctcagttgagactaagtaaattaggagagagagggacatgcttttgtaggctcatcccagttggttttctcatggacatctcttcctctcccaggaagcttacaattttcttctctctcttttgtgcaatttgtctgatttaggacttgttctgtgttttctttaaaaaaaaaaaaattacatttatcaaaaaaaaaaaaaaaaaaaaaaaaaaaaaaaaaaaaaaaaaaaaaaaaaaaaaaaaaaaaaaaaaaaaaaaaaaaaaaaaaaaaaaaaaaaaa

SEQ ID NO: 1051 - DNA, 1427 bp, Homo sapiens
tgggtgttggaggctttaaggtagctttaaattcgtgttgtcctgggagctcgcccttttcggctggagtcgggctttacggcgccggatggctctggacgtgaagtctcgggcaaagcgttatgagaagctggacttccttggggagggacagtttgccaccgtttacaaggccagagataagaataccaaccaaattgtcgccattaagaaaatcaaacttggacatagatcagaagctaaagatggtataaatagaaccgccttaagagagataaaattattacaggagctaagtcatccaaatataattggtctccttgatgcttttggacataaatctaatattagccttgtctttgattttatggaaactgatctagaggttataataaaggataatagtcttgtgctgacaccatcacacatcaaagcctacatgttgatgactcttcaaggattagaatatttacatcaacattggatcctacatagggatctgaaaccaaacaacttgttgctagatgaaaatggagttctaaaactggcagattttggcctggccaaatcttttgggagccccaatagagcttatacacatcaggttgtaaccaggtggtatcgggcccccgagttactatttggagctaggatgtatggtgtaggtgtggacatgtgggctgttggctgtatattagcagagttacttctaagggttccttttttgccaggagattcagaccttgatcagctaacaagaatatttgaaactttgggcacaccaactgaggaacagtggccggacatgtgtagtcttccagattatgtgacatttaagagtttccctggaatacctttgcatcacatcttcagtgcagcaggagacgacttactagatctcatacaaggcttattcttatttaatccatgtgctcgaattacggccacacaggcactgaaaatgaagtatttcagtaatcggccagggccaacacctggatgtcagctgccaagaccaaactgtccagtggaaaccttaaaggagcaatcaaatccagctttggcaataaaaaggaaaagaacagaggccttagaacaaggaggattgcccaagaaactaattttttaaagagaacactggacaacattttactactgagggaaatagccaaaaaggcaaataatggaaaaatagtaaacattaagtaaatgctgtagaagtgagtttgtaaatattctacacatgtaaaatatgtaaaactatgggttatttttattaaatgtattttaaaataaaaatttaattctggtttttctgattagagtcccaaagtgagaaaagttcaatactcttgaaatgtagaattgaaaatgcattagggaaaacttaataaaaattattaccagttatttggaaaaaaaaaaaa

SEQ ID NO: 1052 - DNA, 2392 bp, Homo sapiens
agcggaccgacgcgacacgccgtgcgcctccgcggctgcgctacgaaaacgagtcccggagcggccccgcgcccgccgcacccggccctcgcccacccgaagacaggcgcccagctgccccgccgtctccccagctagcgcccggccgccgccgcctcgcgggccccgggcggaagggggcggggtcccgattcgccccgcccccgcggagggatacgcggcgccgcggcccaaaacccccgggcgaggcggccggggcgggtgaggcgctccgcctgctgctcgtctacgcggtccccgcgggccttccgggcccactgcgccgcgcggaccgcctcgggctcggacggccggtgtccccggcgcgccgctcgcccggatcggccgcggcttcggcgcctggggctcggggctccggggaggccgtcgcccgcgatgctgctctccaagttcggctccctggcgcacctctgcgggcccggcggcgtggaccacctcccggtgaagatcctgcagccagccaaggcggacaaggagagcttcgagaaggcgtaccaggtgggcgccgtgctgggtagcggcggcttcggcacggtctacgcgggtagccgcatcgccgacgggctcccggtggctgtgaagcacgtggtgaaggagcgggtgaccgagtggggcagcctgggcggcgcgaccgtgcccctggaggtggtgctgctgcgcaaggtgggcgcggcgggcggcgcgcgcggcgtcatccgcctgctggactggttcgagcggcccgacggcttcctgctggtgctggagcggcccgagccggcgcaggacctcttcgactttatcacggagcgcggcgccctggacgagccgctggcgcgccgcttcttcgcgcaggtgctggccgccgtgcgccactgccacagctgcggggtcgtgcaccgcgacattaaggacgaaaatctgcttgtggacctgcgctccggagagctcaagctcatcgacttcggttcgggtgcgctgctcaaggacacggtctacaccgacttcgacggcacccgagtgtacagccccccggagtggatccgctaccaccgctaccacgggcgctcggccaccgtgtggtcgctgggcgtgcttctctacgatatggtgtgtggggacatccccttcgagcaggacgaggagatcctccgaggccgcctgctcttccggaggagggtctctccagagtgccagcagctgatccggtggtgcctgtccctgcggccctcagagcggccgtcgctggatcagattgcggcccatccctggatgctgggggctgacgggggcgccccggagagctgtgacctgcggctgtgcaccctcgaccctgatgacgtggccagcaccacgtccagcagcgagagcttgtgaggagctgcacctgactgggagctaggggaccacctgccttggccagacctgggacgcccccagaccctgactttttcctgcgtgggccgtctcctcctgcggaagcagtgacctctgacccctggtgaccttcgctttgagtgccttttgaacgctggtcccgcgggacttggttttctcaagctctgtctgtccaaagacgctccggtcgaggtcccgcctgccctgggtggatacttgaaccccagacgcccctctgtgctgctgtgtccggaggcggccttcccatctgcctgcccacccggagctctttccgccggcgcagggtcccaagcccacctcccgccctcagtcctgcggtgtgcgtctgggcacgtcctgcacacacaatgcaagtcctggcctccgcgcccgcccgcccacgcgagccgtacccgccgccaactctgttatttatggtgtgaccccctggaggtgccctcggcccaccggggctatttattgtttaatttatttgttgaggttatttcctctgagcagtctgcctctcccaagccccaggggacagtggggaggcaggggagggggtggctgtggtccagggaccccaggccctgattcctgtgcctggcgtctgtcctggccccgcctgtcagaagatgaacatgtatagtggctaacttaaggggagtgggtgaccctgacacttccaggcactgtgcccagggtttgggttttaaattattgactttgtacagtctgcttgtgggctctgaaagctggggtggggccagagcctgagcgtttaatttattcagtacctgtgtttgtgtgaatgcggtgtgtgcaggcatcgcagatgggggttctttcagttcaaaagtgagatgtctggagatcatatttttttatacaggtatttcaattaaaatgtttttgtacataaaaaaaaaaaaaaaaaaaaaaaaaaaaaaaa

SEQ ID NO: 1053 - DNA, 4935 bp, Homo sapiens
cttttctctcgaagggcacccgaagattgtcacgagtccttagactccaactactgcggcagcttccaaatttcctaaaaccctaagctgggccagcccggcagcccacgcacttccggcctcggacccgccccaaacacccaagcgccccagcgcctcatctctaggtccggaaataaacgaacatctccgattatggttataccagggtcgagggtttccgaatatattcgattcaaagcttcggcaagacgaagaaaaccgagcctgaaagcagggcgagaaaaggggcgctgcagggcggatggaaagaattgattggtaacgatgtggagacggaaacatccgaggacatccggaggaacccggggagttctgagtggtaatcgaggggtagagtatggcagtgggcggggtcatctcggtacgttcgaagggcgttggcggaaattaccgaagatgcccgaagccgtcgggacggacccgagtacctcacgcaagatggcggagctggaggaggtgactctggacgggaagcctcttcaggcgctgcgggtgaccgacctgaaggccgcactggagcagcgaggcctagccaagagcgggcagaagagtgccctggtcaagcggctcaaaggggctctaatgctagaaaatttacagaaacactcaacaccccatgctgcattccagccaaattcccagattggtgaggaaatgagccagaacagtttcataaaacagtatctggaaaagcagcaggagctacttaggcagcgtctggaacgtgaagctcgagaagctgcagaacttgaagaagcttcagctgagtcggaggacgagatgatccatcctgagggagtggcttccctgctgcctcctgactttcagagcagcctggagagaccagagctggagctcagcagacattcgcccagaaaaagctcctcaatttctgaagagaaaggtgactctgatgatgagaaaccaaggaaaggagaaagacgatcatctagggtcagacaggcaagagcagctaaactgtctgagggcagccaacctgctgaggaggaagaggatcaagaaacaccttccagaaacctaagggtcagagcagatcgaaatttgaaaacagaggaggaagaagaggaggaggaggaggaggaagaagatgatgaagaagaggaaggtgatgatgagggacaaaaatctagggaggcaccaatcctgaaagagtttaaggaagaaggggaagagatacctagagtaaaaccagaggagatgatggatgagagacccaaaacaagatcccaggaacaggaggtgttagagagaggagggagatttacaagatcccaggaagaggctagaaaaagtcatctggccagacagcagcaggagaaggaaatgaaaacaacatctccccttgaggaggaagaaagagaaataaaatcttcacaaggcttaaaggaaaaatcgaagtctccttcccctcctcgactgactgaagatcgaaagaaggcctcacttgtagcgctgccagagcaaactgccagcgaggaggagactcctccacctttactaacaaaggaagcatcttctccaccacctcatccacagctccatagcgaagaagaaatagagcccatggaaggcccagccccccctgtcctcattcagttatctcctcctaatacagatgctgacaccagggagctattagtatctcagcatactgtccagttggtaggaggcctgtctcctttgtcaagtccttcagacaccaaagcagaatctccagcagagaaagtgccagaggagagtgtcctgcctctggttcagaaaagcacactggctgactactcagcccagaaggatcttgaacctgagtcagacagatctgctcagcccctccctctaaaaattgaggaattagcactggccaaaggaatcactgaagaatgtctgaaacagccatctttggaacagaaggaaggcagaagagcttctcatacccttctcccaagccacagattgaaacagtcagctgattcatcctctagccggtcctcctcatcttcctcctccagttctagatcaagatctcgctctcctgacagttcaggttctcggtctcattcaccgctcagatccaagcagagagatgtagcccaggcacgtactcatgccaaccctcgtggtagacccaagatgggctccagatcaacatcagagtccagatcaaggtcacgttcacgttctcgttcagcatcaagcaacagcagaaaatctctgagccctggagtctccagggacagcagcaccagctatactgaaaccaaagatccctcttctggtcaggaggttgcaactccaccagtgccacaactgcaggtctgtgagccaaaggagaggacttccacctcctcatcctctgtccaagcaaggcgtctgagtcagcctgaatcagctgaaaagcatgtgacccagaggttacagcctgagcgggggagcccaaagaagtgtgaagctgaagaggcagagccaccagctgccacacagccccaaacctcagagactcagacctctcatctgccagaatcagaaagaattcatcacactgttgaggagaaggaggaagtgaccatggacacaagtgaaaacagacctgaaaatgatgttccagaacctcccatgcctattgcagaccaagtcagcaatgatgaccgcccggagggcagtgttgaagatgaggagaagaaagagagctcgctgcccaaatcattcaagaggaagatctccgttgtctcagctaccaagggggtgccagctggaaacagtgacacagaggggggccagcctggtcggaaacgacgctggggagccagcacagccaccacacagaagaaaccttccatcagtatcaccactgaatcactaaagagcctcatccccgacatcaaacccctggcggggcaggaggctgttgtggatcttcatgctgatgactctcgcatctctgaggatgagacagagcgtaatggcgatgatgggacccatgacaaggggctgaaaatatgccggacagtcactcaggtagtacctgcagagggccaggagaatgggcagagggaagaagaggaagaagagaaggaacctgaagcagaacctcctgtacctccccaggtgtcagtagaggtggccttgcccccacctgcagagcatgaagtaaagaaagtgactttaggagataccttaactcgacgttccattagccagcagaagtccggagtttccattaccattgatgacccagtccgaactgcccaggtgccctccccaccccggggcaagattagcaacattgtccatatctccaatttggtccgtcctttcactttaggccagctaaaggagttgttggggcgcacaggaaccttggtggaagaggccttctggattgacaagatcaaatctcattgctttgtaacgtactcaacagtagaggaagctgttgccacccgcacagctctgcacggggtcaaatggccccagtccaatcccaaattcctttgtgctgactatgccgagcaagatgagctggattatcaccgaggcctcttggtggaccgtccctctgaaactaagacagaggagcagggaataccacggcccctgcaccccccacccccacccccggtccagccaccacagcacccccgggcagagcagcgggagcaggaacgggcagtgcgggaacagtgggcagaacgggaacgggaaatggagcggcgggagcggactcgatcagagcgtgaatgggatcgggacaaagttcgagaagggccccgttcccgatcaaggtcccgtgaccgccgccgcaaggaacgtgcgaagtctaaagaaaagaagagtgagaagaaagagaaagcccaggaggaaccacctgccaagctgctggatgaccttttccgaaagaccaaggcagctccctgcatctattggctcccactgactgacagccagatcgttcagaaagaggcagagcgggccgaacgggccaaggagcgggagaagcggcgaaaggagcaagaagaagaagagcaaaaggagcgggagaaggaagccgagcgggaacggaaccgacagctggagcgagagaaacgtcgggagcacagtcgggagagggacagggagagagagagagaaagggagcgggacaggggggaccgagatcgggatagggaaagggaccgagaacgaggcagggaaagggatcgcagggacaccaagcgccacagcagaagccggagtcggagcacacctgtgcgggaccggggtgggcgccgctagctgggaaaacactagagctgcaggtaccagccactcggccccagggggttatggccacagagggataggcacagtctccaccaccctggagccaagggtctttcacatcacctatccctacatacataccaaatggaaaagtggccatccttttccccccaaacacacccccttaacctatctcttgggacttagcccgaccctccctctcatttcccattaagtctgagaggcaagagctaggttaggcaaggaggtggttggccagagatggggaacagccaggtgccccagtcctctgatttttcctccatcctgcttaccacctccctgggtacttacagccttctcttgggaacagccggggccaggactgggtcacctatgagctgaatcagcatctcctcctgagtcccagggcccctgcagttcccagtctcttctgtcctgcagcccttgcctctttcccacaggttccactttatatccaccttttccttttgttcaatttttatttttattttttttattattaaatgatgtggtctatggaaaaaaaaataaaaatctgacttagttttt

SEQ ID NO: 1054 - DNA, 2188 bp, Homo sapiens
ctcgcggtaagaggctgaggagccggcctgcaacctgccggsscggctccgctacggcagcgcctcagtggcttcctccacagccacctccggagggatctggctgaggaggaagtggaggtgtcactggccccggcctttgccccaatcttgtgtgggcactgaagggggactacaggttcgagagttatgggtgctacatgtgtgctttcagagcagtagtgtgaggaagcttggagtgggatggcaggacggcctcatccctatgatggtaactccagtgatccagagaattgggatcggaaattgcatagtagacctcgtaaactttataaacattcaagtacttcctcgcgtattgctaaaggaggagttgaccacaccaaaatgagtctacatggtgctagtgggggacatgagagatcaagagatagacgaaggtcaagtgacagatcacgagattcatctcatgaaagaacggagtcccagctcactccttgtattagaaatgtgacttctccaacacgacagcaccatgttgaacgagaaaaagatcacagttcctctcgtccaagcagtccgcgtcctcaaaaagcatccccaaatggttccattagcagtgctgggaacagcagcagaaacagtagtcagtcaagttcagatggtagctgtaagacagctggggagatggtgtttgtatatgaaaatgcaaaagaaggagctcggaatataagaacgtcagaacgagtgacactaatagtggataacactagatttgttgtagacccatccatttttactgcacagccaaatacaatgttgggcaggatgtttggatctggccgagaacataactttacacgacccaatgagaaaggagagtatgaggtggcagagggaattggttccactgtgtttcgagcgattctggattactataaaacaggaataatccgttgtcctgatggcatatctattcctgaactgagagaagcatgtgactatctttgtatctcttttgaatatagcactattaaatgtagagatctcagtgccctaatgcatgagttatcaaatgatggtgctcgtagacaatttgaattttatctggaagaaatgatcctccctctcatggtagctagtgcccagagtggggaacgggaatgtcatatagtggtgcttacagatgatgatgtggttgattgggatgaagaatatccaccacagatgggagaagaatattcacaaattatttatagcacaaaattatatagatttttcaagtatattgaaaacagagatgtggccaagtcagttttgaaggagaggggtcttaagaagattagattgggaatagaaggttatcctacctacaaagaaaaagtaaagaaaaggcctggaggccgcccagaagtgatctacaactatgtccaaagaccctttattcgaatgtcctgggagaaggaagaaggaaagagtcggcatgtagactttcagtgtgtaaagagtaaatctatcaccaatcttgcagcagctgcagcagacattccccaggaccagctggtagtcatgcatccaactccacaagtggatgagctggatattctccctatccaccccccttctggcaacagtgacctcgatcctgatgcacagaatccaatgctgtgatgctgatcttccttgaaaccatagcatgctactcttcacagtgacgttgtactctcctcattctgcactgcaaggccactcttcttcattgtgagatgcacataacaatgtttaggatattgcagtgtaggcttttttaaagaccaaaggtagctgaatggtttttttttaaatgagtacaactctagcattttgaagttccagttgtaaatgtatttgtttaccagtaggtttgtgaaattggttctttgtatgggggatggtcctttttcacacagctaggtcttttcagaagtggtggaaattggcagctggggtactttcagtttggactgatattcatcacacctcagataaaatgcagagtaatatatagttgcactttataaatggtggttaaatggaaatgttcaagccattttatagttgtgatgcacaatataatttaagtgcttctgtcaaagtattcctccagtacaatttgtatagtttgctgcccttgatgagcaaaaagtat

SEQ ID NO: 1055 - DNA, 1707 bp, Homo sapiens
ctctccgctgctgtcgccaggagtcacttcacgagaagccaggtcacaaccgtcggcccttgtctggaaaagtaaaagtggatcctgccacgttcggagctccctggcgcctcgcccggctggagctagagaactcgtcctgtggcggcccccggcgtggggcgggacagcggccccctggagggggcagtcccgggagaacctgcggcggccggagcggtaaaaataagtgactaaagaagcagacctgggaatcacctaacatgtcgaggaggagatttgattgccgaagtatttcaggcctactaactacaactcctcaaattccaataaaaatggaaaactttaataatttctatatacttacatctaaagagctagggagaggtaaatttgctgtggttagacaatgtatatcaaaatctactggccaagaatatgctgcaaaatttctaaaaaagagaagaagaggacaggattgtcgggcagaaattttacacgagattgctgtgcttgaattggcaaagtcttgtccccgtgttattaatcttcatgaggtctatgaaaatacaagtgaaatcattttgatattggaatatgctgcaggtggagaaattttcagcctgtgtttacctgagttggctgaaatggtttctgaaaatgatgttatcagactcattaaacaaatacttgaaggagtttattatctacatcagaataacattgtacaccttgatttaaagccacagaatatattactgagcagcatataccctctcggggacattaaaatagtagattttggaatgtctcgaaaaatagggcatgcgtgtgaacttcgggaaatcatgggaacaccagaatatttagctccagaaatcctgaactatgatcccattaccacagcaacagatatgtggaatattggtataatagcatatatgttgttaactcacacatcaccatttgtgggagaagataatcaagaaacatacctcaatatctctcaagttaatgtagattattcggaagaaactttttcatcagtttcacagctggccacagactttattcagagccttttagtaaaaaatccagagaaaagaccaacagcagagatatgcctttctcattcttggctacagcagtgggactttgaaaacttgtttcaccctgaagaaacttccagttcctctcaaactcaggatcattctgtaaggtcctctgaagacaagacttctaaatcctcctgtaatggaacctgtggtgatagagaagacaaagagaatatcccagaggatagcagcatggtttccaaaagatttcgtttcgatgactcattacccaatccccatgaacttgtttcagatttgctctgttagcacttttttctttgactcatttggactgaatttgaaattttatatccactccagtgagattatgatttgtagcttcatatatgacatgtttatattgtaaatgcacttttccatggaataatttagggaagtgttttaatgttaaattactagttgctagcatgttatgatttcatatcctgagatagctctgcagataagaaaatatttaaatatatgacaaaaagtaaaattgtacatgtgagtttacatgttaatgaaataattcaacttcaaatgaacttaccagaatgttttgcatatcaacaaaaaaaaaaaaaaaaaa

SEQ ID NO: 1056 - DNA, 8636 bp, Homo sapiens
agtcggaagttgcctgagcagatcccagccggctggctcgagtggccttcgtcgtcccttggcgccctgggagagtcgctgacgggtggactgacggaccgcctgaggacggccggccagggcggtgaaagcgccagccctatggcgcgggtcgcgtgaggcggaaggccgaggacggccggcggcggcgcccgccccggcgatgcgggccccgcccgtcgcctcaggtgccatttggattgtactttagtggcacgatgtactctgagtggaggtcactgcatttggtgattcagaatgatcaaggccataccagtgtgctgcacagctatccagagagcgttggacgagaggtggcaaatgctgtagtccgtcctcttgggcaggtgttaggtaccccttcagtggctggtagtgagaatttgttaaaaactgacaaagaagtaaaatggaccatggaagtaatttgctatggactgacccttccattggatggagagactgtaaaatattgcgttgatgtatatacagactggattatggctttagtgttgccaaaagattctattccattgccagttattaaagagcctaatcaatatgttcaaactatactaaaacacctacagaatctttttgtaccaagacaggaacagggttccagtcagattcgactatgcttacaggtcctgagagccattcagaaactggcccgtgagtcatctctcatggcccgagaaacttgggaagtcttactgttgtttcttctgcagattaacgacatacttctggccccaccaactgttcaaggtggcattgctgagaatctagcagagaagttgattggtgttctctttgaggtgtggttactagcttgtactcggtgcttcccaacacctccttattggaaaacagccaaggagatggtggctaactggaggcatcacccagcagtggtggagcagtggagcaaggtcatttgtgcactcacttccagattgctacgctttacatatggtccttcatttcctgcatttaaagttcccgatgaagatgccagtctgatccctccagaaatggataatgagtgtgttgcacagacatggtttcgctttttacacatgttaagtaatcctgtggatttgagtaacccagctattataagctctactcccaaatttcaggaacagttcttgaatgtgagcggaatgccgcaagaattgaatcagtatccctgccttaaacatctgcctcaaatattttttcgtgccatgcgtggaatcagctgtctggtggatgcattcttaggtatttctagaccccgatcagacagtgctcccccaacacccgtgaatagattaagtatgcctcaaagtgctgctgtcagtaccacccccccacataaccggaggcaccgggctgttactgtgaataaggccaccatgaagacaagcacagttagtactgctcatgcctctaaagttcagcaccagacgtcctccacctctcctctgtcaagtccaaatcagactagttcagaaccccggccactgcctgcccctcggagaccaaaggttaacagcatcttgaatctctttggatcatggttatttgatgcagcatttgttcactgtaaacttcataatgggataaacagagacagcagcatgactgccattacaacacaagctagcatggagtttcgacggaaagggtcacaaatgtccacagacaccatggtttccaatcctatgtttgatgcaagtgaatttcctgataactatgaagcaggaagagctgaggcttgtgggacactgtgtaggattttttgtagcaagaagactggagaagagattctgccagcttatttatccagattttacatgcttttaattcaaggtttgcagataaatgattatgtgtgccatcctgtcttggccagcgttattctaaactctcctcctttgttctgctgtgacttgaaagggattgatgttgtggttccttactttatttcagctcttgaaaccattttgcctgacagagaactctcaaaattcaaaagctatgtaaatccaacagaattgcgaagatcctccattaatatcctgctttctttgttgcccctccctcatcattttggcacagtcaaatctgaggtggtcctggaaggaaagtttagtaacgatgacagctcttcttatgataaaccaataacttttctgtccctgaagttgagacttgtgaatatattaataggtgccttgcaaactgaaacggaccccaacaacacccaaatgatattaggggcaatgttaaatattgttcaagattcagcacttttggaagccattggttgccagatggagatgggtggtggagaaaataacctgaagagtcatagtcgcaccaatagtggtattagttcagcaagtggtggaagcacggagcccacgactcccgatagtgagagacctgctcaagctctcttaagagattatgctcttaatacagattcagctgctgggctcctgattcgcagcattcatctcgtcacccaaagactcaactcccagtggcgccaagacatgagcatatcactggcagctctagagctcctctctggccttgcaaaggtaaaagtgatggttgactcaggagaccggaagcgagccatcagttctgtgtgcacctacattgtttatcagtgtagtcggccagctcctttacactccagggatctgcactccatgatagtggcagcttttcagtgtctctgtgtctggctgacagagcaccctgatatgcttgatgaaaaggactgccttaaggaagtactggagattgtggaactgggtatctcaggaagtaagtccaagaacaatgagcaagaggtcaagtacaaaggagataaggagccaaaccctgcatctatgagggtaaaggatgctgctgaagccaccctaacatgcattatgcagttgctcggcgcatttccttcacctagtggtcctgcctctccttgtagtcttgtgaatgagaccactttgattaaatactccaggctgccaaccataaacaagcatagtttccggtactttgtcttggataacagtgtcatcctggcaatgctggaacaacctcttggaaatgagcagaatgattttttcccctctgtcactgtgctggtccggggaatgtctggaagacttgcttgggcacaacagctttgtcttttacccagaggagcaaaagcaaatcagaagctttttgtacctgaacctcgcccagttcctaaaaatgacgttggatttaaatattctgtgaaacatcggccatttcctgaagaggtggacaagattccttttgtgaaagcagatctcagcattccagatttgcatgaaatagtcactgaagaattagaagagagacacgaaaaattaaggagtggcatggcccagcagattgcttatgaaatacaccttgagcaacagagtgaggaggaattgcagaagagaagttttcctgacccagttacggattgcaagcccccgcctcctgcccaggaattccaaacagcccgcctttttctctcacactttggatttttgtccttagaagcactgaaggaacctgcaaatagtcgtctacctcctcaccttattgcacttgattccacgatacctggattttttgatgacattgggtatctggatctcttgccatgtcgtccttttgacacagtttttattttctatatgaagccaggtcagaaaacgaaccaagagattttaaagaatgtggagtcttccagaactgttcagccacatttcctagaatttttgctttcccttggctggtcagtagatgtgggcagacaccctggttggactgggcatgtttctaccagttggtctattaattgttgtgatgatggtgaaggatctcaacaagaagtgatttcctctgaagatattggagctagcattttcaatggacagaagaaggtgctgtattatgctgatgcccttacagaaattgcttttgtggttccttctcctgtggagtccttaactgattcattggaaagtaacatctcggaccaagatagtgattcaaatatggatcttatgccaggaattctgaaacagccatccctgacacttgagcttttccccaatcatacagacaatcttaattcctcacagaggctcagtcccagttccagaatgaggaagctgcctcagggtcgccctgttcctccccttggacctgagacaagagtttctgtagtctgggtggaacgctatgatgatatagaaaactttcccctctcagagctgatgacagagatcagtactggtgtggaaactactgcaaatagtagcacttcactgagatctacaactcttgaaaaagaagttcctgtcatcttcatccaccctttaaacactggattattccggataaaaattcaaggagccactggaaaatttaatatggtcatccctcttgtggatgggatgattgtcagcaggcgagctcttggctttctggtgaggcagactgtaattaacatttgtagaagaaagagactggaaagtgactcctacagtcccccccatgtccgccggaaacagaaaatcaccgacattgtcaacaagtaccggaacaagcagctggagccagagttttatacttcacttttccaggaggttggactcaagaactgcagttcttagaccactgaatttctaagactgttgaactccagtttgggaactataacacagcagaacagtttgataggtgatcactgtaaaaataaaaacaaatcactcccaagagcttactgtttaatcaccagaatagaagaaacacattataacccatttgatagaagactttgggctatctagtgaaatgggctcccagacacaatcacactcctgctgataatgatgatatacattttagccataaactttcttttaaaagtgacaattttagttaaacataagccttttgaggagaaaggcttttatgcatctcagttaaacacgtgcattggtagtatcaacaaatttgcaatatagaagttgaagatagttttttacctcactttttaggaggttgtattcaaaattaaaatctcagaatcttacaggacatttaaagactcatgttgatagcatggaggagaaggaaagaagtcacagccttctactcagttgtaggtcttcttgtcatccagctgtcacactgacaaaaagaaaagatgatacatgttttttgctcagataagaagcctgacattaaaagatgtcatatttttttctccacatttcaaaaagttgtccttctcatcactgcacagatctgtctgaaagcctcagtttctgagtgacccaggaacagatcagaaatggagcatggccttgtcctttaatggggatgcaaataaagtttgtggggttaaaagttataagacagcagtgataccccactctctccattattgtccagcggggtgacataatgacaggttaaatatttgtgattcattgattaaatattatttaaagaaatgtaaattcacaataagggttgaaaattatttggtttcatccattgtctcttatttcaggaccaagcagcaaactgcagtagtttgtgaaggattctaatatggggttcaggaatagcctctcaacgctactaattcagatctctcccagagaactactggatttcctcataattgacaaacatgagtgaccacctctttgggtggctactgttagaaatggctgttgtcatgttttctggactttgccagccaacagatccctgccaggttttggaaatacttctattacctcgctgctacttttctgcagggataaaacttttgaggtggccagacccagaacatccaaggattcctgttacagtgctacagtatacactgctcatttatcctattctcatgtgctttcttctttagtaagattattttaagaaaataagtgatatttaaagtccaaagaggaatgatcacagttgtataaggggtgttttcccacttgaactctgatgtcagtcgactgtgggtcagagctacaaccatctgtttggtttgatgttttggtggtttacttacggagtggggatagtgtgagacctaattccctgtgcaaatgtctcttattccagaaatgtgcattttgtcatctataagcaagaaatatgggcatagcagctcttggtttaaagtttgccataacctgttcatgtttgttttaagctcaggtaaagataacctcctctttctatgactccagtttccattcaggttatagtattattcaatagttgattttctttttaagctgggcaataaattgatgtttccagatggtaacatgggagagggcatataggataaagatgagcaaattctaccctaaaaatgttctagtagttcacaggaagaagatgaggtttaataactttcaaggtaattctagattgacattttgaggggaaaatgggctcttgttctagttgaagtgagcagagaaggctataaattaatatgtaacttacagcattccagaggttaaaaataactgatgcagatgtacttcttcagtgtgattcttcagatcaaacttttacttttggcatagttaatttcagaaaaatgtgctgtatgtgtgtgtgtatgagggttggtcttgctgatccttcagttagctctaaattctggcaactccttgtaattccaatgtatttgatacatgaacaatcatgttgaatgcatttgtgatctgggagacttcctcgtcttccagggaaggaaggatgtgcagcccctgaaggcatgaaactcccagtgtgtacggagccagtggaatatgggatacccataccttaccaggcgctggttccttctgctcacaataacatctgcccaaagagggagtgggaagaacgcttagctctttcactagtatggatttgagttcatggtcactatttttacccacctgcctttgttaaaaatcactttgagtagaatagcactggaggaacatatttagcacctaatattaatatttagtagtccattgataaatttgccagcatatgttctagcctctggggggaaaccaggaccacttttgtctgtggcttaaacagttcagttgctatatctgttgggtatgccgggggtggatgagtgtggcattccgtgaagaggaaggtggtaagtaaggtttcccttctactgccttcttaagttgcaggagggagcttttctcctcccctctggttgggagcactgaggacagtgaggagggcttttaccttgttaatcctttccttatttagctagctttcctttttgtctagggcttcctcttgagaccctcttccatccattgggcctttgaaaggactaatcagacacacacacacacacacacacacacacacacactcgcatactcatgcacattttccttcatttccagatcctttatttcagagcagcccattttcctctggattcattgatgaatacaagtacccacacctttggccagtaatgtcagttacctgctgcaggttctgtgtatgaggccttcatgaacggttaccttctccatacactagggaagcatttgtcagactctgcagactgggttctagagaggcagagtctttaagagtattcatttcttctggaaggtggagctttacccaaagtggaagttagccttgctcaaagatgtgttttgtggtaggtggtaaaaataaataaataaataaataataaaaaaagaaacatgtattggaggtaatttgacactgctgctggcagtagttctctattcaccattttaaagcccattcaggttctctcttcctgaaaagaactgattgctgtgtttacatgaaatgacattggagtcagatggtctgttttaaagatttccatgacagcctcttttcctgagttggagagattggaggtggtctatccgtacgatgtggaatcaaacggtgggtttcttagtagctaaagaagccatgtacttctagtgtgtttctcagaatatcaactcatgttcttcagatgcttttctttttttaatggtgagggaaaaggtataatttgggattccacagtgccttgcatatagtaggcgcccagtaaatacttgttgaagcaaaccaagtttcccaagtcctcatctcttatagtgaccaagacatctttctcctctgaagggcttggcagttgtggctaaaaaataagcagtatcattatttgcttgaaatcatatatacagtttgtatgaatttcagtatgttgccaagacatgattttttcttattgtattttctgtaaatatttctggcactgaactgtaaagtaaaggcaaagtgtaaatatgaaggcgtgcccgtgccccttgcctcctgtgtttcatcttcgtcggttagggaagaaggtccagaggtttgtttgtatttatgccgatcctttgtccagaagaagcccatggaatattgaatgtaatacatttagtcaattaaattttaaggagattcttatctaataa

SEQ ID NO: 1057 - DNA, 2205 bp, Homo sapiens
ccgggacgcagggcaaagcgagccatggctgtctacgtcgggatgctgcgcctggggaggctgtgcgccgggagctcgggggtgctgggggcccgggccgccctctctcggagttggcaggaagccaggttgcagggtgtccgcttcctcagttccagagaggtggatcgcatggtctccacgcccatcggaggcctcagctacgttcaggggtgcaccaaaaagcatcttaacagcaagactgtggtccagtgcctggagaccacagcacagagggtcccagaacgagaggccttggtcgtcctccatgaagacgtcaggttgacctttgcccaactcaaggaggaggtggacaaagctgcttctggcctcctgagcattggcctctgcaaaggtgaccggctgggcatgtggggacctaactcctatgcatgggtgctcatgcagttggccaccgcccaggcgggcatcattctggtgtctgtgaacccagcctaccaggctatggaactggagtatgtcctcaagaaggtgggctgcaaggcccttgtgttccccaagcaattcaagacccagcaatactacaacgtcctgaagcagatctgtccagaagtggagaatgcccagccaggggccttgaagagtcagaggctcccagatctgaccacagtcatctcggtggatgcccctttgccggggaccctgctcctggatgaagtggtggcggctggcagcacacggcagcatctggaccagctccaatacaaccagcagttcctgtcctgccatgaccccatcaacatccagttcacctcggggacaacaggcagccccaagggggccaccctctcccactacaacattgtcaacaactccaacattttaggagagcgcctgaaactgcatgagaagacaccagagcagttgcggatgatcctgcccaaccccctgtaccattgcctgggttccgtggcaggcacaatgatgtgtctgatgtacggtgccaccctcatcctggcctctcccatcttcaatggcaagaaggcactggaggccatcagcagagagagaggcaccttcctgtatggtacccccacgatgttcgtggacattctgaaccagccagacttctccagttatgacatctcgaccatgtgtggaggtgtcattgctgggtcccctgcacctccagagttgatccgagccatcatcaacaagataaatatgaaggacctggtggttgcttatggaaccacagagaacagtcccgtgacattcgcgcacttccctgaggacactgtggagcagaaggcagaaagcgtgggcagaattatgcctcacacggaggcgcggatcatgaacatggaggcagggacgctggcaaagctgaacacgcccggggagctgtgcatccgagggtactgcgtcatgctgggctactggggtgagcctcagaagacagaggaagcagtggatcaggacaagtggtattggacaggagatgtcgccacaatgaatgagcagggcttctgcaagatcgtgggccgctctaaggatatgatcatccggggtggtgagaacatctaccccgcagagctcgaggacttctttcacacacacccgaaggtgcaggaagtgcaggtggtgggagtgaaggacgatcggatgggggaagagatttgtgcctgcattcggctgaaggacggggaggagaccacggtggaggagataaaagctttctgcaaagggaagatctctcacttcaagattccgaagtacatcgtgtttgtcacaaactaccccctcaccatttcaggaaagatccagaaattcaaacttcgagagcagatggaacgacatctaaatctgtgaataaagcagcaggcctgtcctggccggttggcttgactctctcctgtcagaatccaacctggctttatgcacctagatgtccccagcacccagttctgagccaggcacatcaaatgtcaaggaattgactgaacgaactaagagctcctggatgggtccgggaactcgcctgggcacaaggtgccaaaaggcaggcagcctgcccaggccctccctcctgtccatcccccacattcccctgtctgtccttgtgattggcataaagagcttctgttttctttggcaaaaaaaaaaaaaaaaaaaaaaaaaaaaaaaaaaaaaaaaaaaaaaaaa

SEQ ID NO: 1058 - DNA, 1247 bp, Homo sapiens
accccatctccagaggcaccttccactagcaacagtctccccaggcacaacacagctaacacaaggccccgcaggcaggactctgggacagacgcaggccagctgcccagagcccagaccaagcatggacgccgtggatgccaccatggagaaactccgggcacagtgcctgtcccgcggggcctcgggcatccagggcctggccaggtttttccgccaactagaccgggacgggagcagatccctggacgctgatgagttccggcagggtctggccaaactcgggctggtgctggaccaggcggaggcagagggtgtgtgcaggaagtgggaccgcaatggcagcgggacgctggatctggaggagttccttcgggcgctgcggccccccatgtcccaggcccgggaggctgtcatcgcagctgcatttgccaagctggaccgcagtggggacggcgtcgtgacggtggacgacctccgcggggtgtacagtggccgtgcccaccccaaggtgcgcagtggggagtggaccgaggacgaggtgctgcgccgcttcctggacaacttcgactcctctgagaaggacgggcaggtcacactggcggaattccaggactactacagcggcgtgagtgcctccatgaacacggatgaggagttcgtggccatgatgaccagtgcctggcagctgtgagcagctccggctcagccctgctgccctggcctgtcactccccacccctgccggagacctcccttccctgggccccttctctcctgggcagccacaccacagagcggggaggggcaggtgggggaatggaggctgcaggactggctagaccaggtccctgccggtccaccaggcggaggtgggacaaaggtcctaacaggagtcactggctcaggaccccagggagaaacgctctccccacccacgccatgctgaccagaggtcttgcagcccctgtggatgcccccgccgaggtcccccgatccccgcacccggactgctgctccctgcccctcccttgcgggtcccccaggaagccaggtgaccccaggtgggaggctgtgtgtggaggccatcctggaaggaagtttagacctgcccaggtgtggagcgaggggcacaggggcatcctaacctcagaaactgaaataaagcctttgaaaaaaaaatctgtaaaacatcaacccccaatcagaagatggcaaatggggaataaaaatagcaggtaacacgtc

SEQ ID NO: 1059 - DNA, 1166 bp, Homo sapiens
accccatctccagaggcaccttccactagcaacagtctccccaggcacaacacagctaacacaaggccccgcaggcaggactctgggacagacgcaggccagctgcccagagcccagaccaagcatggacgccgtggatgccaccatggagaaactccgggcacagtgcctgtcccgcggggcctcgggcatccagggcctggccaggtttttccgccaactagaccgggacgggagcagatccctggacgctgatgagttccggcagggtctggccaaactcgggctggtgctggaccaggcggaggcagagggtgtgtgcaggaagtgggaccgcaatggcagcgggacgctggatctggaggagttccttcgggcgctgcggccccccatgtcccaggcccgggaggctgtcatcgcagctgcatttgccaagctggaccgcagtggggacggcgtcgtgacggtggacgacctccgcggggtgtacagtggccgtgcccaccccaaggtcacactggcggaattccaggactactacagcggcgtgagtgcctccatgaacacggatgaggagttcgtggccatgatgaccagtgcctggcagctgtgagcagctccggctcagccctgctgccctggcctgtcactccccacccctgccggagacctcccttccctgggccccttctctcctgggcagccacaccacagagcggggaggggcaggtgggggaatggaggctgcaggactggctagaccaggtccctgccggtccaccaggcggaggtgggacaaaggtcctaacaggagtcactggctcaggaccccagggagaaacgctctccccacccacgccatgctgaccagaggtcttgcagcccctgtggatgcccccgccgaggtcccccgatccccgcacccggactgctgctccctgcccctcccttgcgggtcccccaggaagccaggtgaccccaggtgggaggctgtgtgtggaggccatcctggaaggaagtttagacctgcccaggtgtggagcgaggggcacaggggcatcctaacctcagaaactgaaataaagcctttgaaaaaaaaatctgtaaaacatcaacccccaatcagaagatggcaaatggggaataaaaatagcaggtaacacgtc

SEQ ID NO: 1060 - DNA, 3628 bp, Homo sapiens
acatgagcaggcagccccgactggaaggagcccggggccctcattccttctcctccactgggaactgagtggacgacccaccggagcccgtgtacgcgaacatagagaggcagccccgggccacttcaccgggcgccgctgcagccccccttcccagcccggtgtgggagacgcacacggacgcgggcaccgggcgcccctactactacaacccagacacgggagttaccacctgggagtcgccctttgaggctgccgagggtgccgccagcccagccacctcccctgcctcggtggacagccacgtgagccttgagaccgagtggggccagtactgggatgaggagagccgcagggtgttcttctacaacccgctgacgggcgagacggcctgggaggacgaggccgagaacgagcccgaggaggagttggagatgcagccgggcctgagccctggcagcccaggggacccgcggccccccactcccgagacggactaccccgagtcgctgaccagttaccccgaggaggactattctcccgtgggctctttcggtgagcccggccctacctctcccttgaccacaccccccggctggtcttgtcatgtcagccaggacaagcagatgctctacaccaaccacttcactcaggagcagtgggtgaggctggaggacccccacgggaagccatacttctacaatccagaggactcctctgttcgatgggagctgccccaggtccctgtccctgcccctcgaagcatccataaatccagccaggatggtgacaccccagcccaggccagccctccagaggagaaggtcccagcagagctggatgaggttgggagctgggaggaagtctctcctgccacagctgctgtgaggaccaagaccttggacaaggcaggggtgctccatcgcaccaagacggcagacaagggaaagcggctccggaagaagcactggagtgcctcctggactgtgctggagggtggcgtcctgacattcttcaaggactcaaagacctcggctgcaggcggcctgaggcagccttccaagttttccacccctgagtacacagtggagctgaggggggccactctctcctgggcccccaaagacaaatccagtaggaagaatgtgctggagctacggagccgagatggctctgagtacctgatccagcacgactcggaggccatcatcagcacctggcataaggccattgctcagggcatccaggagctgtccgcagagctgcccccagaggagagcgagagcagcagagtggacttcgggtcgagcgagcgcttgggaagctggcaggagaaagaggaggacgcgcgaccgaatgcagccgcgcccgccctgggccccgtgggcctggagagcgacttgagcaaggtccggcacaagctccgcaagttcctccagaggcggcccacactgcagtcgctgcgggagaagggctacatcaaagaccaggtgttcggctgcgcgctggccgcgctgtgtgagcgcgagaggagccgggtgccacgcttcgtgcagcagtgcatccgcgccgtcgaggcccgcgggctggacatcgacgggctgtaccgcatcagtggaaacctggccaccatccagaagctacgctataaggtggaccacgatgagcgccttgacctggatgacgggcgctgggaggacgtccacgttatcaccggagccctgaagctcttctttcgggagctgcccgagcccctcttccccttctcgcacttccgccagttcattgcggccatcaagttgcaggaccaggcccggcgcagccgctgtgtgcgtgacttggtgcgttcgctgcccgctcccaaccacgacactctgcggatgctcttccagcacctctgccgggtgatcgagcacggcgagcagaaccgcatgtcggtgcagagcgtggccattgtgttcgggcccacgctgctgcggcccgaggtggaagagaccagcatgcccatgaccatggtgttccagaaccaggtggtggagctcatcctgcagcagtgcgcggacatcttcccgccgcactgactgctggcctgtgactggggcggtggccgcggtcctgccacacaagctgggcggcggaggccacgcagccgggccttcttctctctgggaccctccgccagcgcatagccgcaggccggtgtgacttctgcaccctcggttctgagggtacggtgacccctagtgggcagtttgcaaaatgtgattccttcttcccaactccccatccccccttcccttcccgtcacgtcctgtttgggggttaattcggttttttctctgttgcatcgcgcctactgtgcgtgtgcgatagcgtgtgtgggggtgagagtttgttttctggaatggtaggtgctgggaggaggagtttgatggagggcttcctggctgcttctggccctcacctcgtggaggccttcacagagaccctgtgggccctggccctgtgctggcactgtgccagtcatgaggcagctctgatcacttccccactgtggaaacaggactgacccagccttcagtgtgggctgctgaagctatcctcctcaggcctcagggatgacctcctgcctgagcctctcacaggctggctgtgggccagtttcatctgctttcctgttgggggtcccgggcctctgctgtccttgacccactggtgttctgtgcaaggcttcttcccattcaccaagtgcacaccttgcatctgccgctcggcatgcaccagttccacacaccatcccattttacagacaaggacgctgaggcctgcagcagcagtgtgacttgcttaaggtccagtgagtgacctcattccccagaaaaggctcctcccacaccagagtacagcctgggtagggggaaaatcagttctttcagctaccacccatccaacctttgggcctatgtgaaaagaaaggaactaagctgggtgtgttctgtctggacctggggaggcccctgaaggcaaagagggaaactgtcccagctgttctgtcctaggggagggggacatagccctagcaggagctcccagcccctcttggcactctgacacacaagtacacccatctggggcccgctttgccacgaagagctgggcaggcctgcagggtgtggggagggaggacacaacctcaagaaaggaagcgtgaaccccagggaacagcgggtcccttccctcctcagacacaagccacctcagcttgtggctcttggcccccagccccaccaacccacctgttcatttattcaacagacaatgacagctgatatttattggacatttgcaccatgccaagcattcggcttggattatcccatttgtttctcacagccggtatttattgtctgctcctctgtgccaggtgctgtgctctgggcaggggcactgcatgggctgcctgccctggtggagcttgtggtctgatgggtgaggctgacccaagcccaccccattgccaacagggccagggcaagagtacacacaggggcctcataccatatgtctaaatatttaaaagttatcaatcaagctaacaactgttaaataaaatatgttctattctcct

SEQ ID NO: 1061 - DNA, 1967 bp, Homo sapiens
agcgaggcagcagtgcagctttcagagggtccgggctcagaggggttatgattcggagggttctgccgcacggcatgggccggggcctcttgacccggaggccaggcacgcgcagaggaggcttttctctggactgggatggaaaggtgtctgagattaagaagaagatcaagtcgatcctgcctggaaggtcctgtgatctactgcaagacaccagccacctgcctcccgagcactcggatgtggtgatcgtgggaggtggggtgcttggcttgtctgtggcctattggctgaagaagctggagagcagacgaggtgctattcgagtgctagtggtggaacgggaccacacgtattcacaggcctccactgggctctcagtaggtgggatttgtcagcagttctcattgcctgagaacatccagctctccctcttttcagccagctttctacggaacatcaatgagtacctggccgtagtcgatgctcctcccctggacctccggttcaacccctcgggctacctcttgctggcttcagaaaaggatgctgcagccatggagagcaacgtgaaagtgcagaggcaggagggagccaaagtttctctgatgtctcctgatcagcttcggaacaagtttccctggataaacacagagggagtggctttggcgtcttatgggatggaggacgaaggttggtttgacccctggtgtctgctccaggggcttcggcgaaaggtccagtccttgggagtccttttctgccagggagaggtgacacgttttgtctcttcatctcaacgcatgttgaccacagatgacaaagcggtggtcttgaaaaggatccatgaagtccatgtgaagatggaccgcagcctggagtaccagcctgtggaatgcgccattgtgatcaacgcagccggagcctggtctgcgcaaatcgcagcactggctggtgttggagaggggccgcctggcaccctgcagggcaccaagctacctgtggagccgaggaaaaggtatgtgtatgtgtggcactgcccccagggaccaggcctagagactccgcttgttgcagacaccagtggagcctattttcgccgggaaggattaggtagcaactacctaggtggtcgtagccccactgagcaggaagaaccggacccggcgaacctggaagtggaccatgatttcttccaggacaaggtgtggccccatttggccctgagggtcccagcttttgagactctgaaggttcagagcgcctgggccggctattacgactacaacacctttgaccagaatggcgtggtgggcccccacccgctagttgtcaacatgtactttgctactggcttcagtggtcacgggctccagcaggcccctggcattgggcgagctgtagcagagatggtactgaagggcaggttccagaccatcgacctgagccccttcctctttacccgcttttacttgggagagaagatccaggagaacaacatcatctgagcatgtgtgctctgcactggctccactggcttgcatcctggctgtgttcacagccttgtttgctgcttccatcttccccagtactgtgccaggccttctccccctccccagtgtcctctcctctcaggcaggccattgcacccatatggctgggcaggcacaggcagtgaggccgaggccaatagcgagtgatgagcgggatcctaggactgatctgtagcccatgctgatgtcacccaccagggcaatccatctggaggcctgagcaccctggcccaggactggcttcatcctggcactgaccaggaaagactgcctctgaccctcttagcagacagagcccaggcatgggagcactctggggcagcctggctcaggtttattgattttcgtctgtttaccctatccattaatcaatacatgtaattaactccttccctccaaaaaaaaaaaaaaaaa

SEQ ID NO: 1062 - DNA, 5227 bp, Homo sapiens
gctcctcctccgctccgccagtgtccggccgcgggccggccttagtgactggggcggcgggccccggggccgcggcgtggggcgggcaggcggacgccggccgcgggctgctttcgtcggctcccaagctctcccggagcgagcagccgcccgcgagccgccgcggagcctcctcgcccgctcccgccggcgagcaagatgatgtgcgaggtgatgccgaccatcagcgaagcagaaggcccccctggaggaggtggaggccatggttccggctccccttcacagccagatgcagattcacattttgaacagttgatggtctccatgctagaagaaagggaccgccttcttgatacactgagagagactcaagaaacgctggccttaacccaggggaagttacacgaggttggtcatgaaagagattccttgcagagacagctcaacacggcacttccacaggagttcgcagcacttactaaagaactcaatgtatgcagggaacagctccttgaaagggaagaagaaattgctgaactgaaagcagaaaggaataacaccaggctgctgttagagcatttggaatgccttgtctccaggcatgagcggtctcttaggatgaccgtggtgaagagacaagcgcagtctccagcaggcgtgtccagcgaagtggaagtgctgaaagcactgaagtccttatttgaacaccacaaagctctggatgaaaaggtgagagagcgattacgagtagcacttgaaagatgtagtttgttagaagaggaattaggtgccacacacaaagagctaatgattcttaaagaacagaataatcagaaaaaaactctaacagatggagtgctggacataaaccatgaacaagaaaatacaccaagcacgagtggaaagagatcttctgatggttctttaagccacgaggaagaccttgctaaagtaattgagctccaagaaatcataagtaagcagtcaagggaacagagccaaatgaaagaacgcctggcttccctttccagtcatgtgacagaactggaagaggatctggacacggctagaaaagatctcatcaaatctgaagaaatgaacacaaaattgcaacgagatgtccgtgaagccatggcccaaaaggaagatatggaagagagaatcactactcttgaaaaacgctacctcgctgcacagcgtgaagccacatctgtgcatgacctcaatgataaacttgaaaatgaaattgcaaataaagattctatgcatcgacagactgaagataaaaaccgccagttacaggagcgcttggaattggcagagcaaaagctgcaacagacactgaggaaggcagagacgctcccggaggtggaggcggagctggcccagagggtggcagcgctttccaaggctgaagagagacacggcaacattgaagaaaggttacgacagatggaagcacagttggaggagaagaatcaagaactgcagcgggcaaggcaaagagaaaaaatgaacgaagaacataataaacgtttatcagacactgttgacaagctgctttcagaatctaatgagaggcttcaacttcatcttaaagagagaatggctgctttggaagataagaactctcttttaagagaagttgaaagtgcaaaaaagcagttagaagaaacacaacacgataaggatcagcttgtcctaaacattgaagcactgagggctgaactagaccacatgagactaagaggtgcttcacttcatcatggccgaccccacttgggcagtgtcccagatttcaggttccccatggcagacggccacacagactcctacagcaccagtgcagtgctgcggcgcccacagaaaggccggctggcagccctgcgagatgagccttccaaggtacaaactcttaatgagcaggattgggaacgtgcccagcaagctagtgtcttggcaaatgtagcacaagcattcgagagtgatgctgacgtgtctgatggtgaagatgacagggacactctcctcagctcagttgacctgctatcgcccagcgggcaggccgacgcgcacacactagccatgatgcttcaggagcagctggacgccatcaacaaagagatcaggttgattcaggaagaaaaagaaaatacagagcagcgggcagaggagattgaaagtcgagttggcagtggaagtctagacaatcttggtcgttttagatcaatgagctccattcccccctaccctgcttcctcgcttgctagctcctcccctccgggcagtgggcgctccaccccacgaaggatccctcacagcccagctcgggaagtggacagactgggcgtcatgacccttttgccaccttccagagaagaggtacgagatgacaagacaaccataaagtgtgaaacctccccgccttcctccccgagagcccttcggttagaccggctgcacaaaggggcgctgcacaccgtcagccacgaggacatcagggacataaggaactccacaggctcccaggatggtcccgtgagcaaccccagcagtagcaacagtagccaggactcgctccacaaagccccaaagaagaaaggcattaagtcctccattggccgcttgtttggcaagaaagaaaagggccgacctggacaaactggcaaagaagcattaggacaagctggtgtttccgagacggataactcatctcaggatgccttgggacttagcaaattggggggacaggctgaaaaaaatcgtaaacttcaaaaaaagcatgaattgctggaggaagcccggagacaaggtttaccttttgcccaatgggacgggccaacggttgtggtctggctagagctctgggttgggatgccagcctggtatgtggctgcctgccgagcaaacgtgaaaagcggggccatcatgtcggccctgtccgacacagagatccagcgtgagattggcatcagcaaccccctgcacaggctgaagctgaggctggccatccaggagatcatgtcgctgaccagcccgtctgccccgcccacatctagaacgacactcgcctatggggacatgaaccacgagtggatcggcaacgagtggctccccagcctgggcctcccccagtaccgcagctacttcatggagtgccttgtagacgccaggatgctggaccacttgaccaagaaagaccttcgagggcagctgaaaatggtcgacagttttcacagaaacagtttccagtgtggaattatgtgcctgagaaggttaaattatgaccggaaagaactggaaagaaaaagagaagaaagtcagagtgaaataaaagacgtgcttgtttggagcaatgatcgagtgattcgctggatcctgtcaattggccttaaagaatatgcaaacaatcttatagagagtggtgttcacggagcacttctggccttagatgaaaccttcgacttcagtgcactggcactgctgttacagatcccgacgcagaacacacaggctcgtgctgtcttggaaagagaatttaacaaccttttggtcatggggactgatagaaggtttgatgaagatgatgataaaagctttaggagagcaccttcatggagaaaaaagtttagaccaaaggacattcgtggcttagctgctgggtcagcagagactctccctgcaaacttccgggtgacttcttctatgtcttccccctctatgcagccaaagaagatgcagatggacggcaatgtatcaggaacacagaggttggattctgctacagtcaggacttactcctgctaaagtctcctgttgtttacccacactacttctacagatgattatgcagcatttgaatccaacaaagactacattttggaatccagtggaatctttaatcttgttaatacttgttatatggaccctaagatattttattacagagtttttaattagtgaaaaattcatgaataccatagagaaaatattttagaatttaatgtttcttatatttatgtaaacttatgactcttcatttatatagttacttactttttcatgtatatccaggctataaatatcctttcaaatcatgttcttatacctaattttagtctttcaaatgaatgtactgtaatgcttgtatgtataaatcctatgaatagagggcttttgtaaattatgcatttattgtaattatcattaattttttaatgataaaccatgacaaaggattttacgtttataaaattatgacagaagccatgtgcattatcctttacggacgcagcctagctctacagcaatcatcctgaaataagcatacctaatttcaagcaattgttgtattttcatgactgaccttaactgtactttttctagcaagagatgctttattctgcagcatgaacagatttaaaatggctggtgttaaatatcagctcctaataagatgtggactgaaaacactatcacaacactatgagaagcccctagcactggttaacgctttcctagcctagtctctggatttggggagcttgtcttcagtggctgagactgtgagctgggagcagttctctcagctggagagactcgggatggggtaacctggggaccagtctagcccctgcaccctcttccctgcctctgctccttgggagcgggtggagagacacccatgtggctccccttagggccagcaccaagcaccacgctctcatcctgcaagtcggcgcacacagtggatgaaggcaggagacccagaaagcagtgcagtgcagctctaataaaggccttatttttcttatgtaaatcatctttttacatttgtttgtaaacatgtttaaagaacgaacctagtgggacatttttagactttgatgctctagccattttggattgtgtaagttgcagatgtggcttttactttttaaatggcatattaacaagccagcaaagtgtgtcagaccatggcgtggtatttattgtgcagcagatccagagacagaggcagcctgtcttttcagttggtttctgcttttaatttacttgtacaattcattgttactgttctgtttttctattaatcttttgtcaacttcctgattatgtaacaaagtatgtacagtctacttttgaactatttttatcacagtattatttattgctttctttcaataaagtactgaagcattttccactgccaaaaaaaaaaaaaaaa

SEQ ID NO: 1063 - DNA, 3945 bp, Homo sapiens
gctcctcctccgctccgccagtgtccggccgcgggccggccttagtgactggggcggcgggccccggggccgcggcgtggggcgggcaggcggacgccggccgcgggctgctttcgtcggctcccaagctctcccggagcgagcagccgcccgcgagccgccgcggagcctcctcgcccgctcccgccggcgagcaagatgatgtgcgaggtgatgccgaccatcagcgaagcagaaggcccccctggaggaggtggaggccatggttccggctccccttcacagccagatgcagattcacattttgaacagttgatggtctccatgctagaagaaagggaccgccttcttgatacactgagagagactcaagaaacgctggccttaacccaggggaagttacacgaggttggtcatgaaagagattccttgcagagacagctcaacacggcacttccacaggagttcgcagcacttactaaagaactcaatgtatgcagggaacagctccttgaaagggaagaagaaattgctgaactgaaagcagaaaggaataacaccaggctgctgttagagcatttggaatgccttgtctccaggcatgagcggtctcttaggatgaccgtggtgaagagacaagcgcagtctccagcaggcgtgtccagcgaagtggaagtgctgaaagcactgaagtccttatttgaacaccacaaagctctggatgaaaaggtgagagagcgattacgagtagcacttgaaagatgtagtttgttagaagaggaattaggtgccacacacaaagagctaatgattcttaaagaacagaataatcagaaaaaaactctaacagatggagtgctggacataaaccatgaacaagaaaatacaccaagcacgagtggaaagagatcttctgatggttctttaagccacgaggaagaccttgctaaagtaattgagctccaagaaatcataagtaagcagtcaagggaacagagccaaatgaaagaacgcctggcttccctttccagtcatgtgacagaactggaagaggatctggacacggctagaaaagatctcatcaaatctgaagaaatgaacacaaaattgcaacgagatgtccgtgaagccatggcccaaaaggaagatatggaagagagaatcactactcttgaaaaacgctacctcgctgcacagcgtgaagccacatctgtgcatgacctcaatgataaacttgaaaatgaaattgcaaataaagattctatgcatcgacagactgaagataaaaaccgccagttacaggagcgcttggaattggcagagcaaaagctgcaacagacactgaggaaggcagagacgctcccggaggtggaggcggagctggcccagagggtggcagcgctttccaaggctgaagagagacacggcaacattgaagaaaggttacgacagatggaagcacagttggaggagaagaatcaagaactgcagcgggcaaggcaaagagaaaaaatgaacgaagaacataataaacgtttatcagacactgttgacaagctgctttcagaatctaatgagaggcttcaacttcatcttaaagagagaatggctgctttggaagataagaactctcttttaagagaagttgaaagtgcaaaaaagcagttagaagaaacacaacacgataaggatcagcttgtcctaaacattgaagcactgagggctgaactagaccacatgagactaagaggtgcttcacttcatcatggccgaccccacttgggcagtgtcccagatttcaggttccccatggcagacggccacacagactcctacagcaccagtgcagtgctgcggcgcccacagaaaggccggctggcagccctgcgagatgagccttccaaggtacaaactcttaatgagcaggattgggaacgtgcccagcaagctagtgtcttggcaaatgtagcacaagcattcgagagtgatgctgacgtgtctgatggtgaagatgacagggacactctcctcagctcagttgacctgctatcgcccagcgggcaggccgacgcgcacacactagccatgatgcttcaggagcagctggacgccatcaacaaagagatcaggttgattcaggaagaaaaagaaaatacagagcagcgggcagaggagattgaaagtcgagttggcagtggaagtctagacaatcttggtcgttttagatcaatgagctccattcccccctaccctgcttcctcgcttgctagctcctcccctccgggcagtgggcgctccaccccacgaaggatccctcacagcccagctcgggaagtggacagactgggcgtcatgacccttttgccaccttccagagaagaggtacgagatgacaagacaaccataaagtgtgaaacctccccgccttcctccccgagagcccttcggttagaccggctgcacaaaggggcgctgcacaccgtcagccacgaggacatcagggacataaggaactccacaggctcccaggatggtcccgtgagcaaccccagcagtagcaacagtagccaggactcgctccacaaagccccaaagaagaaaggcattaagtcctccattggccgcttgtttggcaagaaagaaaagggccgacctggacaaactggcaaagaagcattaggacaagctggtgtttccgagacggataactcatctcaggatgccttgggacttagcaaattggggggacaggctgaaaaaaatcgtaaacttcaaaaaaagcatgaattgctggaggaagcccggagacaaggtttaccttttgcccaatgggacgggccaacggttgtggtctggctagagctctgggttgggatgccagcctggtatgtggctgcctgccgagcaaacgtgaaaagcggggccatcatgtcggccctgtccgacacagagatccagcgtgagattggcatcagcaaccccctgcacaggctgaagctgaggctggccatccaggagatcatgtcgctgaccagcccgtctgccccgcccacatctagaacgacactcgcctatggggacatgaaccacgagtggatcggcaacgagtggctccccagcctgggcctcccccagtaccgcagctacttcatggagtgccttgtagacgccaggatgctggaccacttgaccaagaaagaccttcgagggcagctgaaaatggtcgacagttttcacagaaacagtttccagtgtggaattatgtgcctgagaaggttaaattatgaccggaaagaactggaaagaaaaagagaagaaagtcagagtgaaataaaagacgtgcttgtttggagcaatgatcgagtgattcgctggatcctgtcaattggccttaaagaatatgcaaacaatcttatagagagtggtgttcacggagcacttctggccttagatgaaaccttcgacttcagtgcactggcactgctgttacagatcccgacgcagaacacacaggctcgtgctgtcttggaaagagaatttaacaaccttttggtcatggggactgatagaaggtttgatgaagatgatgataaaagctttaggagagcaccttcatggagaaaaaagtttagaccaaaggacattcgtggcttagctgctgggtcagcagagactctccctgcaaacttccgggtgacttcttctatgtcttccccctctatgcagccaaagaagatgcagatggacggtatgtgatgggtcacactaacctgtcacttgttgggagcatgagcagctttctgtctggaacattaataatgatctaaaacggcctatttaatatgttacaaggcacttgagtatggttgcatgtccaaatataaatgtttttaaattaactctaacatttgtttataaaagtttaaccataataatagaattttt

SEQ ID NO: 1064 - DNA, 4645 bp, Homo sapiens
ccgcggcggagccagaggctgcaggaagagcccgcgggggcccggagggtgcgattcctcggcccccgcaaaacaatgtgtgttgtgagccaggacgcaacttgccggaggcggcgggggcgcgccgagcccgcctgagaccgcgctgaccttctccccccgccgtccgttgggcccgagcgcccagctcctcgctccccagttcgcgggggccgggccgagccgcggggcggggccgcccctccgtcgccgctgcctcctcccccacccccagccgcggaggatgcggacggcccccggcggcgtctagcggccccgggcccaggcgcgatggtgcagcagcggggcgcgagggccaagcgggacggcgggccgccgcccccgggacccgggccggccgaggagggggcgcgcgagcccggctggtgcaagaccccgagcggccacatcaagaggccgatgaacgcattcatggtgtggtcgcagcacgaacggcggaagatcatggaccagtggcccgacatgcacaacgccgagatctccaagcgcctgggccgccgctggcagctgctgcaggactcggagaagatcccgttcgtgcgggaggcggagcggctgcggctcaagcacatggcggattacccggactacaagtaccggccgcgcaaaaagagcaagggggcgcccgccaaggcgcggccccgcccccccggtggtagcggtggcggcagccggctcaagcccgggccgcagctgcctggccgcgggggccgccgagcagcgggagggcctttggggggcggggcggcggcgcccgaggacgacgatgaagacgacgacgaggagctgctggaagtgcgcctggtcgagaccccggggcgggagctgtggaggatggtcccggcgggacgggccgctcggggacaagcggagcgcgcccaagggccgtcgggcgagggggcggccgccgccgccgccgcctccccgacaccgtcggaggacgaggagccggaggaagaggaggaggaggcggcagcggctgaggaaggtgaagaggagacggtggcgtcgggggaggagtcgctgggctttctgtccaggctgccccctggcccggccggcctggactgcagcgccctggatcgcgacccggacctgcagcctccctcgggcacgtcgcacttcgagttcccggactactgcacccccgaggttaccgagatgatcgcgggggactggcgcccgtctagcatcgcagacctggttttcacctactgagcccaccgtcagcggggcgcgcacgcccccaaaccagctgtttacatacaggaatcaggtattggggcccctcggaggccgaggctggcaccccatctcccgcgcagcctgccccctcctggacgtgcccatcccccctcagatccagacatgcccctcccccgcagacacaccccaaggcagcccaacccccaccccttccccgacacccaagcccctccccacgtcgccccctcctgcacagccaccagcagccagccccctccgatacacctcccgtcctctcctacagacctgcacccctccccccttttgcacacgcccctcctcgtggccggaggacccgccccctcctttgctccggaatctctcctccctcgcccggcccgccttctctgggttaggggggcgatgcggccgggtggcaacgcacgcgcctcctgcgcccctcccttccctggggggaggggcgcaccccttttatccccggagcgctagggcccgcccctccgctggggcccacccccttcgtgcgcatgcttaatgcttctggggaggagggggctggtcccagcggagccgcactcttcgcccgctccgggcaaaagcgggggcgagtgtagagcgatcctgggaaatcctttgatccgggagccctaggtttcctctccagccaacggggcgtcgctgccttaatgggaggagcactcggaagggttggtttgggcctgaaactctcccaagtggcatagccccttttccggtatggggtctcctacacccacgcgcaccacctctccggtcgcgtggctgcctctacagcctacctatacgtccctttttccccccaactgggaattgagaggtaaggtctttctctggaaatccagcagtagaggaagggaccacccaagaaaactaaaaaccaaggcaccttaccagtctgtctggggacaggatccctgctgcaccttccccaccccctcctgggaagtgccccctcacctcagggcacccgcaacctgggctcctccctgagcgcaccggcccttcctgtcacccaggtccaccctcagtactcaagctgcagtatacagcgggaaaaactgaggcactttggtgctaggggtttgggactgaggcgtggagagcagatgtgatggcaggaagactctcgcttttaaacatctggtttgggagagaccatcgacttggccagtgagactgagaatggattccgagtagtgatgggccgtttgcacctcggtttttccacgtgagaaatggggagaacgctgctgttaggaggaagttgtgtccagttcagggtgccctcgggagccctgtccctgttgctgtggcccctctcacgccgccatctctctgccccgccccgcccctccggcctccccacaccccccttgccctcactacctgtatctcaccggcgtgtgttcaccctcccgggtggctcacacactctcattcacacacacaaatctcaggaacaaacggtcccagagtcctccggacccctgcccagggtctctgcaggtctctgccccacgcgttcccgtcgctgacaaagccaccagctgcctcctttaagcttggtgctccggctctgggcctttcttgcgctctattttttttttttttttttttaagaaaaacaacaacaacaaaaaaagacaatgaaaaaaaaaacgtcatgtgagtgaagagatgtcactgtctgtggtcttggagaactagtctcgtagctgaggggtggggtccctctgtctggggcactggcacccacagcaggactccgccagtctgatgccaggactgaataaagtgtatttgccccgaccttgccctgtggttctgcatgtctgtgctcttcctcaaccctccctaaacagtttgccagattcaagtccgtgtgatttgggcccgagctgggtgtcccagggcaagccaccttgcctgtctaggcctctatgtcaggactccctggccttcatgaagaatagcaaactcatccctgtagggaccaggcaggtaacatagacgagtgactctgggtggacagtggtgtcatgacccacttcaaggggcctacctcctgccagttgtgaccctgtgggaatgcagtccacagtggccaggtggccagatttttcaagaaaagctggatggatgtttctgagtcatcttaatttcaaaatgagactcatattttaaaatttctgtgggccaaatgaaacaagtatgcaggcaggtctggtccgagggggctggcttggccatgcctttctgtgcctttaatgaggactaagaagcaagattgggccacactgtctggactcaaagcccagctccaccactgagcacccgtgtgactctttccatatgtataacgtggggataataataatagctgcttcacaggatgaaatgaagtttgaggtgagaagcattcaccatggtgcccatcgtgttactccattgtcagaggaggaaacggggtcaggcaggaaagcaacttaaaggagggcctgcaagcagccagggtcagagacagggcttggttctgcttcctggtgaagcatggcttcggggtgctgcctctccctccctgtttgaatctgcagattgtgttaggcccccagctgagggcctggagtggtgggattggtcccagtgcctggcgcacattggcctgcagagtagattaactgaatgaccaaagagcaacagaagtctagtgattcttgtctttgaggttctgactggtgttttacaactgagtccaaggcttttccctcctttgtccctctgacacccctccccctaattctcatctgtcagatccagtgtattcctaagctgggacaaagcctctgttttcccagtaggagccagggctgagtgtggaaattacagtgactgcttcttctcagcttctctggttgaaagcaagctggcgaagtaagaggaggtagagttgagaaggtgtggaagatagggacagctgcccccagaactcccttcaagggaggacttccccagctatgggaagtgccatcagggtggccgcagctgcagagagccacttcacctgagaccacgcccttcctggggcagcctgtatctggtgtctgagtgaggcatggtataaacacctggtcatttcaatccaacatgggacggacactgacagacagtactcccagcaggcccaggccagccagggcttcgtcaggcctgcagcacaatttgacttcctatgcccaggcctgcttcctcttcttcctcttcttttcacaggtgcttattcctaataaacatcttgcaacccaaaaaaaaaaaaaaaaaa

SEQ ID NO: 1065 - DNA, 2328 bp, Homo sapiens
gtttctgtcgcaggctgcgaggaaaggcccctaggctgggtctgggtgcttggcggcggcggcttcctccccgctcgtcctccccgggcccagaggcacctcggcttcagtcatgctgagcagagtatggaagcacctgactacgaagtgctatccgtgcgagaacagctattccacgagaggatccgcgagtgtattatatcaacacttctgtttgcaacactgtacatcctctgccacatcttcctgacccgcttcaagaagcctgctgagttcaccacagtttcatcctacaaaatgggcgtaacaatgtctacctactccattgtgtggaccaaaggagatggttaatgtgaaagccctttgtgaacctgaagtgagcaactgctggatgaatgtcattacgggcacaggctctgtgtcatctcctctcctagtgcttccacagccaggaccagagacctccctgatgactggggaacctgtggatgatgaagatgccaccgtcaacaagattgcgctcgagctgtgcacctttaccctggcaattgccctgggtgctgtcctgctcctgcccttctccatcatcagcaatgaggtgctgctctccctgcctcggaactactacatccagtggctcaacggctccctcatccatggcctctggaaccttgtttttctcttctccaacctgtccctcatcttcctcatgccctttgcatatttcttcactgagtctgagggctttgctggctccagaaagggtgtcctgggccgggtctatgagacagtggtgacgttgatgctcctcactctgctggtgctaggtatggtgtgggtggcatcagccattgtggacaagaacaaggccaacagagagtcactctatgacttttgggagtactatctcccctacctctactcatgcatctccttccttggggttctgctgctcctggtgtgtactccactgggtctcgcccgcatgttctccgtcactgggaagctgctagtcaagccccggctgctggaagacctggaggagcagctgtactgctcagcctttgaggaggcagccctgacccgcaggatctgtaatcctacttcctgctggctgcctttagacatggagctgctacacagacaggtcctggctctgcagacacagagggtcctgctggagaagaggcggaaggcttcagcctggcaacggaacctgggctaccccctggctatgctgtgcttgctggtgctgacgggcctgtctgtgctcattgtggccatccacatcctggagctgctcatcgatgaggctgccatgccccgagtcatgcagggtacctccttaggccaggtctccttctccaagctgggctcctttggtgccgtcattcaggttgtactcatcttttacctaatggtgtcctcagttgtgggcttctatagctctccactcttccggagcctgcggcccagatggcacgacactgccatgacgcagataattgggaactgtgtctgtctcctggtcctaagctcagcacttcctgtcttctctcgaaccctggggctcactcgctttgacctgctgggtgactttggacgcttcaactggctgggcaatttctacattgtgttcctctacaacgcagcctttgcaggcctcaccacactctgtctggtgaagaccttcactgcagctgtgcgggcagagctgatccgggcctttgggctggacagactgccgctgcccgtctccggtttcccccaggcatctaggaagacccagcaccagtgacctccagctgggggtgggaaggaaaaaactggacactgccatctgctgcctaggcctggagggaagcccaaggctacttggacctcaggacctggaatctgagagggtgggtggcagaggggagcagagccatctgcactattgcataatctgagccagagtttgggaccaggacctcctgcttttccatacttaactgtggcctcagcatggggtagggctgggtgactgggtctagcccctgatcccaaatctgtttacacatcaatctgcctcactgctgttctgggccatccccatagccatgtttacatgatttgatgtgcaatagggtggggtaggggcagggaaaggactgggccagggcaggctcgggagatagattgtctcccttgcctctggcccagcagagcctaagcactgtgctatcctggaggggctttggaccacctgaaagaccaaggggatagggaggaggaggcttcagccatcagcaataaagttgatcccagggtttgctttgttttttt

SEQ ID NO: 1066 - DNA, 4631 bp, Homo sapiens
gccagaggagcggctccggccgccgcgcctgacccttgtccggggtcttccgcacagtgggctgagggccatgtcagttttctgccacctacaggatagaccatgaagctgaaggaacttgagcggccagctgtccaggcatggagcccagccagccaataccctttgtatctggccacaggaacatctgcccaacagctagattcctccttcagcacaaatggcacattggaaatatttgaggttgatttcagggacccttctctggacttgaaacacagaggagtcctttctgccttgagcaggtttcacaagctggtctgggggagctttggcagtgggcttctggaaagctccggggttattgttggcggcggggacaatggcatgcttattctatacaatgtgacccacatcctgtcttcggggaaggagcctgtgattgctcagaaacagaagcacacgggggctgtcagagccctcgacttgaatcctttccagggcaacctcctggcttcaggggccagcgattctgaaatcttcatttgggatctgaataacttgaatgtgccaatgaccctgggatccaagtcacagcagcctccagaggacatcaaggcactgtcttggaaccggcaagcccaacacattctgtcttctgctcaccccagtggcaaggcagttgtgtgggatctcaggaagaatgaacctatcatcaaagtcagtgatcacagcaacaggatgcactgctcaggcctggcctggcatcctgacatagccacccagttagtgctgtgctcagaggatgatcgacttcccgtgattcagctgtgggacttgcgctttgcctcctcgcccttgaaggtgctggagagccacagcagggggatcttgtcagtgtcatggagccaggctgatgctgagctgctgctcactagtgctaaggacagccagatcttgtgccggaacctggggagcagtgaggtggtatataagctaccaacacagagcagctggtgctttgatgtgcagtggtgccctcgggacccttcagtgttctctgctgcctccttcaacggctggatcagtttgtactctgtgatgggtaggagctgggaagtccagcatatgagacaggctgacaagatctcctcttccttcagcaaaggccagcctctcccaccactgcaggtgccagagcaagtggcacaagcaccactgatacctcccctgaaaaaaccccccaaatggattagaagaccaacaggtgtttcatttgcttttggagggaagctggttacttttggcctccccagcacccctgcccatctggtgccacagccttgcccccgcctagtcttcatcagtcaagtcaccacagaatctgaattcctgatgcgatcagctgagctgcaggaggccttgggatcaggaaatctactgaattactgtcagaacaagagccagcaagctttactgcaaagtgaaaagatgctgtggcagttcctgaaggtgaccttagagcaagactccagaatgaaattcctaaagcttttaggatacagtaaagatgagcttcagaagaaggtggccacatggttgaagagtgacgtggggctaggtgagagtcctcagcccaagggaaatgacctcaacagtgacagacaacaggccttctgcagccaggcctccaaacacaccacaaaggaagcctctgcttcctcagccttctttgatgagctggtccctcagaacatgactccttgggagatccccatcacaaaagatattgatggactcctaagccaggctctcctgcttggggaactgggtccggccgtggagctgtgtctgaaggaggagcgctttgctgatgccattatcctggcccaggctgggggtacagatctgctgaagcaaacacaggagcgctacttggccaagaagaaaaccaaaatctcctcgcttctagcctgtgttgtgcaaaagaattggaaggatgtggtgtgtacctgtagcctgaagaactggagagaggcactggctttgctactgacatactcaggcacagagaaatttcccgagctctgtgacatgctgggaactcgcatggaacaggagggcagcagggcactaacctccgaagccagactctgttatgtgtgctcagggagtgtggagcggctggtggagtgctgggcaaaatgccaccaggctttgtcccccatggctctgcaggacctgatggagaaggtgatggttcttaacaggagcttggagcaactgcggggtcctcatggggtgagcccaggccctgccacaacctacagggtcactcagtatgccaacctcctggcagcccagggcagcctggccactgccatgagctttctacccagggactgtgctcagccaccagttcagcagctaagagatcggctttttcatgctcaaggttctgctgtcttgggccaacagtctccccctttccccttcccccggattgttgtgggagctaccctccactctaaagagacatcatcttacagattgggatcccagccttctcaccaggtcccaactccatctccaaggccaagggttttcacccctcagtcatcaccagcgatgcccttggcaccttcccatcctagcccttatcagggtcccaggacacagaatataagtgactacagggcacctgggccccaggccatccagcctttgcctttgagccctggggtaaggcctgcttcatctcagccacagctattaggagggcaaagggtgcaagttcctaacccggtgggattccctgggacatggcctcttcctggttcccctctacccatggcatgcccaggcatcatgcgacctggctctacctccctgcctgagactcctagactgttccctctgcttcctctgagaccactaggtcccggccgcatggtctcccacaccccagcccctcctgcaagcttccctgtgccataccttccaggggacccaggtgccccatgctctagtgtcctcccaaccactggcatcttgactcctcacccaggacctcaagattcctggaaagaagccccagcccccaggggaaacctccagaggaacaagctgccagagacatttatgcccccagcaccaattactgctccagttatgagcctcacccctgagctacaagggattcttccctcacagccccctgtctccagtgtgagtcatgctcccccaggagttccaggagaactcagcctgcagcttcagcacctgccacctgagaagatggaaaggaaggagctgcccccagagcatcagtccttgaagagcagctttgaggcgcttctccaacgctgctccctgtctgcaactgacttaaagacaaaaaggaagctggaagaggcagcccagcgtctggagtatctatatgagaagctctgtgaggggacactctcacctcatgtcgtggctgggctccatgaggttgcccgatgtgtggatgcaggaagctttgagcagggccttgcagtgcatgcccaggtggcgggctgtagcagcttcagcgaggtgtccagcttcatgcctatcctgaaggctgtcctcatcatcgctcataagctgctggtctaaaccaggcagcctctcttgctaggaggccacttctgctgttacataactcctccctgcagaagaggggacttctgcaacagattctgtttctttttcccgactcttttccttgctgccaggtatgtgatgctgtaggcttggctccaaaccagctgagtgcctgctttttactcctttatgtctggccttctaggatctgtccaagacactctcaggcctggaggcagggcatagaatcagttcttcactctccctaatactacactctgtaaggacctggggcaggatatcttctcccccagggatcttctatttaagtggcttctgagagggtgaacaggattgttacttttaagcctacctctgctgtgacccatcatgtgggtcttttgtttctcccttctgtggtttatgagcctgcccttaccttttccctgcctctgacttggtatttccaggtccgtatttctctgtagcccagggtctggggtagagctgactgctgttcaccctttgaacaactcatggacgtgagggatgggtgctgagcagaaccaagagaggaaactttggcgctgttaaaatggaatttctcatctgccggcattattaagggtgggctaggttggatggaaggtgaaagggatgaactgccttttgctggaagctgtcttaggctgtgagacaggagcaggggaaccacagcctatggggaactgcccttgactccacctatgttggagccttagcccaaggccattccttctgtgatgataaagcccagttctggaattggagccatattaaggaatgattctcttccagcgctgctcctcaagggttgggggtccttctccctcgcagccaccacatgtctcagggctaccttctccgattggatttgcatttgtggcactgtctttgatgcagtgatgtacttaatggtgcaataaagctgcttcgatttggtaaaaaaaaaaaaaaaaaaa

SEQ ID NO: 1067 - DNA, 4895 bp, Homo sapiens
gccagaggagcggctccggccgccgcgcctgacccttgtccggggtcttccgcacaggatagaccatgaagctgaaggaacttgagcggccagctgtccaggcatggagcccagccagccaataccctttgtatctggccacaggaacatctgcccaacagctagattcctccttcagcacaaatggcacattggaaatatttgaggttgatttcagggacccttctctggacttgaaacacagaggagtcctttctgccttgagcaggtttcacaagctggtctgggggagctttggcagtgggcttctggaaagctccggggttattgttggcggcggggacaatggcatgcttattctatacaatgtgacccacatcctgtcttcggggaaggagcctgtgattgctcagaaacagaagcacacgggggctgtcagagccctcgacttgaatcctttccagggcaacctcctggcttcaggggccagcgattctgaaatcttcatttgggatctgaataacttgaatgtgccaatgaccctgggatccaagtcacagcagcctccagaggacatcaaggcactgtcttggaaccggcaagcccaacacattctgtcttctgctcaccccagtggcaaggcagttgtgtgggatctcaggaagaatgaacctatcatcaaagtcagtgatcacagcaacaggatgcactgctcaggcctggcctggcatcctgacatagccacccagttagtgctgtgctcagaggatgatcgacttcccgtgattcagctgtgggacttgcgctttgcctcctcgcccttgaaggtgctggagagccacagcagggggatcttgtcagtgtcatggagccaggctgatgctgagctgctgctcactagtgctaaggacagccagatcttgtgccggaacctggggagcagtgaggtggtatataagctaccaacacagagcagctggtgctttgatgtgcagtggtgccctcgggacccttcagtgttctctgctgcctccttcaacggctggatcagtttgtactctgtgatgggtaggagctgggaagtccagcatatgagacaggctgacaaggtttgaagggcttggtagagaatgctggagggaaggggctgtctctgtttgtgggagagagacatatggcttgagaagcggagatattggagattgggagaccagggcccggggtttgggagggctgcacctttgccctagtgcccatcttcctgaaaggatgttagtttctgccacaatgtgaagaaggccttcaccttgactcttgttattggatgggccctgtagtatttcagggaccgtgggacccctttgctgggacagttatttcaagagtatgactcttatctttctctcttctatagatccattttgtgccacactccattgtagactttgaatgtagtagtctttccaagagcctacttgcatgggagtcccaccctcgctaccactcacttccccatcccctggaatatgggagtctgacctttctaggtcaaattgggtgtctcaaggattcctcccaaaatggagtttgtaggtggagttcctgactaaactgccactttaggatggcgatgcaggtgtcttttccccccagatctcctcttccttcagcaaaggccagcctctcccaccactgcaggtgccagagcaagtggcacaagcaccactgatacctcccctgaaaaaaccccccaaatggattagaagaccaacaggtgtttcatttgcttttggagggaagctggttacttttggcctccccagcacccctgcccatctggtgccacagccttgcccccgcctagtcttcatcagtcaagtcaccacagaatctgaattcctgatgcgatcagctgagctgcaggaggccttgggatcaggaaatctactgaattactgtcagaacaagagccagcaagctttactgcaaagtgaaaagatgctgtggcagttcctgaagcccgccagagacagctcaggtgcaaggagatgagactatacatcaggcaggtgaccttagagcaagactccagaatgaaattcctaaagcttttaggatacagtaaagatgagcttcagaagaaggtggccacatggttgaagagtgacgtggggctaggtgagagtcctcagcccaagggaaatgacctcaacagtgacagacaacaggccttctgcagccaggcctccaaacacaccacaaaggaagcctctgcttcctcagccttctttgatgagctggtccctcagaacatgactccttgggagatccccatcacaaaagatattgatggactcctaagccaggctctcctgcttggggaactgggtccggccgtggagctgtgtctgaaggaggagcgctttgctgatgccattatcctggcccaggctgggggtacagatctgctgaagcaaacacaggagcgctacttggccaagaagaaaaccaaaatctcctcgcttctagcctgtgttgtgcaaaagaattggaaggatgtggtgtgtacctgtagcctgaagaactggagagaggcactggctttgctactgacatactcaggcacagagaaatttcccgagctctgtgacatgctgggaactcgcatggaacaggagggcagcagggcactaacctccgaagccagactctgttatgtgtgctcagggagtgtggagcggctggtggagtgctgggcaaaatgccaccaggctttgtcccccatggctctgcaggacctgatggagaaggtgatggttcttaacaggagcttggagcaactgcggggtcctcatggggtgagcccaggccctgccacaacctacagggtcactcagtatgccaacctcctggcagcccagggcagcctggccactgccatgagctttctacccagggactgtgctcagccaccagttcagcagctaagagatcggctttttcatgctcaaggttctgctgtcttgggccaacagtctccccctttccccttcccccggattgttgtgggagctaccctccactctaaagagacatcatcttacagattgggatcccagccttctcaccaggtcccaactccatctccaaggccaagggttttcacccctcagtcatcaccagcgatgcccttggcaccttcccatcctagcccttatcagggtcccaggacacagaatataagtgactacagggcacctgggccccaggccatccagcctttgcctttgagccctggggtaaggcctggacctcaagattcctggaaagaagccccagcccccaggggaaacctccagaggaacaagctgccagagacatttatgcccccagcaccaattactgctccagttatgagcctcacccctgagctacaagggattcttccctcacagccccctgtctccagtgtgagtcatgctcccccaggagttccaggagaactcagcctgcagcttcagcacctgccacctgagaagatggaaaggaaggagctgcccccagagcatcagtccttgaagagcagctttgaggcgcttctccaacgctgctccctgtctgcaactgacttaaagacaaaaaggaagctggaagaggcagcccagcgtctggagtatctatatgagaagctctgtgaggggacactctcacctcatgtcgtggctgggctccatgaggttgcccgatgtgtggatgcaggaagctttgagcagggccttgcagtgcatgcccaggtggcgggctgtagcagcttcagcgaggtgtccagcttcatgcctatcctgaaggctgtcctcatcatcgctcataagctgctggtctaaaccaggcagcctctcttgctaggaggccacttctgctgttacataactcctccctgcagaagaggggacttctgcaacagattctgtttctttttcccgactcttttccttgctgccaggtatgtgatgctgtaggcttggctccaaaccagctgagtgcctgctttttactcctttatgtctggccttctaggatctgtccaagacactctcaggcctggaggcagggcatagaatcagttcttcactctccctaatactacactctgtaaggacctggggcaggatatcttctcccccagggatcttctatttaagtggcttctgagagggtgaacaggattgttacttttaagcctacctctgctgtgacccatcatgtgggtcttttgtttctcccttctgtggtttatgagcctgcccttaccttttccctgcctctgacttggtatttccaggtccgtatttctctgtagcccagggtctggggtagagctgactgctgttcaccctttgaacaactcatggacgtgagggatgggtgctgagcagaaccaagagaggaaactttggcgctgttaaaatggaatttctcatctgccggcattattaagggtgggctaggttggatggaaggtgaaagggatgaactgccttttgctggaagctgtcttaggctgtgagacaggagcaggggaaccacagcctatggggaactgcccttgactccacctatgttggagccttagcccaaggccattccttctgtgatgataaagcccagttctggaattggagccatattaaggaatgattctcttccagcgctgctcctcaagggttgggggtccttctccctcgcagccaccacatgtctcagggctaccttctccgattggatttgcatttgtggcactgtctttgatgcagtgatgtacttaatggtgcaataaagctgcttcgatttggtaaaaaaaaaaaaaaaaaaaaaaaaaaaaaaaaaaaaaaaaa

SEQ ID NO: 1068 - DNA, 3416 bp, Homo sapiens
cctcccctcgcccggcgcggtcccgtccgcctctcgctcgcctcccgcctcccctcggtcttccgaggcgcccgggctcccggcgcggcggcggagggggcgggcaggccggcgggcggtgatgtggcgggactctttatgcgctgcggcaggatacgcgctcggcgctgggacgcgactgcgctcagttctctcctctcggaagctgcagccatgatggaagtttgagagttgagccgctgtgaggcgaggccgggctcaggcgagggagatgagagacggcggcggccgcggcccggagcccctctcagcgcctgtgagcagccgcgggggcagcgccctcggggagccggccggcctgcggcggcggcagcggcggcgtttctcgcctcctcttcgtcttttctaaccgtgcagcctcttcctcggcttctcctgaaagggaaggtggaagccgtgggctcgggcgggagccggctgaggcgcggcggcggcggcggcacctcccgctcctggagcgggggggagaagcggcggcggcggcggccgcggcggctgcagctccagggagggggtctgagtcgcctgtcaccatttccagggctgggaacgccggagagttggtctctccccttctactgcctccaacacggcggcggcggcggcggcacatccagggacccgggccggttttaaacctcccgtccgccgccgccgcaccccccgtggcccgggctccggaggccgccggcggaggcagccgttcggaggattattcgtcttctccccattccgctgccgccgctgccaggcctctggctgctgaggagaagcaggcccagtcgctgcaaccatccagcagccgccgcagcagccattacccggctgcggtccagagccaagcggcggcagagcgaggggcatcagctaccgccaagtccagagccatttccatcctgcagaagaagccccgccaccagcagcttctgccatctctctcctcctttttcttcagccacaggctcccagacatgacagccatcatcaaagagatcgttagcagaaacaaaaggagatatcaagaggatggattcgacttagacttgacctatatttatccaaacattattgctatgggatttcctgcagaaagacttgaaggcgtatacaggaacaatattgatgatgtagtaaggtttttggattcaaagcataaaaaccattacaagatatacaatctttgtgctgaaagacattatgacaccgccaaatttaattgcagagttgcacaatatccttttgaagaccataacccaccacagctagaacttatcaaacccttttgtgaagatcttgaccaatggctaagtgaagatgacaatcatgttgcagcaattcactgtaaagctggaaagggacgaactggtgtaatgatatgtgcatatttattacatcggggcaaatttttaaaggcacaagaggccctagatttctatggggaagtaaggaccagagacaaaaagggagtaactattcccagtcagaggcgctatgtgtattattatagctacctgttaaagaatcatctggattatagaccagtggcactgttgtttcacaagatgatgtttgaaactattccaatgttcagtggcggaacttgcaatcctcagtttgtggtctgccagctaaaggtgaagatatattcctccaattcaggacccacacgacgggaagacaagttcatgtactttgagttccctcagccgttacctgtgtgtggtgatatcaaagtagagttcttccacaaacagaacaagatgctaaaaaaggacaaaatgtttcacttttgggtaaatacattcttcataccaggaccagaggaaacctcagaaaaagtagaaaatggaagtctatgtgatcaagaaatcgatagcatttgcagtatagagcgtgcagataatgacaaggaatatctagtacttactttaacaaaaaatgatcttgacaaagcaaataaagacaaagccaaccgatacttttctccaaattttaaggtgaagctgtacttcacaaaaacagtagaggagccgtcaaatccagaggctagcagttcaacttctgtaacaccagatgttagtgacaatgaacctgatcattatagatattctgacaccactgactctgatccagagaatgaaccttttgatgaagatcagcatacacaaattacaaaagtctgaatttttttttatcaagagggataaaacaccatgaaaataaacttgaataaactgaaaatggacctttttttttttaatggcaataggacattgtgtcagattaccagttataggaacaattctcttttcctgaccaatcttgttttaccctatacatccacagggttttgacacttgttgtccagttgaaaaaaggttgtgtagctgtgtcatgtatatacctttttgtgtcaaaaggacatttaaaattcaattaggattaataaagatggcactttcccgttttattccagttttataaaaagtggagacagactgatgtgtatacgtaggaattttttccttttgtgttctgtcaccaactgaagtggctaaagagctttgtgatatactggttcacatcctacccctttgcacttgtggcaacagataagtttgcagttggctaagagaggtttccgaagggttttgctacattctaatgcatgtattcgggttaggggaatggagggaatgctcagaaaggaaataattttatgctggactctggaccatataccatctccagctatttacacacacctttctttagcatgctacagttattaatctggacattcgaggaattggccgctgtcactgcttgttgtttgcgcatttttttttaaagcatattggtgctagaaaaggcagctaaaggaagtgaatctgtattggggtacaggaatgaaccttctgcaacatcttaagatccacaaatgaagggatataaaaataatgtcataggtaagaaacacagcaacaatgacttaaccatataaatgtggaggctatcaacaaagaatgggcttgaaacattataaaaattgacaatgatttattaaatatgttttctcaattgtaacgacttctccatctcctgtgtaatcaaggccagtgctaaaattcagatgctgttagtacctacatcagtcaacaacttacacttattttactagttttcaatcataatacctgctgtggatgcttcatgtgctgcctgcaagcttcttttttctcattaaatataaaatattttgtaatgctgcacagaaattttcaatttgagattctacagtaagcgttttttttctttgaagatttatgatgcacttattcaatagctgtcagccg

SEQ ID NO: 1069 - DNA, 3663 bp, Homo sapiens
gtggcactcacggaatctcgggtcttctgacgtgccgggcgggaagatgtcatcattgccaagaagagcgaaagtacaggtccaggatgtggtactgaaagatgaattttcttcattctctgagttatcatctgcctctgaagaagatgacaaggaagatagtgcctgggagccccaaaagaaagttcccagaagccgtaaacagccccctcccaaggaatccaaaccaaagaggatgcctcgggtgaagaagaatgccccacagatcagtgatggctcagaagtcgttgttgttaaggaggagctgaatagctctgtggctattgctgatactgctttagaagacagaaaaaataaattggatactgtacagactctgaaaacagccaagacaaaacagaaatgtgcagcgcagccacatacagttcgaaggactaaaaagctgaaagttgaagaagaaaccagcaaagccagcaacttagagggtgagagtaatagttcagagacaccatccacaagcactgtgtggggaggtacatgcaagaaggaagagaatgacgatgactttacatttggtcagtccgctttaaagaaaatcaagactgagacatatcctcaggggcagcctgtcaagtttccagcaaatgccaatagtactaaagaggaggtggaaatgaattgggacatggtacaggttttatctgagagaactaatattgaaccttgggtttgtgccaacatcattcgtctctttaatgatgataacacaattcccttcattatacgttatagaaaagagctcattaataaccttgatgctgattccttgagagaagttcagcaaaccctagaagagctacgggctgttgcaaagaaagttcatagtacaatccagaaaattaagaaggaagggaagatgtctgagtgcttgttaaaagccatgctgaattgtaaaacttttgaagaactagaacacgtgtctgctccatataaaactggaagcaaagggactaaagcccagagagcaagacagttgggcttagaaggagcagccagggcactgcttgagaaaccaggggagctcagtctgctatcgtacattaggcctgacgttaaagggctttcaacgcttcaggatattgaaataggagtgcagcatattttagcagatatgattgctaaagacaaagacacgcttgacttcattcggaacttgtgccagaagagacatgtttgtatccagtcatctctggcaaaagtatcctcaaaaaaggtaaatgagaaagatgttgataagtttctgctctaccagcatttttcctgcaacataagaaacattcaccatcatcagattctggcaattaaccgtggagaaaatttgaaggtactgacggttaaggtcaatatttctgatggagtgaaggatgaattctgtaggtggtgcatccaaaacaggtggagaccacgtagctttgcaaggccagagttaatgaagatcttatataattcactgaatgattcctttaaacgccttatttatcctcttctctgtagagaattcagagccaaactaacatcagatgcagagaaggaatcagtaatgatgtttggacggaaccttcgtcagctccttttaacaagccctgttccagggcgcaccttaatgggagtggatcctggttataaacatggttgcaaattagctataatttctcctactagtcagatacttcatactgatgtggtttacttgcattgtggacaaggcttccgagaggcggagaaaataaagacacttttgctgaatttcaactgcagcacagtagtgattggaaatggaactgcctgcagggaaacagaagcttactttgctgacctgataatgaagaattattttgcaccactggatgttgtttactgtatcgtcagtgaagcaggagcatcaatctacagtgtcggccctgaagctaacaaagagatgccagggctggaccctaatttgagaagtgcagtttccatagcaaggcgtgtacaagatccattagctgagctagtgaaaattgagccaaagcacattggagttggaatgtatcagcatgacgtatcccagactttactcaaggcaacactggacagtgttgtagaagaatgtgtcagctttgtgggagtggatattaacatctgttcagaagttttgttaaggcatattgcaggactcaatgccaacagggccaaaaatattattgaatggcgagagaaaaatggaccctttatcaaccgagaacagctgaagaaagtgaaagggctgggcccaaaatccttccaacagtgtgctggcttcatcagaatcaaccaggattatatccgaacgttttgcagtcagcaaactgaaacttcaggccaaattcaaggagttgctgtgacatcttcagcagacgttgaggtcacaaatgagaagcagggcaaaaagaagagcaaaactgcagtgaatgttttactgaagccaaatcctttggaccaaacttgtattcatccagaatcatatgacatagcaatgaggtttttgtcatccattggagggacactgtatgaggttggaaagcctgaaatgcaacaaaaaataaattcattccttgaaaaggaaggaatggagaaaattgcagaaagattgcaaacaacagtacacaccttacaggtcatcatagatggtctcagccagcctgaaagctttgactttcgaacagattttgataaacctgatttcaagagaagcatagtatgcctggaagatctgcagattgggacagttcttacaggcaaagttgagaatgccactctctttggaatttttgtggatataggagtggggaaatctgggctgattcccatacgaaatgtaacagaagcaaaactttcaaaaacaaagaagagaagaagccttggactgggccccggagaaagagtggaagtccaagtactcaacattgacatcccccgatctaggattactctggacctcattcgggtgttatgagtatcccacgaaggccagacgctgattttattttctcatttccacagattgacaaggataagtcagttgtttgtaaactctaggtagcagatgagaaataattcacttaatatcagaaatattttccaaacactttcctttattttttcttctgaataaatagaaaaccaacagtttgatttccttttcccttaaaggaaacaactaatacacattcttatatggctttatgtagtaatagttttctgactaaaattttgttttttattttttgtaatttatctttaactccttttgcattttgtataacagattgcttaacttctacttgccaacatctgccttgctggacttgtatgggattgtctccttgatttgaattgtaccgtctttgttgacacagtagggctgggcagtgtttaatccttccattttatagatttttttttaatcaggccttttggactttattcataattttgcaataatctcttttcccttgtcatgcaagccaaaaatataccagtaaaacagattctgacgtgtttgtagttatcaaatgaatggctcgaaacacttctcaaaaggatatacgtattgaccccaacaataaatgtttgtggctagtg

SEQ ID NO: 1070 - DNA, 2183 bp, Homo sapiens
ccagggcctgactaaacctggagactcgggtggccgaggggcttcataccagctgaagagcgacaagccgctggcagccgcggatctcaccgccgctcagggtttttagaacttcagccataaaaatgggcagaattttccttgatcatatcggtggtacccgtctgttttcttgtgcaaactgtgatacgatcctgaccaaccgctcagaactcatctccactcgtttcacaggcgccactggcagagcatttctttttaacaaggtagttaacctgcagtacagcgaagttcaagatcgggtcatgctcactggccgccacatggttcgagatgtgagctgcaaaaactgcaatagcaaactgggatggatctatgagtttgccactgaagacagccagcgatataaggaaggccgcgtgatcctggaacgtgctctagttcgagagagtgagggctttgaggagcatgtaccatctgataactcttgaagatacagagagaaatccatcttttcccaggtctccttcactgaaaacaaaaatctacttacatacactgtcaccttagcatcagagtcggattaatgaactgcggaacaagaggttgtgagaatctaagatggaacctttctttctttctttctttttttttaaattttgtattttccatccaacagcagtgtgtagagagaatattatgcagatgccgttaattttttaccctatgtttacatcttgaggcagcagagtctgtctgcagctatgtggtgagctatgtaaggaaaaaaatctgggctgttagagtgaaaaagtgtgttttatgtcaattgtgaaaggaaaatgttaggagtatggtttttaaacttgggcttcattttaaacttttttttttaaacccagttatttcacttgatttgctagcttcagagaagagatccgaatctgtgcccagcgctaaaggctcagtgttagcatggcttgtgctggccggtgtgccatattcttgttggagatgaaccgtagcaccagagcccattcttccttgtcagtcttggcccaaagatgtcaccattcctagttatttgtcaccacataattggtgttgattggaaactttttctgagatgggacagaactgctgggttgtctttttccatgtaacttaagcatagtaatataaataaagtaatagttggatgcttttggtcctgtgttgcttttaaaaacaccttataaaagaggagagtatttgataagcaattttcatagtagtaaagttttttttcatctcttaaactaaattgaccatgcatataatattctttgtttaaatgaaagcatactgttgaaacccgcagtgttgcatttagaaaacagttgaacagaatgtcaatgtgcattcatgcaaaaaaacatttaatctgcatctgttttagaaaagggggaaatgaagcaacttgtctaaaaatactgctttacaaagcatttcagcctttccccctcagttttgcattgattttttgacaagtctgtagagcctaatagtttccatcaaaggcctagatctcttatttagcatttttttcagctcttctctcagaagttcagctgttgaaacgaaaactgtactttgtaccctcacatacaaagggatcaaatttgacctggtgttattttagccccaaatttatgacattacacaatattaaaatgtaaatgtttctttacccaaactacttctagatattctagtatttgcttctggtggaattaaatgacggtaaaattggctaattatttgaatgaatgaatggatggatgttttgcatgctcaatttctaggtcctttgtctagaaaggaaatttgcctcagttgaattagtgaaatatttctgtcgttgatattaaaagtgacttctgagtacagttaagttcctcctatttgccactgggctgttggttagaagcataggtaactgattaagtaggtatgatactgcatttgaaataagtggacacaaactatcctttctccaccatggactcaatctgagaacaacagcattcatttccattcatttccatactggcttttgattatatgcagattcctagtagcatgccttacctacagcactatgtgcatttgctgtcacaataaagtatattttgtcttgcaaa

SEQ ID NO: 1071 - DNA, 3303 bp, Homo sapiens
gcctaacttgcgcgctgagatttccggcgtgggagcagaggtctgagtcttgcgtgggtcctctatagggtgagaagcgtggcgctcggttcctgcctcggggaagtcctggcgcagatgggccacggggccggcgtggcggcgcctgggaccgactgaggcctaggcgccggagccggccgcgcctgggctggagcggggctcctcggcctggactgggagcccccggccccgggctcctgctggcgccgtccaaccttacatgggttcagggcgccttcgtaggcgggcacggctggtttcgggctaaggcgctctggagacctgacgatggcgtcgggcccgggctcccaggaacgggaagggctcctgatagtgaagctggaggaggactgcgcctggagccaggagctgcccccacctgacccaggaccgagccccgaggcctcccacttgcgcttcagacggttccgcttccaagaggcagctggtccccgggaagccctcagccggctccaagagctttgccatgggtggcttcggcctgagatgcgcacgaaggagcagatcttggagctgctggtgttagagcagttcctgaccatcctgccccaggagatccagagcagggtgcaggagctgcatccggagagcggcgaagaagcggtgacccttgtggaggatatgcagagagagcttgggagactgagacaacaggtcacaaaccatgggcggggaacagaagtgcttttggaggagcctttgcctctggaaacagcacgagagtcaccgagcttcaagctggagccaatggagactgagcgaagccctggccccaggctgcaggagctgctaggccccagcccccaaagggacccccaggctgtaaaggagagggcattatctgctccctggctttctctttttcctcctgaagggaacatggaagacaaggagatgactgggccccagttgcctgagagcttagaggacgtggcaatgtacatctcccaggaggagtgggggcatcaggatcctagtaagagggccctctccagggacacggtgcaggagagttatgagaatgtggactcactggagtctcacattcccagtcaggaggtcccaggcacccaggtgggacaaggaggaaagctatgggatcccagtgtccagagctgcaaggagggcctgagccccagaggcccagctccaggagaagagaaatttgagaacctggaaggtgttccgtctgtatgctctgagaacatccaccctcaggtgctgcttcctgaccaggcccgaggggaggtgccctggagtcctgagctgggaagacctcatgaccggtcgcaaggggattgggcgcctcccccagagggtggaatggagcaggccttggcaggagcctcaagtggcagagaactggggcgaccgaaggaactgcagccaaagaaactccatttatgtcccttgtgtggcaaaaatttctctaacaactcaaacctaattaggcaccagagaatacatgcagctgaaagactgtgtatgggtgtggactgcactgaaatctttggtgggaacccacgtttcctgtcactacacagagcacacctgggagaggaggcccacaagtgccttgaatgtgggaaatgcttcagtcagaacacccatctgactcgccaccaacgcacccacacgggtgagaagccctatcagtgcaacatttgcggaaaatgtttctcctgcaactccaacctccacaggcaccagagaacgcacactggggagaagccctacaagtgccctgagtgtggggagatctttgctcacagttccaacctccttcggcaccagagaattcacactggagagcgaccttataagtgtcccgagtgtgggaaaagtttctctcggagttcacacctcgtcattcacgaaagaactcatgagagagagagactttaccccttctctgagtgtggggaagctgtgagtgacagcaccccctttcttacaaaccatggagcccataaggcagagaagaagctctttgaatgtttgacttgtgggaaaagcttccggcagggcatgcacctcaccagacatcagagaacacacacaggagagaaaccgtataaatgtaccctttgtggggaaaacttctctcatagatccaatttaatcaggcaccagagaatccacacaggagaaaaaccctatacctgtcatgagtgcggagacagcttctctcacagctccaatcggattcgccacctgagaacgcatacgggagagagaccctataaatgttctgaatgtggagaaagcttctctcggagttcccgtcttatgagtcatcagagaactcacacaggttagtaacagtggggtttctctttgccccaggtgaggtggcatattcagaggagcctgttggcaagagctggtattccctgcccagccgaccaaatgacctctgcattcttcaggtaatgggggctcattgtgagggaggtgcagaggcagcagaggattggcataaaactgaaaaggagttctgtctgcatgagaaaggatggcaagtctctgaggtgacctcagggtggaattctctgttaagtccaccctgccccagggtgctcctaccctcttggtctttttaaagccaaggtgcgatttgggcacctgactgtccagtttaccttaacaagtttgggaatccatgtgatgtttttgatacttcttcctcatttgggacattcagtaggagcatttgggcttccggggcccctgagaccaaagaagaggggccaagtaccctgggaaatcagctgaaggtcaacaaaagactggttgtgagttgcagctgtcccgaaggccccagttgggaagccatgggcagtccagatcaagccaccacgtgccctacgatggcctaacaggagtgcccattggcagattacacatgtaaatatgacctcagacaaaaaggaaccagaggcccaagggcaataataaggtggaatttgcaggtcagcccaggaattggcagaggaagtaggtgtctgataaccctttgtggagaatgagattccccccacctgtgtgagaaaaataaacagctctggagtcttgttcctgactccagaggaacgagagcattccaggaaagagagattccctggaaaattgaaaatgtgaatcctagggggaaattggggattgtgtctttccctgttgaaaatgtttggatgggaataaatatcttcaggaaacataaaaaaaaaaaaaaaaaaaaaa

SEQ ID NO: 1072 - DNA, 1245 bp, Homo sapiens
ataagagaccacaagcgacccgcagggccagacgttcttcgccgagagtcgtcggggtttcctgcttcaacagtgcttggacggaacccggcgctcgttccccaccccggccggccgcccatagccagccctccgtcacctcttcaccgcaccctcggactgccccaaggcccccgccgccgctccagcgccgcgcagccaccgccgccgccgccgcctctccttagtcgccgccatgacgaccgcgtccacctcgcaggtgcgccagaactaccaccaggactcagaggccgccatcaaccgccagatcaacctggagctctacgcctcctacgtttacctgtccatgtcttactactttgaccgcgatgatgtggctttgaagaactttgccaaatactttcttcaccaatctcatgaggagagggaacatgctgagaaactgatgaagctgcagaaccaacgaggtggccgaatcttccttcaggatatcaagaaaccagactgtgatgactgggagagcgggctgaatgcaatggagtgtgcattacatttggaaaaaaatgtgaatcagtcactactggaactgcacaaactggccactgacaaaaatgacccccatttgtgtgacttcattgagacacattacctgaatgagcaggtgaaagccatcaaagaattgggtgaccacgtgaccaacttgcgcaagatgggagcgcccgaatctggcttggcggaatatctctttgacaagcacaccctgggagacagtgataatgaaagctaagcctcgggctaatttccccatagccgtggggtgacttccctggtcaccaaggcagtgcatgcatgttggggtttcctttaccttttctataagttgtaccaaaacatccacttaagttctttgatttgtaccattccttcaaataaagaaatttggtacccaggtgttgtctttgaggtcttgggatgaatcagaaatctatccaggctatcttccagattccttaagtgccgttgttcagttctaatcacactaatcaaaaagaaacgagtatttgtatttattaaactcattagtttgggcagtatactaaggtgtggctgtcttggattcagatagaactaagggttcccgactctgaatccagagtctgagttaaatgtttccaatggttcagtctagctttcacagtttttatgaataaaaggcattaaaggctgaaaaaaaaaaaaaaaaaa

SEQ ID NO: 1073 - DNA, 1693 bp, Homo sapiens
  misc_feature 1649: n = A,T,C or G
atgaccccaatttcacaagtaaggatgaggaaaggttctgcccacaccgccgcccagcccggcagactaggattgcatcctgcgggtgccactgcgcatgcctgccggggaatgacgtcaatccgagctcgtcctggcctcaccagcgccatgctgggctcgcgagccgcggggttcgcgcggggcctgcgggctttggcactggcgtggctgccgggctggcggggccgctccttcgccctggcgcgtgcggcaggcgcgccccacggtggtgacttgcagccccccgcctgtcccgagccgcgcgggcgccagctcagtttgtccgcggcggcggtggtggactctgcgccccgccccctgcagccgtacttgcgcctcatgcggttggacaagcccattggaacctggcttctgtatttaccatgtacctggagcattggtttggcggctgaaccaggttgttttccagattggtacatgctctccctctttggcactggagctattctgatgcgtggagcaggctgtactattaatgacatgtgggaccaggactatgataaaaaggttacaagaacagccaatcgtccaatagccgctggagacatttcaacttttcagtcctttgtttttcttgggggacagctaaccctggcactgggtgttcttctgtgtctaaattactacagtatagctctgggagcaggatccttacttcttgtcatcacctacccactaatgaaaagaatttcatactggcctcaactagccttgggcttgacatttaattggggagcgttacttggatggtctgctatcaagggttcctgtgatccatctgtttgcctacctctttatttttctggagttatgtggacactaatatatgacactatttatgcccatcaggacaaaagagacgatgttttgattggtcttaagtcaacggctctgcggttcggagaaaataccaagccgtggctcagcggcttcagtgttgcaatgctgggggcactgagcctagtgggtgtgaacagtggacagactgctccctactacgctgccctgggtgctgtaggagcccatctgactcaccagatttacactctagacatccacagacctgaggattgttggaataaatttatctccaaccgaacactgggactaatagtttttttagggattgtccttgggaatttgtggaaagaaaagaagacagacaaaacaaagaagggtatagagaataaaatagaaaattaatgaatgaaatttatctaggaatttttaatacattttttacaaaatataattagatttgaatacaaaatctgatacaatatgttaaagaattaagaacctgaagatgaagatttagagcatatttacctggattttacttatttgctagcaaaattcccccttgtcacagaaaccagggactcttcaggatttgagatggccttgagtattttagttgatacattcttctgcccattataattctcacctgaagttatggggattgcacgggttttggcactttagaaaaagcctgatgtgggtcttacataaatgaatgtctgtataagaaaatggactcttttttttaggtaaaaaaaaaaaaaaaaaaaaaaaaaaaagtnctctgcgttgttaccactgcttgccctatagtgagtcgtattag

SEQ ID NO: 1074 - DNA, 1315 bp, Homo sapiens
gcagttctttgaatttctcaccctaagatctggcctgtacattttcaaggaattcttgagaggttcttggagagattctgggagccaaacactccattgggatcctagctgttttagagaacaacttgtaatggagccttcatctcttgagctgccggctgacacagtgcagcgcattgcggctgaactcaaatgccacccaacggatgagagggtggctctccacctagatgaggaagataagctgaggcacttcagggagtgcttttatattcccaaaatacaggatctgcctccagttgatttatcattagtgaataaagatgaaaatgccatctatttcttgggaaattctcttggccttcaaccaaaaatggttaaaacatatcttgaagaagaactagataagtgggccaaaatagcagcctatggtcatgaagtggggaagcgtccttggattacaggagatgagagtattgtaggccttatgaaggacattgtaggagccaatgagaaagaaatagccctaatgaatgctttgactgtaaatttacatcttctaatgttatcattttttaagcctacgccaaaacgatataaaattcttctagaagccaaagccttcccttctgatcattatgctattgagtcacaactacaacttcacggacttaacattgaagaaagtatgcggatgataaagccaagagagggggaagaaaccttaagaatagaggatatccttgaagtaattgagaaggaaggagactcaattgcagtgatcctgttcagtggggtgcatttttacactggacagcactttaatattcctgccatcacaaaagctggacaagcgaagggttgttatgttggctttgatctagcacatgcagttggaaatgttgaactctacttacatgactggggagttgattttgcctgctggtgttcctacaagtatttaaatgcaggagcaggaggaattgctggtgccttcattcatgaaaagcatgcccatacgattaaacctgcgagatcggagttctttaattaggaatggaatgcaacagatttggacaagtcaaggacaagagctttagagagaccaaagagtttttcactgttaaagtgtccagtatgtagccgagaaccatatggagaacatcaaatacagtggaacaaatgtaactgctattgatgtcacactttgtgaagtagtctttgttgcttaaaaagggtgacatctagtggctaaacatgttatttcaaataaataatatcgaaataaaaaaaaaaaaaaaaaaaaaaaaaaaaa

SEQ ID NO: 1075 - DNA, 1688 bp, Homo sapiens
gcagttctttgaatttctcaccctaagatctggcctgtacattttcaaggaattcttgagaggttcttggagagattctgggagccaaacactccattgggatcctagctgttttagagaacaacttgtaatggagccttcatctcttgagctgccggctgacacagtgcagcgcattgcggctgaactcaaatgccacccaacggatgagagggtggctctccacctagatgaggaagataagctgaggcacttcagggagtgcttttatattcccaaaatacaggatctgcctccagttgatttatcattagtgaataaagatgaaaatgccatctatttcttgggaaattctcttggccttcaaccaaaaatggttaaaacatatcttgaagaagaactagataagtgggccaaaatagcagcctatggtcatgaagtggggaagcgtccttggattacaggagatgagagtattgtaggccttatgaaggacattgtaggagccaatgagaaagaaatagccctaatgaatgctttgactgtaaatttacatcttctaatgttatcattttttaagcctacgccaaaacgatataaaattcttctagaagccaaagccttcccttctgatcattatgctattgagtcacaactacaacttcacggacttaacattgaagaaagtatgcggatgataaagccaagagagggggaagaaaccttaagaatagaggatatccttgaagtaattgagaaggaaggagactcaattgcagtgatcctgttcagtggggtgcatttttacactggacagcactttaatattcctgccatcacaaaagctggacaagcgaagggttgttatgttggctttgatctagcacatgcagttggaaatgttgaactctacttacatgactggggagttgattttgcctgctggtgttcctacaagtatttaaatgcaggagcaggaggaattgctggtgccttcattcatgaaaagcatgcccatacgattaaacctgcattagtgggatggtttggccatgaactcagcaccagatttaagatggataacaaactgcagttaatccctggggtctgtggattccgaatttcaaatcctcccattttgttggtctgttccttgcatgctagtttagagatctttaagcaagcgacaatgaaggcattgcggaaaaaatctgttttgctaactggctatctggaatacctgatcaagcataactatggcaaagataaagcagcaaccaagaaaccagttgtgaacataattactccgtctcatgtagaggagcgggggtgccagctaacaataacattttctgttccaaacaaagatgttttccaagaactagaaaaaagaggagtggtttgtgacaagcggaatccaaatggcattcgagtggctccagttcctctctataattctttccatgatgtttataaatttaccaatctgctcacttctatacttgactctgcagaaacaaaaaattagcagtgttttctagaacaacttaagcaaattatactgaaagctgctgtggttatttcagtattattcgatttttaattattgaaagtatgtcaccattgaccacatgtaactaacaataaataatataccttacagaaaatctgaaaaaaaaaaaaaaaaa

SEQ ID NO: 1076 - DNA, 1607 bp, Homo sapiens
ctcccccgaagccgcgcgcccgcgcccgcgcccctcagtcggtggagcccgcagccccccttgtggcccgcggcagctccccgcccgctcggcccgcgcccgccatggtccgtccgcgccgtgccccgtaccgctccggcgccgggggccccctcgggggtcgcggccgccctccgcggcccctcgtggtgcgcgccgtccgctcgcgctcctggcctgccagcccccgaggcccgcagcctccgcggatccgggcccgctcggcccctcccatggaaggtgctcgggtcttcggggcactgggtcccatcggtccctcctcacctgggctcaccctcgggggtctggccgtgagcgagcaccggctcagcaacaagctgctggcttggagcggcgtcctcgagtggcaggagaagcgcagaccctactctgactccactgcaaagctgaagcggaccctgccctgccaagcctacgtgaaccaaggcgagaacctggagaccgaccagtggccgcagaagctgatcatgcagctgatccctcagcagctgctgaccaccctgggccccctgttccggaactcccagttggcacagttccacttcaccaacagagactgcgactcgctcaaggggctctgccgcatcatgggcaacggcttcgcgggctgcatgctgttcccccacatctccccctgtgaggtgcgcgtgctcatgctcctgtactcgtccaagaagaagatcttcatgggcctcatcccctacgaccagagcggcttcgtcagtgccatccggcaggtcatcaccacccgcaagcaggcagtgggacctggtggtgtcaactcaggcccagtccagatcgtcaacaacaagtttctggcatggagtggtgtcatggagtggcaggagcccaggcctgagcccaacagtcggtccaagaggtggctgccatcccacgtctacgtgaaccagggggagatcctgaggaccgagcagtggccaaggaagctgtacatgcagctcatcccgcagcagctgctgaccaccctagtgccgctgttccggaactcgcgcctggtccagttccacttcaccaaggacctggagacactgaagagcctgtgccggatcatggacaatggcttcgccggctgcgtgcacttttcctacaaagcatcgtgtgagatccgcgtgcttatgctcctgtactcttcagagaagaaaatcttcattggcctcatcccccatgaccagggcaactttgtcaacggcatccggcgtgtcattgccaaccagcagcaggtcctgcagcggaacctggagcaggagcaacagcaacgagggatgggggggtagtggttaccccgggctgggcccctccaggagtcacagatgaggcccccgcagagactgtgcttgggagcctgtggccagcagcccccactgtacccctgcccccaggtgacacgcttctgagcaggggcccctggggacttcaactgcccagcaacatggaggatggtgtcctgaggcctccaaggacggtccccacccctctacgtttccccaataaagccttttaaaaaccaaaaaaaaaaaaaaaaaaaa

SEQ ID NO: 1077 - DNA, 5659 bp, Homo sapiens
gtcggctccgagagctctggcttatcaggactccatagttctccaacagagaaatcttgaaaaggactgaccagtttttgcagttctaaaaccatggcccatggttcagtgacattcagggatgtggccatagacttctcacaggaagaatgggaattcctggatcctgctcagagggacttatatagggatgtaatgtgggagaactacagcaacttcatttcactaggaccttccatttctaaaccagatgtgattaccttattggatgaagaaaggaaggaacctgggatggttgtgagggaagggacaagaagatactgccctgatttggagtccagatacaggaccaatactttatctccagaaaaggacatttatgaaatatattcatttcagtgggatataatggaaagaattaaaagctatagccttcagggttccatttttaggaatgattgggaatgcaaaagcaagattgagggggaaaaggaacaacaagagggatattttgggcaagtgaaaattacctctgaaaaaatgaccacttacaaaaggcacaattttcttactgagtatcagatcgttcataatggagaaaaggtgtatgagtgtaaggagtgtaggaagacctttattcgtcgctcaacacttagtcaacacctgagaattcatactggtgagaaaccttataagtgtaaggaatgtgggcaggcctttagacagcgtgcacatcttattcgacatcacaaacttcacaccggtgagaaaccctatgaatgtaaggagtgtgggaaggcctttacagtgctccaagaacttactcaacatcagagacttcatacgggtgaaaaaccctatgaatgtaaggaatgtggaaaggcctttagagtacatcagcaactggctcgacatcagagaattcacactggtgagaaaccctatgaatgtaaggactgtggaaagacctttagacagtgtacacaccttacacgccatcagagacttcatactgctgaaaagctctatgaatgtaaggaatgtgggaaagccttcgtatgtggtccagaccttagagtacatcagaaaattcattttggtgagaaaccctatgaatgtaaggagtgtggaaaggcttttagaatatgccaacaacttactgttcatcagagtattcatactggtgagaaaccctacgaatgtaaggaatgtgggaagacttttagattaagacaacaactagttcgccatcagagaatacatactcgtgagaaaccctatgaatgtatggaatgttggaagacctttagtagttactcacagcttatttcacaccagagcattcatattggtgagagaccctatgaatgtgaagagtgtggaaaggcctttagactgctctcacaacttactcagcatcaaagtattcacactggtgagaaaccttatgaatgtaaggaatgtagaaaaccttttagactgctctcacaacttacccaacatcagagtattcacactggtgagaaaccttatgaatgtaaggaatgtggtaaggcttttagactttattcatttcttactcaacaccagagaattcatactggtgagaagccctacaagtgtaaggagtgtaagaaggcctttagacagcattcacaccttactcagcatcagaagattcataatggaatttaatagaagaaagccttcaaatgtatatgatgttacagaacatcagaaaattcatttttgagaaaatgtgtttcatgctcaattccaagcataataaattttatattagagaaagaatatgttgatttaaaagccttccaacaccatttaaacatggtttatcttcagcaaattcctatgagagaataatgtaatgaatgtaggaaaatctttagccttatctgtcattatctccctttctccacttgattaccagtttgatttattggacaagatactaagcttctgtgcctcattttgctgacttgtaaaatggtaataatagtacttatatgtattagttatttattgctgcgtaataaattaccacagacttagtagcataaaataacatataattatatcttataatttggatcaggagtataggcatgacttagttgggtcctctgcttcagggtctcttgcaaggctacagatttcagccagggctgaggtctcatctgaaggctcaactggggaaggatccacatccagactaacatagttgttacccaatgtatttccgtgaggcctgttgcattgagattctcagtttctagctggctgttggctgaacgctgactgcagctcctggccacaatagcctcatcaacatggctgcttgcttcatcaaggcatgcaagccaaaagggaggacagtctgctagcaagatggaagttaccatcttgtgtaatctaatcatggaagtaacattccctcaccttctactggtagaagtaagttactaggatagtccacactcaagagaacgggatgatacaagagtgtgaataagtcctggagacaggaccactggggggcctgtttagagtcagcctgccacactgtggaataggattgttgcaaggagtaagtagttaatacttggaggaatcacagtcatatagcatgtattctgtaaatattatctgtaattgttattattgtcattagtattagtgaattcacgtaaaaggaagatctgtagacataataaatgtagaaatgcctcctgtcacctctcagaaattattaaacataatttattctaggtaaaatttagattgtagtgaatgtaggaagttcttcagcacttgagctgcattagaaatttcatgccaaaaatgaatttcatgaatgtgaggtcactagtaatacagctgttgaagaattagagggaaataggaaatgattttcccataattccagaaagcaaaaggcttacaatccctgttgtctgaccacagtttaaaattaattagaaactatcaaaaatgtggcttaaaagaaattaaccacctaggaatttaatattgttgtgtatatttatgtgtgtgtataaaactcctgtgggaaagaaacaaaacatcattctataagtcagtatacttttggatgctcaaaatgccatatcttcaaccagtaggagttgtttcaagttgagtttttgatgtgatcccaccaataatttgatagtttacttgattgtggctgcataatttggtaacctatgaaagatgctagagcaccaatgtataatttttttgagacagggtgtcactttgtcccccaggctggagtgcagtggtacgagcacagttcactgtaccctgttcctcctgggctcaagtgattcttccacctaaattttttttttttttttagagaaagggtctcactatgttgcccaggctggtcttgaacttctgggctcaagtgatcctccctccttggcctccaaaggtgctggggttacaggtgtgagccaccacacccggcccaactcattattcttgaaatcaataaatcagaggaaaaattgtcatttagtttccttttcccatgtgaaccaaatttcagggtcaccagaagttcatcaaattcaaatgaatttggcctggcacaggggtcacacctgtaatcccagcactttgggaggacaaggtgggtggatcacttgaggccaggagtttgagaccaacctggttaacatggtgaaaccctgtctgtactaaaaatacaaaatttagccgggcgtggtggcacacacctgtagtcccaggctgaggtgggaggatcacttgagcccaggaggcagagtttgcagtgagctgggatcgtgccactgcactccagcctgggtgacggagtgagaccctgtctcaaaaaaaaaatttgttttttgaatgggtttttcttttttgaagaagtctaataaatctagaaggaattagaggattagaaaaatcaccattttctggaccttaatggaataatgggtccagaaaacatgatcttcaatgggtactacaactaataggtgaaatattttatagcgagatttttatggtggatctatcaaactggccacctctgaaccctttgatctgttttaaccttaataaaaatgggtctatcagacaacacacttcctgacgtaatgcaataggaagtccacaccaccatctacaaagccttattgctggaataatgaactgaaagcagacagggactagatgaacagtatatggtcatcccttggtatccatggggaattggttccaggatcctccactgatggtaaaatctgaggatgctcaagtcccttgtataaaatggcatagtatgtatttgcatattacctactcacatcttcctgtatactttaaattatctttagatcacttatacctatcacaatgtaaatactatgtaaatagttgttatactgtatttttcaatttgcattatttttattgtattttatttttattgtttttttttgagtattttctatttgagattggttgaatctgcacatatggagggctggctataaagggcaccacaaggaagaagccaaacagatccagaatgtgtgaaattctacagagcaaattacctgatttcttcaactaacaggtagcatgaaaatacaaggggaagggcaaccattaacagattaaaagagacttaaagagacatatcaactaaattcagtatgttggcattacttggacctggtttgaacaaaacataaaaagccattttggagacagtgagggaagtgtggacatggactaaatattaaatgatatttacatatattaatttggttagggattatgtcagtgtgattataaaaaataaaagatcgtatgatatgagatacatactatgaaatgaagatagacacatttggattaaaatattctagcaaaagaaataattggcaaagagagctggaaactaaattggcaacatgttgataatttaagtggagtgttttgttcatggagacttattgttctaatatttctacttttgtatgtgtttgaaatttcaataataaaatgtttaaaatcaaaaccaaaattatagactatgtagaaatgaatgacagtgagatgcctgcacatctaaccttgtcagatataatcaaagttctgttcagtgacaaattaatgccctgtaatgtggtaaggaaatcttatttgtggatacagtcttcatcttcttcacttacccacagcagcaacaccaggcctgtcacacagatgaatgtgttgagggaatgaataagtatttccgtcaagaaaaaggaaacaacaaaataaaaccaacccaagtaaagaacagccaagtggccaggtgcggtggctcatgcctgtaatcccagcactttgggaggccatggcaggtggatcacctgaggtcgggattttgagaccagcctgaccaacactgagaaaccccatctctattaaagatacaaaattagccaggcatggtggtgcatgcctgtaatcccagctacttgggaggctaaggcaggagaatcacttgaatccaggaggcggagtttgtggtgagttgagatcgcgccactgcactccagcctgggtaacagagcaagagtctgtc

SEQ ID NO: 1078 - DNA, 2078 bp, Homo sapiens
gggcacgaggcttcccgccacactccagagcgggtgtgaggggcgccgatggcggagggaacggcggaggctcctctagagaatggtggtggtggcgactcgggagccggagctttggaacgaggagtggcgcccattaagcgtcaatacctcaccaccaaggagcagtttcaccaattcctggaagccaaagggcaggagaagacttgccgggaaaccgaggtaggagaccctgctggcaatgagctggctgagcctgaggctaagcggatccgactggaggatggacagacggcggacgggcagacggaggaggcagcagagcccggggagcagctacagactcagaagagggcccggggacaaaacaagggccggccccatgtgaagcccacgaactacgacaagaacaggctgtgtccctccctaatccaggagtcggctgctaagtgtttcttcggtgatcgctgccgctttctgcacgacgtggggcgctacctggagaccaagccggccgacctgggcccccgctgcgtgctcttcgagaccttcggccggtgcccctacggcgtgacctgccgcttcgctggggcccacctggggcccgagggacagaacctggtgcaggaggagttggcggcccgcgggacccagcccccgtccatccgcaacggcctggacaaagccctgcagcagcagctgcggaagcgcgaggtccgcttcgagcgagctgagcaggccctgcgccggttcagccagggccccacacccgctgccgctgtccccgagggcacggcagccgagggcgctcccaggcaggaaaactgtggtgcccagcaggtccccgcagggccgggcactagcacccctcccagcagccccgtgcggacctgcgggcccctgacggatgaggacgtggtcaggctgcggccctgtgagaagaagcggctggacatccgtggcaaactttacctggcccccctcaccacgtgtgggaacctgcccttccgacggatctgcaagcgcttcggggcggatgtgacatgtggagagatggccgtctgcaccaacctgctgcagggccagatgtccgagtgggccctactcaaacgccaccagtgtgaggacatctttggcgtccagctggagggcgccttccccgacaccatgaccaagtgtgccgagctgctgagccgcaccgtggaggtggactttgtggacatcaacgtcggctgccccatcgacctcgtgtacaagaagggtgggggctgtgccctcatgaatcgctccaccaagttccagcagatcgtccgtggcatgaaccaggtgctggatgtgccgctgactgtgaagatccgcacaggcgtccaggagcgtgtgaacctggcgcaccgcctgctgcccgagctgcgggactggggcgtggcactcgtcacgctccacggccgctctcgggagcagcgctacaccaagctagctgactggcagtacatcgaggagtgcgtgcaggccgccagccccatgcccctgttcggaaatggggacatcttgtcatttgaggatgccaaccgcgccatgcagactggtgtcaccgggatcatgattgcccgtggcgccctgctcaagccgtggctcttcacggagatcaaggagcagcggcactgggacatctcgtcgtccgagcgcctggacatcctgcgggacttcaccaactacggcctggagcactggggctcggacacgcagggcgtggagaagacccggcgctttctgctcgagtggctgtccttcctgtgccggtacgtgcccgtggggctgctggagcggctcccacagaggatcaacgagcggccgccctactacctgggccgcgactacctggagacgctgatggccagccagaaggcagccgactggatccgcatcagcgagatgctccttgggccagtgccccccagcttcgccttcttgccgaagcacaaggccaacgcgtacaagtagcctcaggctttcccaggggcaccctggggcgaggagagtacaataaattttattcttttaaaaaaaaaaaaaaaaaa

SEQ ID NO: 1079 - DNA, 2833 bp, Homo sapiens
ggcctggccggggcgggcggcgcgggggcggcatgagggcccgcggcccggggggctgaggcgcccgccgcctgccgcgggggccgctcgcgtcctccatggaggccggagaggaaccgctgctgctggccgaactcaagcccgggcgcccccaccagtttgattggaagtccagctgtgaaacctggagcgtcgccttctccccagatggctcctggtttgcttggtctcaaggacactgcatcgtcaaactgatcccctggccgttggaggagcagttcatccctaaagggtttgaagccaaaagccgaagtagcaaaaatgagacgaaagggcggggcagcccaaaagagaagacgctggactgtggtcagattgtctgggggctggccttcagcccgtggccttccccacccagcaggaagctctgggcacgccaccacccccaagtgcccgatgtctcttgcctggttcttgctacgggactcaacgatgggcagatcaagatctgggaggtgcagacagggctcctgcttttgaatctttccggccaccaagatgtcgtgagagatctgagcttcacacccagtggcagtttgattttggtctccgcgtcacgggataagactcttcgcatctgggacctgaataaacacggtaaacagattcaagtgttatcgggccacctgcagtgggtttactgctgttccatctccccagactgcagcatgctgtgctctgcagctggagagaagtcggtctttctatggagcatgaggtcctacacgttaattcggaagctagagggccatcaaagcagtgttgtctcttgtgacttctcccccgactctgccctgcttgtcacggcttcttacgataccaatgtgattatgtgggacccctacaccggcgaaaggctgaggtcactccaccacacccaggttgaccccgccatggatgacagtgacgtccacattagctcactgagatctgtgtgcttctctccagaaggcttgtaccttgccacggtggcagatgacagactcctcaggatctgggccctggaactgaaaactcccattgcatttgctcctatgaccaatgggctttgctgcacattttttccacatggtggagtcattgccacagggacaagagatggccacgtccagttctggacagctcctagggtcctgtcctcactgaagcacttatgccggaaagcccttcgaagtttcctaacaacttaccaagtcctagcactgccaatccccaagaaaatgaaagagttcctcacatacaggactttttaagcaacaccacatcttgtgcttctttgtagcagggtaaatcgtcctgtcaaagggagttgctggaataatgggccaaacatctggtcttgcattgaaatagcatttctttgggattgtgaatagaatgtagcaaaaccagattccagtgtactagtcatggatctttctctccctggcatgtgaaagtcagtcttagaggaagagattccacttgcacggcaacagagccttacgttaaattttcagtccagttatgaacagcaagtgttgaactctttctgcttgttttgattcaaagtgcagttactgatgttgttttgattatgcaactaagtaggcctccagagcctctctagtggcagagcagctcacactccctccgctgggaacgatggcttctgcctagtacctatccttgtgtttctgatgcagtggtagcattggttcaagttctctcctgctgtggtcagagttgcttcgatgttggccaagtgcttttcttcttgggctcccttctgacctgcaggacagttttcctggagccatttggtatgaggtattaatttagcttaactaaattacaggggactcagaggccgtgctcctgaccgatccagacactattactggctttttttttttttttttaacaatggtgtgcatgtgcaggaaatgacaaatttgtatgtcagattatacaaggatgtattcttaaaccgcatgactattcagatggctactgagttatcagtggccatttattagcatcatatttatttgtattttctcaacagatgttaaggtacaactgtgtttttctcgattatctaaaaaccatagtacttaaattgaacagttgcaaagatgtcttaattgtgtaaagaattggtgtagtcatgactttagctgatactcttatgtacgagatctgtctctgctgtttaacttcattggattaatcagctggtttcaactctactgcgaaacaaaaatagctccttaaaagtactgttctccttcagtggcatgtagttatctaatcaagacacctcattcaaacaaaacctgccttaggaaaatttaatatattttaaattattttaaaagaaatacaacatcttattctttagctttcttaatcggtgctttatggaggccagtgtaacgttacatgactcgttgagaaagttgaggaatttcctctaccacctttgttgcttgaagaaaaacatgtcttttcaaaatgagaggctttcattgaagaaaagaaaaaaacaacagttaaaagcttttggctctctgtttcatttttttccattaagaaaaaaaaaagtccccttttaaaacaagcagggctgggtgtgacggcacatgcctgtaatcccagcactttgggaggctgaggtgggaggactgcttgagcccaggagttcaagatcagcctgggcaacagagtgagataagacccaatctttatttaaaaaataaataaataaatagccaaaaaaaaaaaaaaaaaa

SEQ ID NO: 1080 - DNA, 1238 bp, Homo sapiens
aaactcccgcagacttctctgtagatcgctgagcgatactttcggcagcacctccttgattctcagttttgctggaggccgcaaccaggcccgcgccgccaccatgtttcgaaatcagtatgacaatgatgtcactgtttggagcccccagggcaggattcatcaaattgaatatgcaatggaagctgttaaacaaggttcagccacagttggtctgaaatcaaaaactcatgcagttttggttgcattgaaaagggcgcaatcagagcttgcagctcatcagaaaaaaattctccatgttgacaaccatattggtatctcaattgcggggcttactgctgatgctagactgttatgtaattttatgcgtcaggagtgtttggattccagatttgtattcgatagaccactgcctgtgtctcgtcttgtatctctaattggaagcaagacccagataccaacacaacgatatggccggagaccatatggtgttggtctccttattgctggttatgatgatatgggccctcacattttccaaacctgtccatctgctaactattttgactgcagagccatgtccattggagcccgttcccaatcagctcgtacttacttggagagacatatgtctgaatttatggagtgtaatttaaatgaactagttaaacatggtctgcgtgccttaagagagacgcttcctgcagaacaggacctgactacaaagaatgtttccattggaattgttggtaaagacttggagtttacaatctatgatgatgatgatgtgtctccattcctggaaggtcttgaagaaagaccacagagaaaggcacagcctgctcaacctgctgatgaacctgcagaaaaggctgatgaaccaatggaacattaagtgataagccagtctatatatgtattatcaaatatgtaagaatacaggcaccacatactgatgacaataatctatactttgaaccaaaagttgcagagtggtggaatgctatgttttaggaatcagtccagatgtgagttttttccaagcaacctcactgaaacctatataatggaatacatttttctttgaaagggtctgtataatcattttctagaaagtatgggtatctatactaatgtttttatatgaagaacataggtgtctttgtggttttaaagacaactgtgaaataaaattgtttcaccgcctggtaaaaaaaaaaaaaaaaaaaaaaaaaaaa

SEQ ID NO: 1081 - DNA, 1480 bp, Homo sapiens
cgcgagccgggaccacgccgacccagcgtgcccaggccgaggaaagcgcggcggcggcagtccgaagacccaccggactgaaagagaaggacgaggtcatcttcggacgggaggggcaagccagccatcctgggaccccaggcgtgcaggttctctttgagggtattccaccctgcaaaaagcatgtattcatggtcagctctcagcaaggccagtagcagagtggtaaaggccttggccctccaaggctgggaaaagacaatgacaagtcaaatccagacctatgttggatgttggtctactaggtgactgtctcctggaaatgttatgcagctcagcaaggtgaagtttcgaaatcagtatgacaatgatgtcactgtttggagcccccagggcaggattcatcaaattgaatatgcaatggaagctgttaaacaaggttcagccacagttggtctgaaatcaaaaactcatgcagttttggttgcattgaaaagggcgcaatcagagcttgcagctcatcagaaaaaaattctccatgttgacaaccatattggtatctcaattgcggggcttactgctgatgctagactgttatgtaattttatgcgtcaggagtgtttggattccagatttgtattcgatagaccactgcctgtgtctcgtcttgtatctctaattggaagcaagacccagataccaacacaacgatatggccggagaccatatggtgttggtctccttattgctggttatgatgatatgggccctcacattttccaaacctgtccatctgctaactattttgactgcagagccatgtccattggagcccgttcccaatcagctcgtacttacttggagagacatatgtctgaatttatggagtgtaatttaaatgaactagttaaacatggtctgcgtgccttaagagagacgcttcctgcagaacaggacctgactacaaagaatgtttccattggaattgttggtaaagacttggagtttacaatctatgatgatgatgatgtgtctccattcctggaaggtcttgaagaaagaccacagagaaaggcacagcctgctcaacctgctgatgaacctgcagaaaaggctgatgaaccaatggaacattaagtgataagccagtctatatatgtattatcaaatatgtaagaatacaggcaccacatactgatgacaataatctatactttgaaccaaaagttgcagagtggtggaatgctatgttttaggaatcagtccagatgtgagttttttccaagcaacctcactgaaacctatataatggaatacatttttctttgaaagggtctgtataatcattttctagaaagtatgggtatctatactaatgtttttatatgaagaacataggtgtctttgtggttttaaagacaactgtgaaataaaattgtttcaccgcctggtaaaaaaaaaaaaaaaaaaaaaaaaaaaa

SEQ ID NO: 1082 - DNA, 1761 bp, Homo sapiens
gaaaatgccagctctctatcagccatttgcaatatcaaggggatgcacaagctcctccccactttccctgcctcggccgaccgaactcttctggtgaggcacctgccagctgagctgaccgctgaggagaaagaggacttgctgaagtacttcaaggcacggttggtgcatgacctgtcagataaggggcagctgaaacatacagcttttgccacattccctaaaaagcagctataaaggcattgacaagactccatcagctgaaacttttaggtcatactttagtctttgaatttgcaaaagagcaagatcaagttcactccccatgtcccactccagtctctgaaaaaaaaaaaaaaaggtctgatgaccctgttgaagacgataaagaaaagaaagaattggttatttaacagtagaaaatgtaattacaccaaaccatgggctgacttttcttaattcatgcctcaagtatatgtacccaccaccttccagcacaatcctaacaaacagagtaaatgctttggcaagcgtgcctaagttctatgtacaggtccttcatcttatgaataaaatgaatttgcccacagcttttagatcaattactgcgcagcctcccatctatgaagaccatatgccattgcatccacctcttccacccacatctcctcagccacctgaggaacctccttggccagaagacgatgaggaattatctagtgaagaattagaagatgacagcagtgatgatgaggaccaacagaaaatgaacaaactaatggaactagcaaatcttcagccccaaagacccaaaacaataaggcagcgccatgtgagaaaaaagagaaaaataaaggatatgttgaacatactttcgtgtccttcacaaaacagtttacatctagtgctgttaccttcggatgtatttgaccaaccacaacctgtaggtaataaaagaattgaattccatatatctaccgacatgccagctgcatttaagaaagatttagagaagaaacaaaattgtgagaaaaaaataatgatctacctgttactgaagctgatgcatccagtataggatttggaaaaatctttcccaaacctaatttgaacatcacagaagagattaaaaaagactctgatgaaatgccatcggaatgtatttctagaagggaattggaaaaggacagaatttctagagaagaaatggaaacactttcagttttcagaagttatgaacctggtgaaccaaactgtagaatttatgtaaagaatttagctaaacatgttcaagaaaaggaccttaaatatatttttggaagatatgttgacttttcatcagaaacacagtagatcatgtttgatatacgtttgatgaaagaaggtcgtatgaaaggacaagcttccattggacttcctaatgaaaaagcagcagcaaaagccttaaaggaagctaatggatatgtgctttttggaaaacccatggtggttcaatttgctcgatctgctagacaaaaaccagatcctaaggaaggaaaaagaaagtgttaaaaattaataaaggtttcttttgaatcctgtatctttcaagggctttccaacttggacaggaagaaattgaccacctggactatggaactgtgcataacagctttgaaagtatatttaaaaattaaatacatatgcctttaaatcagtgtattggaactatattatatgtattttaatgaccttcctcaaatataataaattattttcttt

SEQ ID NO: 1083 - DNA, 2352 bp, Homo sapiens
ctttttgcacacacacgaatacaaagagccatacgaccttcggatgccggaaggtccttctgaatcccttccctgttccttaggttgcactagtcgggggttccatgctggggggcagaaggaatgctctctaccgtctgaaaccgttcatcaggaaggccttgatttgtgatgtgctaggagagcacaggatctgcaaatagaaggcacctgtctcccttctgcaggccgaggagaggccgccatggactgtgtgcttcttcatggcttgtttactcttctttcacagaccctacagcttggggcctgggctcctctgaccatcctcattgagaaaggaaagtgagtccagagaagttgatgcttcctacctgttggagcggcccagcagtgtaagcgtggttgttactgccccatccgccatgtccttcagtgccaccattctcttctcccctcccagtggcagcgaggccagatgctgctgctgcgcctgtaagagtgagactaatggaggcaacacaggctcccagggtgggaatcctcctcccagcacccccatcacagtgactggacatggcttggctgttcagagctcagagcagctcctgcatgttatctaccagcgggtcgataaggcagtgggtttggctgaagctgctctgggtcttgccagggccaacaatgagttgttaaaacgtctccaggaggaagtgggtgacctgaggcaagggaaagtgtccatccctgatgaagatggggaaagccgggcacatagttccccacctgaggagcctgggcctctcaaggaaagtcccggggaagcctttaaggctctgtctgccgtggaagaggagtgtgacagcgtgggcagcggcgtgcaggtggtgattgaggagctgcggcagctgggagcagcctcagtggggcctgggcctttgggcttcccagcaactcagagggacatgcggctcccagggtgcacgctggctgccagcgaggcggcccccctgctcaatcctctggtggatgattacgtggcctctgagggtgcagtacagcgagttctggtccctgcttatgccaagcaactctcaccagccacacaactggcaatccagcgggcaaccccagagacaggaccagaaaatggaaccaagctgccaccaccccgccctgaggacatgctcaatgccgctgctgcgctggacagtgccttggaagagtcaggccctgggagcactggggagctgagacactctctagggctgaccgtttccccatgcaggaccagaggaagtgggcagaagaactccaggcgcaagcgggatcttgtactctctaaactggtccacaatgtgcataaccacatcaccaatgacaagagattcaatgggtctgaaagcatcaagtcctcttggaatatttcagtagtgaagtttcttctggaaaagctcaagcaagagctggtgaccagtccccacaattacactgataaggagctaaaaggagcctgtgtggcctacttccttactaagaggcgtgagtaccgcaactccctgaacccctttaaaggcctgaaggaaaaagaggagaagaaacttcgaagtcgccgatatcggctttttgccaaccgatccagtatcatgaggcattttggacctgaggaccaacgtctgtggaatgatgtgacagaggaactgatgtcagatgaagaggacagtcttaacgagccaagtgtgtgggtggcccgccctccccgtttccgggcccagcgcctcacagagctctgctaccacctggatgctaactctaagcatggcaccaaagccaaccgtgtgtatgggcctccctcagacagactgccttctgctgaagcccagctccttccaccagaactttacaatcctaatttccaagaagaggaagatgagggaggggatgagaatgcacctggctccccatcttttgaccaaccccacaaaacctgctgtcctgacttgaactcattcattgaaatcaaggtggaaaaggatgaataaaatctacagccaagaataactctggcttccgccatgccccatgtctcagaaataggtggccatggggcttcacaaaataatgagatgctctgtgcagtctgagaaagcaaatttgcctcttttcttaacacagtctctactggggaagcagaacactggtgggataaaaacttatctagaaggggagaaactccctccactgtgaacagtaagccagaatatgcttattcctcagcataaacagtatctcggagaagcctgggatgagaaaatgaggaggatgggtccaagaaacatgaggccttcttgacat

SEQ ID NO: 1084 - DNA, 1741 bp, Homo sapiens
ccgttctgctctcgggggcaccttccggggttcctaagccgcggggcccctcgctgcccctcgaggccctttccctgacctaggctttggcctgggctactcgttccggagccgccatgtcgtccgacttcgaaggttacgagcaggacttcgcggtgctcactgcagagatcaccagcaagattgcgagggtcccacgactcccgcctgatgaaaagaaacagatggttgcaaatgtggagaaacagcttgaagaagcgaaagaactgcttgaacagatggatttggaagtccgagagataccaccccaaagtcgagggatgtacagcaacagaatgagaagctacaaacaagaaatgggaaaactcgaaacagattttaaaaggtcacggatcgcctacagtgacgaagtacggaatgagctcctgggggatgatgggaattcctcagagaaccagagggcacatctgctcgataacacagagaggctggaaaggtcatctcggagactagaggctggataccaaatagcagtggaaaccgagcaaattggtcaggagatgttggaaaaccttagtcatgacagagaaaagatacagcgagcacgtgaaagacttcgggaaacagatgctaatttgggaaaaagctccaggattctgacagggatgttgcgaaggggttgttctgtgaaaaaacaatgtaacctgtctctggccccaaaggcttgaaccagaaccagccagtggaaattactcaaacacgtattgtgccttcaatgagaagccttctcactgaaagagctgccctggacggaaaatgagtagtgagatgatgctggtggaagtatttatagatgcgcagtgcatgagtacttggcaaggatgctatcaaaggggaaactgacatcaaatgtgctgtggttctgggtgatttatctggtcccttcccatcccagagctttatgattctgtaataatcaagggagaaacccattacatagtggacaattttttttctttttttttctttttctttttttttttgagacagagtcttgccctgtcgcctggctggagtggagtggcacaatcttggctcactgcaacctccacctcccaggtccaagcgattctcttgcctcagcctcccaagtagctgggactacaggcacacaccaccacgcccagctaatttttgtatttcttttttttttttttgtagagatggagtttcaccatgttggccaggatggtctcgatctcttaaccttgtgagccaccgtgcccaaccctaacaattatttttaaaaggaggaatttaaatgagctgtggattattcattttgtcccataagaagataattaaaaaatgacaaaaatgaactgaacaaaaaagttctaacaaaataataaggctgaatttttaaagtctcttccgcatcttctgttccctgggatgccttagacggggtgtgcagtattttaggtacatcgtgagcaaggagcctgcattcccagggggcggcagggacagcatgtaaggtcttagtccagctctgtgatctgaaggcaaagcctctatgtgtgaaacacaggggtacctcaaaaatagaacaagagcactccatccatgtgcggatgactgtcaaggtcactgagacctacagtgatctggaaaattaaagctctctggccgcctttcctctcaggacatacttctggagatcaaaaaaaaaaaaaaa

SEQ ID NO: 1085 - DNA, 2393 bp, Homo sapiens
ggccggcgcctcctcctggattcattcactcgctcttttcattcacgaaggtagtgaggcctagtggaaagccatggagagcgctctccccgccgccggcttcctgtactgggtcggcgcgggcaccgtggcctacctagccctgcgtatttcgtactcgctcttcacggccctccgggtctggggagtggggaatgaggcgggggtcggcccggggctcggagagtgggcagttgtcacaggtagtactgatggaattggaaaatcatatgcagaagagttagcaaagcatggaatgaaggttgtccttatcagcagatcaaaggataaacttgaccaggtttccagtgaaataaaagaaaaattcaaagtggagacaagaaccattgctgttgactttgcatcagaagatatttatgataaaattaaaacaggcttggctggtcttgaaatcggcatcttagtgaacaacgtgggaatgtcgtatgagtatcctgaatactttttggatgttcctgacttggacaatgtgatcaagaaaatgataaatattaatattctttctgtttgtaagatgacacaattggtactgcctggcatggtggaaagatccaaaggggctattctgaacatttcatctggcagtggcatgctccctgtcccactcttgaccatctattctgcaaccaagacttttgtagatttcttctctcagtgcctccatgaggagtataggagcaagggcgtctttgtgcagagtgtcctgccatacttcgtagctacaaaactggctaaaatccggaagccaactttggataagccctctccggagacgtttgtgaagtctgcaattaaaacagtcggcctgcaatcccgaaccaatggatacctgatccatgctcttatgggctcgataatctcaaacctgccttcttggatttatttgaaaatagtcatgaatatgaacaagtctacacgggctcactatctgaagaaaaccaagaagaactaagcatgataactgcattgtaacttggccagatgctccagcatatgcacgttcactgcaaagcaccctactggttttgaaaatctgaccttgtcatttcaatagttattaacatgactaaatattatcttaattaagaggaaaatagaagttgcttttaggggtttctgacatatattctggatactatccgaggtaattttgaagtttaatataaatgctcatatcaaatgaatatagaactaatattgtcgggaacacctaatagaaaggaatactattatagcaaatcacagaatgatagactcaagcataaaacttggcagttttatctgcttcaaaatgccattgatcattattcctgtattttctctgaaactgattataaaaaccaatgtccagctactcttttgtttttgacacttgaagaaatggagatcgatttgatttgtttataagcagacacactgcaatttacaaagatctctttacggttttataaaattatcttccagtttgtacatttatatggaattgttctttatcaagggtagctaatgacatgaaaataattgtgaaatatggaattatttctgacacatgaagcccactaaactatgctttcctataatgcatatttcttctcagtttaaatgtatgtaaatatcgaagctatatggtatgatttataaagataaatgggccaaagtgtacattgagactggcagccatctatggtaccactgaaaccctgacccagaaaagtggcttgcttggacacccagctgcctttgtttctgcattaaaccaatattgatcacacatatgacacaggctagtcctataaaagtaatgacttcatagaaatggcattataatttttaagttgatactctacaggtagctattgatataattagttttaataaaacatgctgcaaccatggtatacaacaaaaatacatttctttggtgattgaaattaaggccgtatttacaatgacttaatataagactgacttttatcctgcttcataacttgtatggagaactcaccaagaaagaattcaatactgtgaaatatgcagcaagaagattggtctttacctaggctgtgtttcctaagctctgagttttcagcaccagtagatttgtattaaaagaaaaaaaaatggggccttagcttctggcttttaattttgccagctaaggacataaaacaaaaataaacaaacaaaaacaaatagccatctgctatcagcatcattatgtaaaagaaaatatattttagcccctaaaattaggaagaatgtaatctcagaataaaggttgtcatttaagttgaataaatatatagctttatgaaaaacacaaaaaaaaaaaa

SEQ ID NO: 1086 - DNA, 3714 bp, Homo sapiens
cggggccggcgttctagcgcatcgcggccgggtgcgtcactcgcgaagtggaatttgcccagacaagcaacatggctcggaaacgcgcggccggcggggagccgcggggacgcgaactgcgcagccagaaatccaaggccaagagcaaggcccggcgtgaggaggaggaggaggatgcctttgaagatgagaaacccccaaagaagagccttctctccaaagtttcacaaggaaagaggaaaagaggctgcagtcatcctgggggttcagcagatggtccagcaaaaaagaaagtggccaaggtgactgttaaatctgaaaacctcaaggttataaaggatgaagccctcagcgatggggatgacctcagggactttccaagtgacctcaagaaggcacaccatctgaagagaggggctaccatgaatgaagacagcaatgaagaagaggaagaaagtgaaaatgattgggaagaggttgaagaacttagtgagcctgtgctgggtgacgtgagagaaagtacagccttctctcgatctcttctgcctgtgaagccagtggagatagagattgaaacgccagagcaggcgaagacaagagaaagaagtgaaaagataaaactggagtttgagacatatcttcggagggcgatgaaacgtttcaataaaggggtccatgaggacacacacaaggttcaccttctctgcctgctagcaaatggcttctatcgaaataacatctgcagccagccagatctgcatgctattggcctgtccatcatcccagcccgctttaccagagtgctgcctcgagatgtggacacctactacctctcaaacctggtgaagtggttcattggaacatttacagttaatgcagaactttcagccagtgaacaagataacctgcagactacattggaaaggagatttgctatttactctgctcgagatgatgaggaattggtccatatattcttactgattctccgggctctgcagctcttgacccggctggtattgtctctacagccaattcctctgaagtcagcaacagcaaagggaaagaaaccttccaaggaaagattgactgcggatccaggaggctcctcagaaacttccagccaagttctagaaaaccacaccaaaccaaagaccagcaaaggaaccaaacaagaggaaacctttgctaagggcacctgcaggccaagtgccaaagggaagaggaacaagggaggcagaaagaaacggagcaagccctcctccagcgaggaagatgagggcccaggagacaagcaggagaaggcaacccagcgacgtccgcatggccgggagcggcgggtggcctccagggtgtcttataaagaggagagtgggagtgatgaggctggcagcggctctgattttgagctctccagtggagaagcctctgatccctctgatgaggattccgaacctggccctccaaagcagaggaaagcccccgctcctcagaggacaaaggctgggtccaagagtgcctccaggacccatcgtgggagccatcgtaaggacccaagcttgccagcggcatcctcaagctcttcaagcagtaaaagaggcaagaaaatgtgcagcgatggtgagaaggcagaaaaaagaagcatagctggtatagaccagtggctagaggtgttctgtgagcaggaggaaaagtgggtatgtgtagactgtgtgcacggtgtggtgggccagcctctgacctgttacaagtacgccaccaagcccatgacctatgtggtgggcattgacagtgacggctgggtccgagatgtcacacagaggtacgacccagtctggatgacagtgacccgcaagtgccgggttgatgctgagtggtgggccgagaccttgagaccataccagagcccatttatggacagggagaagaaagaagacttggagtttcaggcaaaacacatggaccagcctttgcccactgccattggcttatataagaaccaccctctgtatgccctgaagcggcatctcctgaaatatgaggccatctatcccgagacagctgccatccttgggtattgtcgtggagaagcggtctactccagggattgtgtgcacactctgcattccagggacacgtggctgaagaaagcaagagtggtgaggcttggagaagtaccctacaagatggtgaaaggcttttctaaccgtgctcggaaagcccgacttgctgagccccagctgcgggaagaaaatgacctgggcctgtttggctactggcagacagaggagtatcagcccccagtggccgtggacgggaaggtgccccggaacgagtttgggaatgtgtacctcttcctgcccagcatgatgcctattggctgtgtccagctgaacctgcccaatctacaccgcgtggcccgcaagctggacatcgactgtgtccaggccatcactggctttgatttccatggcggctactcccatcccgtgactgatggatacatcgtctgcgaggaattcaaagacgtgctcctgactgcctgggaaaatgagcaggcagtcattgaaaggaaggagaaggagaaaaaggagaagcgggctctagggaactggaagttgctggccaaaggtctgctcatcagggagaggctgaagcgtcgctacgggcccaagagtgaggcagcagctccccacacagatgcaggaggtggactctcttctgatgaagaggaggggaccagctctcaagcagaagcggccaggatactggctgcctcctggcctcaaaaccgagaagatgaagaaaagcagaagctgaagggtgggcccaagaagaccaaaagggaaaagaaagcagcagcttcccacctgttcccatttgagaagctgtgagctgagcgcccactagaggggcacccaccagttgctgctgccccactacaggccccacacctgccctgggcatgcccagcccctggtggtgggggcttctctgctgagaaggcaaactgaggcagcatgcacggaggcggggtcaggggagacgaggccaagctgaggaggtgctgcaggtcccgtctggctccagcccttgtcagattcacccagggtgaagccttcaaagctttttgctaccaaagcccactcaccctttgagctacagaacactttgctaggagatactcttctgcctcctagacctgttctttccatctttagaaacatcagtttttgtatggaagccaccgggagatttctggatggtggtgcatccgtgaatgcgctgatcgtttcttccagttagagtcttcatctgtccgacaagttcactcgcctcggttgcggacctaggaccatttctctgcaggccacttaccttcccctgagtcaggcttactaatgctgccctcactgcctctttgcagtaggggagagagcagagaagtacaggtcatctgctgggatctagttttccaagtaacattttgtggtgacagaagcctaaaaaaagctaaaatcaggaaagaaaaggaaaaatacgaattgaaaattaaggaaatgttagtaaaatagatcagtgttaaactagattgtattcattactagataaaatgtataaagctctctgtactaaggagaaatgacttttataacattttgagaaaataataaagcatttatctaaaaaaaaaaaaaaaaaaaaaaaaaaaaa

SEQ ID NO: 1087 - DNA, 7051 bp, Homo sapiens
cattctttgccaggctactttccccattgttcaagatgtgttttctcaggcatctccgtgccctggcttgtcattcagccagcatgtgagagaagactcaacaagatcagaaaccaaggaagaagaaatcaccagtctcttcccaggggatccagggacagggctgtcgtcactcatggcctttttcactttctttagttccacctactccccaaggtcttaccctccccaggatggagccccaggaaaccaggtcctggcagtccctcttgagatgccagaggcctaggtgagctgtgcttccctctgccttgcttgggattctctcaccgctccctgaatctggcctcagcctctgtctcttgccccagcatgacacacggcagagtatgaaccccagctgctgccttcctaccctccctctgcttctcttctggaggctgccaaggattggatgtccactgggcttggagttccaatcatccaggtggggaagctgagtttccatccaggaaagtgattgaatggaggtcccttggaaagacgagaggccaggtccatggcccagggatcctagtgcttgatcaggttctcttttcaggacttcttggagctgtggttaggcctccatgttagcaacagacacccactccagaccctcacctcttgaccctggcattactggcgctgcccctgcctcattctaaaatagatggaaagactgatgagccctgggaattctttcaggatttggtgacatttgatgatgtggcatggtacctcaccacaagggagtggtttaagctggaccctgaacagagggcactggaatattatgggaacgtgggcgttcctgttttaaatcctgccttggtccctcacctggcacaaggacaagtgctactggtgtcagacccatcgcccaacactgatcctgctaagtactctgaaagcacctccgcgacccgacaccagatgaagggggaagatgcccagccacaggagatggcgtccacaagcttcccaagggccagtggtcccagtcctgaattcagacagcacggggactctgacgggaagagagggagcccacagaatctgcccatagaacatcattttgcttgtaaagagtgtggggacacctttcggcttaaagtcctgcttgtccagcaccagagagtccacagtgaggagaagggctgggaatgtggcgactgcgggaaggtctttaggggggtggcggagtttaatgagcacaggaaaagccacgtagctgcggagccccagcccggccccagtagggccctggagaatgccgcggagaagagggagcagatggagagggaggcaaagcccttcgagtgcgaggagtgcggaaaacggtttaagaagaatgcaggcctgagtcagcatctgagggtccacagcagagagaagccctttgattgcgaggaatgcgggcggtcgttcaaagtcaacacccacctcttccgacatcagaaacttcacacttcggaaaagcctttcgcctgcaaggcgtgcagcagggatttcctggatcgccaggagcttctcaagcaccagcgcatgcacactggccacctgcccttcgactgcgacgactgcggcaagtccttccgaggggtcaacgggctggccgagcaccagcgcatccacagtggggccaagccatacgggtgtccccactgcggcaagctcttccgaaggagctcggagctcaccaagcaccggcggatccacacgggcgagaagccctacgcctgcggccagtgcggcaaggccttccgccagagctccagcctcctggagcacgcacgcatccacagtggcgagcggccctacgcatgcggcgagtgtggcaaggccttccgtgggccctctgacctcatcaagcaccggcgcatccacagcggactgaaaccctatgagtgcgacaaatgcggcaaggccttccgccggagctccggcctcagtcgccaccggcggatccacagtggggcgcggcgctgcgaatgcagccagtgtggccgcgtgttcaagaggcgctcggcactgcagaagcatcagccaacccaccacgagtagaaacgccctgtggtcccgcgggacagggacggagtccccagaggggatggcagagtcaaaggagatgaacagttttgtagcgcttatatattttgtcttccaaaaggttgagaccgatttatactgccaccagcaatttataagtgttacgttatgcccatcaagagtagcttgtaccatttaacttagtttggctagtttaactggtaggaagtaccatcaaggtatttcagtccacatgccttgaatccaagaatgagagaggacaaatctggatgtggggtagggaggggcttagaggtcatcaactccaagctccccccgccccagagaaacacacagagctgttccacgatggcgtcctcataatgtgatcccagctttcctgaagagaacgttgccctcatgatttttggcctacttgaatttataaatttttagggatgtaaatagaacactcaaatgtcttaaaatatttaatttattaatttagttatacatacatactgtaaatcacatattatataaaataatatattaatttagaaaataccccatttttgccaccctccctttcacgaaatcattttactctgactcctcaccgtcttcaccaacatgggaaccctgtttgagtcatcagacagtttcaagacacacccagtcacttccatccgagctctgcacggtcgctcagtgacgatcccttcatgaggctctcattagaaattttctcccaagccataagaccatatttgcagaacattaggacgatttctcttgtcgttttttaatctgtcctgtgactgtacaatataaccacttaaggtcatactttttcaaacaacctttaaacgtcttttcttttaaagcacccaaaatgtcattgtgaggccaaacgcctagtaacagttactgaatctgggttaaatgtcggtatctttttttcttaaaccatttcaatttggtgtcccctatacatatccaaaactagcatcgattggggttgttttgaactaatgggtcttgtcctcaagcagcactattttgttcaaaataaaatagttgagagcatgcccctaagaagagatacatctcaaggactcaagtgcagggtgacgcctccttttggaaatgagcctctcctggtatcaggcctagatggtacttctccagccttccgtttcttgttctataaaacaggggtgatcacagcacctacctccgaaggttatcacgaggactgccatcgtggctgcagagtgccaggaccaccggcctggtatggaggtacacactcagtgaaggccatctgctgtcattgtcattgtcatagttattgccgtcattctgtggcttgtcaattccagaactggggatagaccccaggcctcctgaccaccagtctcatctttctcttatgcgatgacttaaatggtgtttctgttttttgcatgcaaatggtccgttcatctcctttgactagttatcaacttaccttcggatatattaactttatgtagcagttctttctatattgatggtgatgttctcttttccaattttattgctttgctttttgtagcagttttattacgtttttgttgtgaaagcttttaatttttacatatccaagcattcattttttgtccactcagtcataactttcattgcttctgtagctagatatgatgacattttctctagaattttaattacaaacaaaaagctgcaaccccagcccatcagaaggtgagtacaccaggtgggcaggctggatggaaatgggccagagaagcaggctctttcctcatccgagatgcggactccctgtctatctgtgggcaccacttgactatccaacctgaccactgcggcacactggagatgctcccatcatagattagccagaactctgtgactgctcatcattatagaccccgccagcagcagtggggcttggcctcacctagatcaatggagtggtccaaacttggtctgggagcaagcagcccagccatcctttgagctcctgggagccttggcaatgctccgagtggattcagtgactgagcagcagattcacccaagaaacatctccttggacacaagaagacttgcctagaccacatcctcctttcagccggtgactctagaactagaaagagattggttcataggcttctgctgtgggcagctaggggaaaattcacccatgtgttctggcatcacttcctatagccacacctaagtgagggcaacagagcagaggctcggagaggaaccctgcccctccgatggcttgtgcgttatgctgatagaagctggcagcactgccctgggctatgatttgcaacagccatgcccaggaggagcactaaagcaaaggtttggagggcagtggaacccttctgaaagcctgtgtggcatagaagtagaagctggtcctcctgggtctgagctaccatttccagtgggctcccccaagaggaacagcagcaagggctagcgaggaacctgcccctccagtggcccacagaagccacagatagaagccagccccaccagggctgtgctgtgacttcccagcagctgtggctggggacagggacactaggagggcctggcaaggaagtgtgcccttctcgtgggcccaccaaggctgaggcagagcttcctagcagacacaacttggaagggcttctcaggcacccatcctgacccccaggctggagaggagccaaaagcacttgttacatagtgattccttttgccctgtgggcctcagttcttgcagtagttgtgaatctgtgtctgaaatcactactttcttctcggatcctttttctcttttcgagttgttaggatgtgttttgtacagctgtcatttgataaagaaggttgacctctaccaggggcaagtctggcacctttacctagaagtactctgccatgtcttgcccgttcatttatcgtttgttgggtttcatgagggatcccattgaagtagatcccttttatgaagggatcccattgaatgcagcattaactcagaacgtagcataaagtcgtcactgctcccagctgggacgtggtgtcttggcatcccttcctgccgtccttgactctttcccatcttcagttctataattttctcccaaacaaatgctcttttagagttaacactaaagatctggtctttgccgtcaaggttgacagaacagctgttcatggtgtttgcggtgaaacccgtgttctctttcaatgcagtctgtggctttaacgtgtgtcctgtaatttcgccaagatcatttcttgcctctggtaacttgggggtggatttccttgggctctctaggtgtactgctatgtcagatgcaaaatgtcacccagcttcctgtcacatatccttgtctgtgcattcatgcatctacctcattccggttttctttctaatctcatgtattcctgttgtgaggaaatgtgttcttttcccgatccttttgtagttcatacacatgacaattgggtttccacgcacgtgcatgagatgttcctccttcaaaccttgttactatgtcagcacattaactgcctggcatggaaaaagaaaaaaaaaaaagaaatatgttcttttcctaccatttgaaaaaaatcctccattgcttttattagagttttgaatacttgtgaaaattttcaaaagaaagtaattgattaccatttttgctgcttattacgatgagctgtgtccattagctgtgtcaccccactcttgcatttccagaatagtccctacccaattgcagcgggcatgtttttgagtggtgttgcattccatgtgcttgattttgtcctagaactggcacagcgcctgccctacctgcagccctgggttgtggccctgttgcgtaccatgtgatttgccaccccgcttctaggccatattaattcagccagaactgaacacctgacccaagggcagcaagcaatcatcagagcatagagctgacagaacatgatggaccacggacaccaccaggccttccagatctgaaatgcaaacaaggaaacagaagcttctaggcatcagaaggtgtggggagcagcacagtactcagaggagtgaggagcgtggcgcctgctgggaggaaggcctggccatggtatgttcttggatttctggcagcagccctcattggtccacgtgcgtccccactacagactccttgacttgagccagcttgagtgggtctctactcttttctattgtgttttgccacttggctgcttcctggccaagtcgcacctgactgcatgaacacctgttcaaacgtgtgttctctgttctctaagatgggtgaaagtcgatgccttctagtctcagtgaatttaacctgtgattttatgtctacgtatattgttcctttactgaacccaccacatgcgggccataaaatgagtgaaatcacagtgcaccctgttctcttatttttgaagtgtttcacgatttccagcatgtccatcagatggggggattgctaacttctctcttactcatgtacttacattctgtagttctcattgcatcactttggatgtttactttgaaaagcagaaactgtctctttaaacttggccctcaatgtcatttgcgtatctctgagaacaatagctatgtcccaccccagtttgtatttccgttggttgttggcacttttttctcattcccccatctcattaccttgtctgttttctggcactcactataatcagccttgcactagagctgtttgtggacttggcttcaccccctcctcctcagccctcccccacccattaaattgtgagctcttagaagacaggggtggcctttcatgtctgatcccctaccaaatctagcacagtgccttgcatcaagtagatttcaataaatatatgttaa

SEQ ID NO: 1088 - DNA, 6539 bp, Homo sapiens
gctgtcgaagtccacgtgtctgggaagagcatgaagttaaatgtgtgagctctgagtgggtggacagagagaagacagggtgaagatcacctcctcagggtggccacttgatactccacagagcctccccaaggtgggcccagaggctgccttcctcaagctcctggaaggagcctgaccttgggaaacacctttgaactgaatgaatgacttgcctaaagcctggtctttgaagattgaagggggttccccttcaaaggccttgcctatgttcctccactattctcatgtcatctctggctgttgccataaccaatctcctttcccatgagcaggcgttcctgttttaaatcctgccttggtccctcacctggcacaaggacaagtgctactggtgtcagacccatcgcccaacactgatcctgctaagtactctgaaagcacctccgcgacccgacaccagatgaagggggaagatgcccagccacaggagatggcgtccacaagcttcccaagggccagtggtcccagtcctgaattcagacagcacggggactctgacgggaagagagggagcccacagaatctgcccatagaacatcattttgcttgtaaagagtgtggggacacctttcggcttaaagtcctgcttgtccagcaccagagagtccacagtgaggagaagggctgggaatgtggcgactgcgggaaggtctttaggggggtggcggagtttaatgagcacaggaaaagccacgtagctgcggagccccagcccggccccagtagggccctggagaatgccgcggagaagagggagcagatggagagggaggcaaagcccttcgagtgcgaggagtgcggaaaacggtttaagaagaatgcaggcctgagtcagcatctgagggtccacagcagagagaagccctttgattgcgaggaatgcgggcggtcgttcaaagtcaacacccacctcttccgacatcagaaacttcacacttcggaaaagcctttcgcctgcaaggcgtgcagcagggatttcctggatcgccaggagcttctcaagcaccagcgcatgcacactggccacctgcccttcgactgcgacgactgcggcaagtccttccgaggggtcaacgggctggccgagcaccagcgcatccacagtggggccaagccatacgggtgtccccactgcggcaagctcttccgaaggagctcggagctcaccaagcaccggcggatccacacgggcgagaagccctacgcctgcggccagtgcggcaaggccttccgccagagctccagcctcctggagcacgcacgcatccacagtggcgagcggccctacgcatgcggcgagtgtggcaaggccttccgtgggccctctgacctcatcaagcaccggcgcatccacagcggactgaaaccctatgagtgcgacaaatgcggcaaggccttccgccggagctccggcctcagtcgccaccggcggatccacagtggggcgcggcgctgcgaatgcagccagtgtggccgcgtgttcaagaggcgctcggcactgcagaagcatcagccaacccaccacgagtagaaacgccctgtggtcccgcgggacagggacggagtccccagaggggatggcagagtcaaaggagatgaacagttttgtagcgcttatatattttgtcttccaaaaggttgagaccgatttatactgccaccagcaatttataagtgttacgttatgcccatcaagagtagcttgtaccatttaacttagtttggctagtttaactggtaggaagtaccatcaaggtatttcagtccacatgccttgaatccaagaatgagagaggacaaatctggatgtggggtagggaggggcttagaggtcatcaactccaagctccccccgccccagagaaacacacagagctgttccacgatggcgtcctcataatgtgatcccagctttcctgaagagaacgttgccctcatgatttttggcctacttgaatttataaatttttagggatgtaaatagaacactcaaatgtcttaaaatatttaatttattaatttagttatacatacatactgtaaatcacatattatataaaataatatattaatttagaaaataccccatttttgccaccctccctttcacgaaatcattttactctgactcctcaccgtcttcaccaacatgggaaccctgtttgagtcatcagacagtttcaagacacacccagtcacttccatccgagctctgcacggtcgctcagtgacgatcccttcatgaggctctcattagaaattttctcccaagccataagaccatatttgcagaacattaggacgatttctcttgtcgttttttaatctgtcctgtgactgtacaatataaccacttaaggtcatactttttcaaacaacctttaaacgtcttttcttttaaagcacccaaaatgtcattgtgaggccaaacgcctagtaacagttactgaatctgggttaaatgtcggtatctttttttcttaaaccatttcaatttggtgtcccctatacatatccaaaactagcatcgattggggttgttttgaactaatgggtcttgtcctcaagcagcactattttgttcaaaataaaatagttgagagcatgcccctaagaagagatacatctcaaggactcaagtgcagggtgacgcctccttttggaaatgagcctctcctggtatcaggcctagatggtacttctccagccttccgtttcttgttctataaaacaggggtgatcacagcacctacctccgaaggttatcacgaggactgccatcgtggctgcagagtgccaggaccaccggcctggtatggaggtacacactcagtgaaggccatctgctgtcattgtcattgtcatagttattgccgtcattctgtggcttgtcaattccagaactggggatagaccccaggcctcctgaccaccagtctcatctttctcttatgcgatgacttaaatggtgtttctgttttttgcatgcaaatggtccgttcatctcctttgactagttatcaacttaccttcggatatattaactttatgtagcagttctttctatattgatggtgatgttctcttttccaattttattgctttgctttttgtagcagttttattacgtttttgttgtgaaagcttttaatttttacatatccaagcattcattttttgtccactcagtcataactttcattgcttctgtagctagatatgatgacattttctctagaattttaattacaaacaaaaagctgcaaccccagcccatcagaaggtgagtacaccaggtgggcaggctggatggaaatgggccagagaagcaggctctttcctcatccgagatgcggactccctgtctatctgtgggcaccacttgactatccaacctgaccactgcggcacactggagatgctcccatcatagattagccagaactctgtgactgctcatcattatagaccccgccagcagcagtggggcttggcctcacctagatcaatggagtggtccaaacttggtctgggagcaagcagcccagccatcctttgagctcctgggagccttggcaatgctccgagtggattcagtgactgagcagcagattcacccaagaaacatctccttggacacaagaagacttgcctagaccacatcctcctttcagccggtgactctagaactagaaagagattggttcataggcttctgctgtgggcagctaggggaaaattcacccatgtgttctggcatcacttcctatagccacacctaagtgagggcaacagagcagaggctcggagaggaaccctgcccctccgatggcttgtgcgttatgctgatagaagctggcagcactgccctgggctatgatttgcaacagccatgcccaggaggagcactaaagcaaaggtttggagggcagtggaacccttctgaaagcctgtgtggcatagaagtagaagctggtcctcctgggtctgagctaccatttccagtgggctcccccaagaggaacagcagcaagggctagcgaggaacctgcccctccagtggcccacagaagccacagatagaagccagccccaccagggctgtgctgtgacttcccagcagctgtggctggggacagggacactaggagggcctggcaaggaagtgtgcccttctcgtgggcccaccaaggctgaggcagagcttcctagcagacacaacttggaagggcttctcaggcacccatcctgacccccaggctggagaggagccaaaagcacttgttacatagtgattccttttgccctgtgggcctcagttcttgcagtagttgtgaatctgtgtctgaaatcactactttcttctcggatcctttttctcttttcgagttgttaggatgtgttttgtacagctgtcatttgataaagaaggttgacctctaccaggggcaagtctggcacctttacctagaagtactctgccatgtcttgcccgttcatttatcgtttgttgggtttcatgagggatcccattgaagtagatcccttttatgaagggatcccattgaatgcagcattaactcagaacgtagcataaagtcgtcactgctcccagctgggacgtggtgtcttggcatcccttcctgccgtccttgactctttcccatcttcagttctataattttctcccaaacaaatgctcttttagagttaacactaaagatctggtctttgccgtcaaggttgacagaacagctgttcatggtgtttgcggtgaaacccgtgttctctttcaatgcagtctgtggctttaacgtgtgtcctgtaatttcgccaagatcatttcttgcctctggtaacttgggggtggatttccttgggctctctaggtgtactgctatgtcagatgcaaaatgtcacccagcttcctgtcacatatccttgtctgtgcattcatgcatctacctcattccggttttctttctaatctcatgtattcctgttgtgaggaaatgtgttcttttcccgatccttttgtagttcatacacatgacaattgggtttccacgcacgtgcatgagatgttcctccttcaaaccttgttactatgtcagcacattaactgcctggcatggaaaaagaaaaaaaaaaaagaaatatgttcttttcctaccatttgaaaaaaatcctccattgcttttattagagttttgaatacttgtgaaaattttcaaaagaaagtaattgattaccatttttgctgcttattacgatgagctgtgtccattagctgtgtcaccccactcttgcatttccagaatagtccctacccaattgcagcgggcatgtttttgagtggtgttgcattccatgtgcttgattttgtcctagaactggcacagcgcctgccctacctgcagccctgggttgtggccctgttgcgtaccatgtgatttgccaccccgcttctaggccatattaattcagccagaactgaacacctgacccaagggcagcaagcaatcatcagagcatagagctgacagaacatgatggaccacggacaccaccaggccttccagatctgaaatgcaaacaaggaaacagaagcttctaggcatcagaaggtgtggggagcagcacagtactcagaggagtgaggagcgtggcgcctgctgggaggaaggcctggccatggtatgttcttggatttctggcagcagccctcattggtccacgtgcgtccccactacagactccttgacttgagccagcttgagtgggtctctactcttttctattgtgttttgccacttggctgcttcctggccaagtcgcacctgactgcatgaacacctgttcaaacgtgtgttctctgttctctaagatgggtgaaagtcgatgccttctagtctcagtgaatttaacctgtgattttatgtctacgtatattgttcctttactgaacccaccacatgcgggccataaaatgagtgaaatcacagtgcaccctgttctcttatttttgaagtgtttcacgatttccagcatgtccatcagatggggggattgctaacttctctcttactcatgtacttacattctgtagttctcattgcatcactttggatgtttactttgaaaagcagaaactgtctctttaaacttggccctcaatgtcatttgcgtatctctgagaacaatagctatgtcccaccccagtttgtatttccgttggttgttggcacttttttctcattcccccatctcattaccttgtctgttttctggcactcactataatcagccttgcactagagctgtttgtggacttggcttcaccccctcctcctcagccctcccccacccattaaattgtgagctcttagaagacaggggtggcctttcatgtctgatcccctaccaaatctagcacagtgccttgcatcaagtagatttcaataaatatatgttaa

SEQ ID NO: 1089 - DNA, 5746 bp, Homo sapiens
gctgtcgaagtccacgtgtctgggaagagcatgaagttaaatgtgtgagctctgagtgggtggacagagagaagacagggtgaagatcacctcctcagggtggccacttgatactccacagagcctccccaaggtgggcccagaggctgccttcctcaagctcctggaaggagcctgaccttgggaaacacctttgaactgaatgaatgacttgcctaaagcctggtctttgaagattgaagggggttccccttcaaaggccttgcctatgttcctccactattctcatgtcatctctggctgttgccataaccaatctcctttcccatgagcaggcgttcctgttttaaatcctgccttggtccctcacctggcacaaggacaagtgctactggtgtcagacccatcgcccaacactgatcctgctaagtactctgaaagcacctccgcgacccgacaccagatgaagggggaagatgcccagccacaggagatggcgtccacaagcttcccaagggccagtggtcccagtcctgaattcagacagcacggggactctgacgggaagagagggagcccacagaatctgcccatagaacatcattttgcttgtaaagagtgtggggacacctttcggcttaaagtcctgcttgtccagcaccagagagtccacagtgaggagaagggctgggaatgtggcgactgcgggaaggtctttaggggggtggcggagtttaatgagcacaggaaaagccacgtagctgcggagccccagcccggccccagtagggccctggagaatgccgcggagaagagggagcagatggagagggaggcaaagcccttcgagtgcgaggagtgcggaaaacggtttaagaagaatgcaggcctgagtcagcatctgagggtccacagcagagagaagccctttgattgcgaggaatgcgggcggtcgttcaaagtcaacacccacctcttccgacatcagaaacttcacacttcggaaaagcctttcgcctgcaaggcgtgcagcagggatttcctggatcgccaggagcttctcaagcaccagcgcatgcacactggccacctgcccttcgactgcgacgactgcggcaagtccttccgaggggtcaacgggctggccgagcaccagcgcatccacagtggggccaagccatacgggtgtccccactgcggcaagctcttccgaaggagctcggagctcaccaagcaccggcggatccacacgggcgagaagccctacgcctgcggccagtgcggcaaggccttccgccagagctccagcctcctggagcacgcacgcatccacagtggcgagcggccctacgcatgcggcgagtgtggcaaggccttccgtgggccctctgacctcatcaagcaccggcgcatccacagcggactgaaaccctatgagtgcgacaaatgcggcaaggccttccgccggagctccggcctcagtcgccaccggcggatccacagtggggcgcggcgctgcgaatgcagccagtgtggccgcgtgttcaagaggcgctcggcactgcagaagcatcagccaacccaccacgagtagaaacgccctgtggtcccgcgggacagggacggagtccccagaggggatggcagagtcaaaggagatgaacagttttgtagcgcttatatattttgtcttccaaaaggttgagaccgatttatactgccaccagcaatttataagtgttacgttatgcccatcaagagtagcttgtaccatttaacttagtttggctagtttaactggtaggaagtaccatcaaggtatttcagtccacatgccttgaatccaagaatgagagaggacaaatctggatgtggggtagggaggggcttagaggtcatcaactccaagctccccccgccccagagaaacacacagagctgttccacgatggcgtcctcataatgtgatcccagctttcctgaagagaacgttgccctcatgatttttggcctacttgaatttataaatttttagggatgtaaatagaacactcaaatgtcttaaaatatttaatttattaatttagttatacatacatactgtaaatcacatattatataaaataatatattaatttagaaaataccccatttttgccaccctccctttcacgaaatcattttactctgactcctcaccgtcttcaccaacatgggaaccctgtttgagtcatcagacagtttcaagacacacccagtcacttccatccgagctctgcacggtcgctcagtgacgatcccttcatgaggctctcattagaaattttctcccaagccataagaccatatttgcagaacattaggacgatttctcttgtcgttttttaatctgtcctgtgactgtacaatataaccacttaaggtcatactttttcaaacaacctttaaacgtcttttcttttaaagcacccaaaatgtcattgtgaggccaaacgcctagtaacagttactgaatctgggttaaatgtcggtatctttttttcttaaaccatttcaatttggtgtcccctatacatatccaaaactagcatcgattggggttgttttgaactaatgggtcttgtcctcaagcagcactattttgttcaaaataaaatagttgagagcatgcccctaagaagagatacatctcaaggactcaagtgcagggtgacgcctccttttggaaatgagcctctcctggtatcaggcctagatggtacttctccagccttccgtttcttgttctataaaacaggggtgatcacagcacctacctccgaaggttatcacgaggactgccatcgtggctgcagagtgccaggaccaccggcctggtatggaggtacacactcagtgaaggccatctgctgtcattgtcattgtcatagttattgccgtcattctgtggcttgtcaattccagaactggggatagaccccaggcctcctgaccaccagtctcatctttctcttatgcgatgacttaaatggtgtttctgttttttgcatgcaaatggtccgttcatctcctttgactagttatcaacttaccttcggatatattaactttatgtagcagttctttctatattgatggtgatgttctcttttccaattttattgctttgctttttgtagcagttttattacgtttttgttgtgaaagcttttaatttttacatatccaagcattcattttttgtccactcagtcataactttcattgcttctgtagctagatatgatgacattttctctagaattttaattacaaacaaaaagctgcaaccccagcccatcagaaggtgagtacaccaggtgggcaggctggatggaaatgggccagagaagcaggctctttcctcatccgagatgcggactccctgtctatctgtgggcaccacttgactatccaacctgaccactgcggcacactggagatgctcccatcatagattagccagaactctgtgactgctcatcattatagaccccgccagcagcagtggggcttggcctcacctagatcaatggagtggtccaaacttggtctgggagcaagcagcccagccatcctttgagctcctgggagccttggcaatgctccgagtggattcagtgactgagcagcagattcacccaagaaacatctccttggacacaagaagacttgcctagaccacatcctcctttcagccggtgactctagaactagaaagagattggttcataggcttctgctgtgggcagctaggggaaaattcacccatgtgttctggcatcacttcctatagccacacctaagtgagggcaacagagcagaggctcggagaggaaccctgcccctccgatggcttgtgcgttatgctgatagaagctggcagcactgccctgggctatgatttgcaacagccatgcccaggaggagcactaaagcaaaggtttggagggcagtggaacccttctgaaagcctgtgtggcatagaagtagaagctggtcctcctgggtctgagctaccatttccagtgggctcccccaagaggaacagcagcaagggctagcgaggaacctgcccctccagtggcccacagaagccacagatagaagccagccccaccagggctgtgctgtgacttcccagcagctgtggctggggacagggacactaggagggcctggcaaggaagtgtgcccttctcgtgggcccaccaaggctgaggcagagcttcctagcagacacaacttggaagggcttctcaggcacccatcctgacccccaggctggagaggagccaaaagcacttgttacatagtgattccttttgccctgtgggcctcagttcttgcagtagttgtgaatctgtgtctgaaatcactactttcttctcggatcctttttctcttttcgagttgttaggatgtgttttgtacagctgtcatttgataaagaaggttgacctctaccaggggcaagtctggcacctttacctagaagtactctgccatgtcttgcccgttcatttatcgtttgttgggtttcatgagggatcccattgaagtagatcccttttatgaagggatcccattgaatgcagcattaactcagaacgtagcataaagtcgtcactgctcccagctgggacgtggtgtcttggcatcccttcctgccgtccttgactctttcccatcttcagttctataattttctcccaaacaaatgctcttttagagttaacactaaagatctggtctttgccgtcaaggttgacagaacagctgttcatggtgtttgcggtgaaacccgtgttctctttcaatgcagtctgtggctttaacgtgtgtcctgtaatttcgccaagatcatttcttgcctctggtaacttgggggtggatttccttgggctctctaggtgtactgctatgtcagatgcaaaatgtcacccagcttcctgtcacatatccttgtctgtgcattcatgcatctacctcattccggttttctttctaatctcatgtattcctgttgtgaggaaatgtgttcttttcccgatccttttgtagttcatacacatgacaattgggtttccacgcacgtgcatgagatgttcctccttcaaaccttgttactatgtcagcacattaactgcctggcatggaaaaagaaaaaaaaaaaagaaatatgttcttttcctaccatttgaaaaaaatcctccattgcttttattagagttttgaatacttgtgaaaattttcaaaagaaagtaattgattaccatttttgctgcttattacgatgagctgtgtccattagctgtgtcaccccactcttgcatttccagaatagtccctacccaattgcagcgggcatgtttttgagtggtgttgcattccatgtgcttgattttgtcctagaactggcacagcgcctgccctacctgcagccctgggttgtggccctgttgcgtaccatgtgatttgccaccccgcttctaggccatattaattcagccagaactgaacacctgacccaagggcagcaagcaatcatcagagcatagagctgacagaacatgatggaccacggacaccaccaggccttccagatctgaaatgcaaacaaggaaacagaagcttctaggcatcagaaggcctggccatggtatgttcttggatttctggcagcagccctcattggtccacgtgc

SEQ ID NO: 1090 - DNA, 6243 bp, Homo sapiens
gctgtcgaagtccacgtgtctgggaagagcatgaagttaaatgtgtgagctctgagtgggtggacagagagaagacagggtgaagatcacctcctcagggtggccacttgatactccacagagcctccccaaggtgggcccagaggctgccttcctcaagctcctggaaggagcctgaccttgggaaacacctttgaactgaatgaatgacttgcctaaagcctggtctttgaagattgaagggggttccccttcaaaggccttgcctatgttcctccactattctcatgtcatctctggctgttgccataaccaatctcctttcccatgagcaggcgttcctgttttaaatcctgccttggtccctcacctggcacaaggacaagtgctactggtgtcagacccatcgcccaacactgatcctgctaagtactctgaaagcacctccgcgacccgacaccagatgaagggggaagatgcccagccacaggagatggcgtccacaagcttcccaagggccagtggtcccagtcctgaattcagacagcacggggactctgacgggaagagagggagcccacagaatctgcccatagaacatcattttgcttgtaaagagtgtggggacacctttcggcttaaagtcctgcttgtccagcaccagagagtccacagtgaggagaagggctgggaatgtggcgactgcgggaaggtctttaggggggtggcggagtttaatgagcacaggaaaagccacgtagctgcggagccccagcccggccccagtagggccctggagaatgccgcggagaagagggagcagatggagagggaggcaaagcccttcgagtgcgaggagtgcggaaaacggtttaagaagaatgcaggcctgagtcagcatctgagggtccacagcagagagaagccctttgattgcgaggaatgcgggcggtcgttcaaagtcaacacccacctcttccgacatcagaaacttcacacttcggaaaagcctttcgcctgcaaggcgtgcagcagggatttcctggatcgccaggagcttctcaagcaccagcgcatgcacactggccacctgcccttcgactgcgacgactgcggcaagtccttccgaggggtcaacgggctggccgagcaccagcgcatccacagtggggccaagccatacgggtgtccccactgcggcaagctcttccgaaggagctcggagctcaccaagcaccggcggatccacacgggcgagaagccctacgcctgcggccagtgcggcaaggccttccgccagagctccagcctcctggagcacgcacgcatccacagtggcgagcggccctacgcatgcggcgagtgtggcaaggccttccgtgggccctctgacctcatcaagcaccggcgcatccacagcggactgaaaccctatgagtgcgacaaatgcggcaaggccttccgccggagctccggcctcagtcgccaccggcggatccacagtggggcgcggcgctgcgaatgcagccagtgtggccgcgtgttcaagaggcgctcggcactgcagaagcatcagccaacccaccacgagtagaaacgccctgtggtcccgcgggacagggacggagtccccagaggggatggcagagtcaaaggagatgaacagttttgtagcgcttatatattttgtcttccaaaaggttgagaccgatttatactgccaccagcaatttataagtgttacgttatgcccatcaagagtagcttgtaccatttaacttagtttggctagtttaactggtaggaagtaccatcaaggtatttcagtccacatgccttgaatccaagaatgagagaggacaaatctggatgtggggtagggaggggcttagaggtcatcaactccaagctccccccgccccagagaaacacacagagctgttccacgatggcgtcctcataatgtgatcccagctttcctgaagagaacgttgccctcatgatttttggcctacttgaatttataaatttttagggatgtaaatagaacactcaaatgtcttaaaatatttaatttattaatttagttatacatacatactgtaaatcacatattatataaaataatatattaatttagaaaataccccatttttgccaccctccctttcacgaaatcattttactctgactcctcaccgtcttcaccaacatgggaaccctgtttgagtcatcagacagtttcaagacacacccagtcacttccatccgagctctgcacggtcgctcagtgacgatcccttcatgaggctctcattagaaattttctcccaagccataagaccatatttgcagaacattaggacgatttctcttgtcgttttttaatctgtcctgtgactgtacaatataaccacttaaggtcatactttttcaaacaacctttaaacgtcttttcttttaaagcacccaaaatgtcattgtgaggccaaacgcctagtaacagttactgaatctgggttaaatgtcggtatctttttttcttaaaccatttcaatttggtgtcccctatacatatccaaaactagcatcgattggggttgttttgaactaatgggtcttgtcctcaagcagcactattttgttcaaaataaaatagttgagagcatgcccctaagaagagatacatctcaaggactcaagtgcagggtgacgcctccttttggaaatgagcctctcctggtatcaggcctagatggtacttctccagccttccgtttcttgttctataaaacaggggtgatcacagcacctacctccgaaggttatcacgaggactgccatcgtggctgcagagtgccaggaccaccggcctggtatggaggtacacactcagtgaaggccatctgctgtcattgtcattgtcatagttattgccgtcattctgtggcttgtcaattccagaactggggatagaccccaggcctcctgaccaccagtctcatctttctcttatgcgatgacttaaatggtgtttctgttttttgcatgcaaatggtccgttcatctcctttgactagttatcaacttaccttcggatatattaactttatgtagcagttctttctatattgatggtgatgttctcttttccaattttattgctttgctttttgtagcagttttattacgtttttgttgtgaaagcttttaatttttacatatccaagcattcattttttgtccactcagtcataactttcattgcttctgtagctagatatgatgacattttctctagaattttaattacaaacaaaaagctgcaaccccagcccatcagaaggtgagtacaccaggtgggcaggctggatggaaatgggccagagaagcaggctctttcctcatccgagatgcggactccctgtctatctgtgggcaccacttgactatccaacctgaccactgcggcacactggagatgctcccatcatagattagccagaactctgtgactgctcatcattatagaccccgccagcagcagtggggcttggcctcacctagatcaatggagtggtccaaacttggtctgggagcaagcagcccagccatcctttgagctcctgggagccttggcaatgctccgagtggattcagtgactgagcagcagattcacccaagaaacatctccttggacacaagaagacttgcctagaccacatcctcctttcagccggtgactctagaactagaaagagattggttcataggcttctgctgtgggcagctaggggaaaattcacccatgtgttctggcatcacttcctatagccacacctaagtgagggcaacagagcagaggctcggagaggaaccctgcccctccgatggcttgtgcgttatgctgatagaagctggcagcactgccctgggctatgatttgcaacagccatgcccaggaggagcactaaagcaaaggtttggagggcagtggaacccttctgaaagcctgtgtggcatagaagtagaagctggtcctcctgggtctgagctaccatttccagtgggctcccccaagaggaacagcagcaagggctagcgaggaacctgcccctccagtggcccacagaagccacagatagaagccagccccaccagggctgtgctgtgacttcccagcagctgtggctggggacagggacactaggagggcctggcaaggaagtgtgcccttctcgtgggcccaccaaggctgaggcagagcttcctagcagacacaacttggaagggcttctcaggcacccatcctgacccccaggctggagaggagccaaaagcacttgttacatagtgattccttttgccctgtgggcctcagttcttgcagtagttgtgaatctgtgtctgaaatcactactttcttctcggatcctttttctcttttcgagttgttaggatgtgttttgtacagctgtcatttgataaagaaggttgacctctaccaggggcaagtctggcacctttacctagaagtactctgccatgtcttgcccgttcatttatcgtttgttgggtttcatgagggatcccattgaagtagatcccttttatgaagggatcccattgaatgcagcattaactcagaacgtagcataaagtcgtcactgctcccagctgggacgtggtgtcttggcatcccttcctgccgtccttgactctttcccatcttcagttctataattttctcccaaacaaatgctcttttagagttaacactaaagatctggtctttgccgtcaaggttgacagaacagctgttcatggtgtttgcggtgaaacccgtgttctctttcaatgcagtctgtggctttaacgtgtgtcctgtaatttcgccaagatcatttcttgcctctggtaacttgggggtggatttccttgggctctctaggtgtactgctatgtcagatgcaaaatgtcacccagcttcctgtcacatatccttgtctgtgcattcatgcatctacctcattccggttttctttctaatctcatgtattcctgttgtgaggaaatgtgttcttttcccgatccttttgtagttcatacacatgacaattgggtttccacgcacgtgcatgagatgttcctccttcaaaccttgttactatgtcagcacattaactgcctggcatggaaaaagaaaaaaaaaaaagaaatatgttcttttcctaccatttgaaaaaaatcctccattgcttttattagagttttgaatacttgtgaaaattttcaaaagaaagtaattgattaccatttttgctgcttattacgatgagctgtgtccattagctgtgtcaccccactcttgcatttccagaatagtccctacccaattgcagcgggcatgtttttgagtggtgttgcattccatgtgcttgattttgtcctagaactggcacagcgcctgccctacctgcagccctgggttgtggccctgttgcgtaccatgtgatttgccaccccgcttctaggccatattaattcagccagaactgaacacctgacccaagggcagcaagcaatcatcagagcatagagctgacagaacatgatggaccacggacaccaccaggccttccagatctgaaatgcaaacaaggaaacagaagcttctaggcatcagaaggtgtggggagcagcacagtactcagaggagtgaggagcgtggcgcctgctgggaggaaggcctggccatgatgagtggccaactctggagcccaggatgttgcttcccagtctggtggtgaatcctccacaatctgagctggccctctggtgcccaaagcagactcctggggtccctgtattgggcacttacccacttcctgctggccgcagcatgacacctgatgctcctagagcagccaactgaattccagaagaaaggcttcagtggtgtgttttccagaaggaacctggctcctaggattaacagttgggtcaaatctcaaaaactctttgcccttaactactgaaaacttccagcatctatagcagtcatagtcacaagatttcctttaaatttttcagcaattgttttcctaaggcattctgtaaagtctggcttgaagtttgtttagttgagataaaaatgtgtttgactgcactccagcctgagagacagagtgacatactgtctcaaaaataaataaacaaataagttttttaaaacatgtttg

SEQ ID NO: 1091 - DNA, 6308 bp, Homo sapiens
gccgcggggctgttagctcggctgggcacgggcggctccgtggcgcttcctgccacgccaggcctgcctgggccgcgccagcgccgctccaccgagggccgcgcgtcggccgccgccgggcctggatggggccttacctgccaggctgatcccttggagtagttctgaggcatgatgagtcatccgtgtgtgtctcttttgggcgttcctgttttaaatcctgccttggtccctcacctggcacaaggacaagtgctactggtgtcagacccatcgcccaacactgatcctgctaagtactctgaaagcacctccgcgacccgacaccagatgaagggggaagatgcccagccacaggagatggcgtccacaagcttcccaagggccagtggtcccagtcctgaattcagacagcacggggactctgacgggaagagagggagcccacagaatctgcccatagaacatcattttgcttgtaaagagtgtggggacacctttcggcttaaagtcctgcttgtccagcaccagagagtccacagtgaggagaagggctgggaatgtggcgactgcgggaaggtctttaggggggtggcggagtttaatgagcacaggaaaagccacgtagctgcggagccccagcccggccccagtagggccctggagaatgccgcggagaagagggagcagatggagagggaggcaaagcccttcgagtgcgaggagtgcggaaaacggtttaagaagaatgcaggcctgagtcagcatctgagggtccacagcagagagaagccctttgattgcgaggaatgcgggcggtcgttcaaagtcaacacccacctcttccgacatcagaaacttcacacttcggaaaagcctttcgcctgcaaggcgtgcagcagggatttcctggatcgccaggagcttctcaagcaccagcgcatgcacactggccacctgcccttcgactgcgacgactgcggcaagtccttccgaggggtcaacgggctggccgagcaccagcgcatccacagtggggccaagccatacgggtgtccccactgcggcaagctcttccgaaggagctcggagctcaccaagcaccggcggatccacacgggcgagaagccctacgcctgcggccttccgtgggccctctgacctcatcaagcaccggcgcatccacagcggactgaaaccctatgagtgcgacaaatgcggcaaggccttccgccggagctccggcctcagtcgccaccggcggatccacagtggggcgcggcgctgcgaatgcagccagtgtggccgcgtgttcaagaggcgctcggcactgcagaagcatcagccaacccaccacgagtagaaacgccctgtggtcccgcgggacagggacggagtccccagaggggatggcagagtcaaaggagatgaacagttttgtagcgcttatatattttgtcttccaaaaggttgagaccgatttatactgccaccagcaatttataagtgttacgttatgcccatcaagagtagcttgtaccatttaacttagtttggctagtttaactggtaggaagtaccatcaaggtatttcagtccacatgccttgaatccaagaatgagagaggacaaatctggatgtggggtagggaggggcttagaggtcatcaactccaagctccccccgccccagagaaacacacagagctgttccacgatggcgtcctcataatgtgatcccagctttcctgaagagaacgttgccctcatgatttttggcctacttgaatttataaatttttagggatgtaaatagaacactcaaatgtcttaaaatatttaatttattaatttagttatacatacatactgtaaatcacatattatataaaataatatattaatttagaaaataccccatttttgccaccctccctttcacgaaatcattttactctgactcctcaccgtcttcaccaacatgggaaccctgtttgagtcatcagacagtttcaagacacacccagtcacttccatccgagctctgcacggtcgctcagtgacgatcccttcatgaggctctcattagaaattttctcccaagccataagaccatatttgcagaacattaggacgatttctcttgtcgttttttaatctgtcctgtgactgtacaatataaccacttaaggtcatactttttcaaacaacctttaaacgtcttttcttttaaagcacccaaaatgtcattgtgaggccaaacgcctagtaacagttactgaatctgggttaaatgtcggtatctttttttcttaaaccatttcaatttggtgtcccctatacatatccaaaactagcatcgattggggttgttttgaactaatgggtcttgtcctcaagcagcactattttgttcaaaataaaatagttgagagcatgcccctaagaagagatacatctcaaggactcaagtgcagggtgacgcctccttttggaaatgagcctctcctggtatcaggcctagatggtacttctccagccttccgtttcttgttctataaaacaggggtgatcacagcacctacctccgaaggttatcacgaggactgccatcgtggctgcagagtgccaggaccaccggcctggtatggaggtacacactcagtgaaggccatctgctgtcattgtcattgtcatagttattgccgtcattctgtggcttgtcaattccagaactggggatagaccccaggcctcctgaccaccagtctcatctttctcttatgcgatgacttaaatggtgtttctgttttttgcatgcaaatggtccgttcatctcctttgactagttatcaacttaccttcggatatattaactttatgtagcagttctttctatattgatggtgatgttctcttttccaattttattgctttgctttttgtagcagttttattacgtttttgttgtgaaagcttttaatttttacatatccaagcattcattttttgtccactcagtcataactttcattgcttctgtagctagatatgatgacattttctctagaattttaattacaaacaaaaagctgcaaccccagcccatcagaaggtgagtacaccaggtgggcaggctggatggaaatgggccagagaagcaggctctttcctcatccgagatgcggactccctgtctatctgtgggcaccacttgactatccaacctgaccactgcggcacactggagatgctcccatcatagattagccagaactctgtgactgctcatcattatagaccccgccagcagcagtggggcttggcctcacctagatcaatggagtggtccaaacttggtctgggagcaagcagcccagccatcctttgagctcctgggagccttggcaatgctccgagtggattcagtgactgagcagcagattcacccaagaaacatctccttggacacaagaagacttgcctagaccacatcctcctttcagccggtgactctagaactagaaagagattggttcataggcttctgctgtgggcagctaggggaaaattcacccatgtgttctggcatcacttcctatagccacacctaagtgagggcaacagagcagaggctcggagaggaaccctgcccctccgatggcttgtgcgttatgctgatagaagctggcagcactgccctgggctatgatttgcaacagccatgcccaggaggagcactaaagcaaaggtttggagggcagtggaacccttctgaaagcctgtgtggcatagaagtagaagctggtcctcctgggtctgagctaccatttccagtgggctcccccaagaggaacagcagcaagggctagcgaggaacctgcccctccagtggcccacagaagccacagatagaagccagccccaccagggctgtgctgtgacttcccagcagctgtggctggggacagggacactaggagggcctggcaaggaagtgtgcccttctcgtgggcccaccaaggctgaggcagagcttcctagcagacacaacttggaagggcttctcaggcacccatcctgacccccaggctggagaggagccaaaagcacttgttacatagtgattccttttgccctgtgggcctcagttcttgcagtagttgtgaatctgtgtctgaaatcactactttcttctcggatcctttttctcttttcgagttgttaggatgtgttttgtacagctgtcatttgataaagaaggttgacctctaccaggggcaagtctggcacctttacctagaagtactctgccatgtcttgcccgttcatttatcgtttgttgggtttcatgagggatcccattgaagtagatcccttttatgaagggatcccattgaatgcagcattaactcagaacgtagcataaagtcgtcactgctcccagctgggacgtggtgtcttggcatcccttcctgccgtccttgactctttcccatcttcagttctataattttctcccaaacaaatgctcttttagagttaacactaaagatctggtctttgccgtcaaggttgacagaacagctgttcatggtgtttgcggtgaaacccgtgttctctttcaatgcagtctgtggctttaacgtgtgtcctgtaatttcgccaagatcatttcttgcctctggtaacttgggggtggatttccttgggctctctaggtgtactgctatgtcagatgcaaaatgtcacccagcttcctgtcacatatccttgtctgtgcattcatgcatctacctcattccggttttctttctaatctcatgtattcctgttgtgaggaaatgtgttcttttcccgatccttttgtagttcatacacatgacaattgggtttccacgcacgtgcatgagatgttcctccttcaaaccttgttactatgtcagcacattaactgcctggcatggaaaaagaaaaaaaaaaaagaaatatgttcttttcctaccatttgaaaaaaatcctccattgcttttattagagttttgaatacttgtgaaaattttcaaaagaaagtaattgattaccatttttgctgcttattacgatgagctgtgtccattagctgtgtcaccccactcttgcatttccagaatagtccctacccaattgcagcgggcatgtttttgagtggtgttgcattccatgtgcttgattttgtcctagaactggcacagcgcctgccctacctgcagccctgggttgtggccctgttgcgtaccatgtgatttgccaccccgcttctaggccatattaattcagccagaactgaacacctgacccaagggcagcaagcaatcatcagagcatagagctgacagaacatgatggaccacggacaccaccaggccttccagatctgaaatgcaaacaaggaaacagaagcttctaggcatcagaaggtgtggggagcagcacagtactcagaggagtgaggagcgtggcgcctgctgggaggaaggcctggccatggtatgttcttggatttctggcagcagccctcattggtccacgtgcgtccccactacagactccttgacttgagccagcttgagtgggtctctactcttttctattgtgttttgccacttggctgcttcctggccaagtcgcacctgactgcatgaacacctgttcaaacgtgtgttctctgttctctaagatgggtgaaagtcgatgccttctagtctcagtgaatttaacctgtgattttatgtctacgtatattgttcctttactgaacccaccacatgcgggccataaaatgagtgaaatcacagtgcaccctgttctcttatttttgaagtgtttcacgatttccagcatgtccatcagatggggggattgctaacttctctcttactcatgtacttacattctgtagttctcattgcatcactttggatgtttactttgaaaagcagaaactgtctctttaaacttggccctcaatgtcatttgcgtatctctgagaacaatagctatgtcccaccccagtttgtatttccgttggttgttggcacttttttctcattcccccatctcattaccttgtctgttttctggcactcactataatcagccttgcactagagctgtttgtggacttggcttcaccccctcctcctcagccctcccccacccattaaattgtgagctcttagaagacaggggtggcctttcatgtctgatcccctaccaaatctagcacagtgccttgcatcaagtagatttcaataaatatatgttaa

SEQ ID NO: 1092 - DNA, 6539 bp, Homo sapiens
gctgtcgaagtccacgtgtctgggaagagcatgaagttaaatgtgtgagctctgagtgggtggacagagagaagacagggtgaagatcacctccccagggtggccacttgatactccacagagcctccccaaggtgggcccagaggctgccttcctcaagctcctggaaggagcctgaccttgggaaacacctttgaactgaatgaatgacttgcctaaagcctggtctttgaagattgaagggggttccccttcaaaggccttgcctatgttcctccactattctcatgtcatctctggctgtcgccataaccaatctcctttcccatgagcaggcgttcccgttttaaatcctgccttggtccctcacctggcacaaggacaagtgctactggtgtcagacccatcgcccaacactgatcctgctaagtactctgaaagcacctccgcgacccgacaccagatgaagggggaagatgcccagccacaggagatggcgtccacaagcttcccaagggccagtggtcccagtcctgaattcagacagcacggggactctgacgggaagagagggagcccacagaatctgcccatagaacatcattttgcttgtaaagagtgtggggacacctttcggcttaaagtcctgcttgtccagcaccagagagtccacagtgaggagaagggctgggaatgtggcgactgcgggaaggtctttaggggggtggcggagtttaatgagcacaggaaaagccacgtagctgcggagccccagcccggccccagtagggccctggagaatgccgcggagaagagggagcagatggagagggaggcaaagcccttcgagtgcgaggagtgcggaaaacggtttaagaagaatgcaggcctgagtcagcatctgagggtccacagcagagagaagccctttgattgcgaggaatgcgggcggtcgttcaaagtcaacacccacctcttccgacatcagaaacttcacacttcggaaaagcctttcgcctgcaaggcgtgcagcagggatttcctggatcgccaggagcttctcaagcaccagcgcatgcacactggccacctgcccttcgactgcgacgactgcggcaagtccttccgaggggtcaacgggctggccgagcaccagcgcatccacagtggggccaagccatacgggtgtccccactgcggcaagctcttccgaaggagctcggagctcaccaagcaccggcggatccacacgggcgagaagccctacgcctgtggccagtgcggcaaggccttccgccagagctccagcctcctggagcacgcacgcatccacagtggcgagcggccctacgcatgcggcgagtgtggcaaggccttccgtgggccctctgacctcatcaagcaccggcgcatccacagcggactgaaaccctatgagtgcgacaaatgcggcaaggccttccgccggagctccggcctcagtcgccaccggcggatccacagtggggcgcggcgctgcgaatgcagccagtgtggccgcgtgttcaagaggcgctcggcactgcagaagcatcagccaacccaccacgagtagaaacgccctgtggtcccgcgggacagggacggagtccccagaggggatggcagagtcaaaggagatgaacagttttgtagcgcttatatattttgtcttccaaaaggttgagaccgatttatactgccaccagcaatttataagtgttacgttatgcccatcaagagtagcttgtaccatttaacttagtttggctagtttaactggtaggaagtaccatcaaggtatttcagtccacatgccttgaatccaagaatgagagaggacagatctggatgtggggtagggaggggcttagaggtcatcaactccaagctccccccgccccagagaaacacacagagctgttccacgatggcgtcctcataatgtgatcccagctttcctgaagagaacgttgccctcatgatttttggcctacttgaatttataaatttttagggatgtaaatagaacactcaaatgtcttaaaatatttaatttattaatttagttatacatacatactgtaaatcacatattatataaaataatatattaatttagaaaataccccatttttgccaccctccctttcacgaaatcattttactctgactcctcaccgtcttcaccaacatgggaaccctgtttgagtcatcagacagtttcaagacacacccagtcacttccatccgagctctgcacggtcgctcagtgacgatcccttcatgaggctctcattagaaattttctcccaagccataagaccatatttgcagaacattaggacgatttctcttgtcgttttttaatctgtcctgtgactgtacaatataaccacttaaggtcatactttttcaaacaacctttaaacgtcttttcttttaaagcacccaaaatgtcattgtgaggccaaacgcctagtaacagttactgaatctgggttaaatgtcggtatctttttttcttaaaccatttcaatttggtgtcccctatacatatccaaaactagcatcgattggggttgttttgaactaatgggtcttgtcctcaagcagcactattttgttcaaaataaaatagttgagagcatgcccctaagaagagatacatctcaaggactcaagtgcagggtgacgcctccttttggaaatgagcctctcctggtatcaggcctagatggtacttctccagccttccgtttcttgttctataaaacaggggtgatcacagcacctacctccgaaggttatcacgaggactgccatcgtggctgcagagtgccaggaccaccggcctggtatggaggtacacactcagtgaaggccatctgctgtcattgtcattgtcatagttattgccgtcattctgtggcttgtcaattccagaactggggatagaccccaggcctcctgaccaccagtctcatctttctcttatgcgatgacttaaatggtgtttctgttttttgcatgcaaatggtccgttcatctcctttgactagttatcaacttaccttcggatatattaactttatgtagcagttctttctatattgatggtgatgttctcttttccaattttattgctttgctttttgtagcagttttattacgtttttgttgtgaaagcttttaatttttacatatccaagcattcattttttgtccactcagtcataactttcattgcttctgtagctagatatgatgacattttctctagaattttaattacaaacaaaaagctgcaaccccagcccatcagaaggtgagtacaccaggtgggcaggctggatggaaatgggccagagaagcaggctctttcctcatccgagatgcggactccctgtctatctgtgggcaccacttgactatccaacctgaccactgcggcacactggagatgctcccatcatagattagccagaactctgtgactgctcatcattatagaccccgccagcagcagtggggcttggcctcacctagatcaatggagtggtccaaacttggtctgggagcaagcagcccagccatcctttgagctcctgggagccttggcaatgctccgagtggattcagtgactgagcagcagattcacccaagaaacatctccttggacacaagaagacttgcctagaccacatcctcctttcagccggtgactctagaactagaaagagattggttcataggcttctgctgtgggcagctaggggaaaattcacccatgtgttctggcatcacttcctatagccacacctaagtgagggcaacagagcagaggctcggagaggaaccctgcccctccgatggcttgtgcgttatgctgatagaagctggcagcactgccctgggctatgatttgcaacagccatgcccaggaggagcactaaagcaaaggtttggagggcagtggaacccttctgaaagcctgtgtggcatagaagtagaagctggtcctcctgggtctgagctaccatttccagtgggctcccccaagaggaacagcagcaagggctagcgaggaacctgcccctccagtggcccacagaagccacagatagaagccagccccaccagggctgtgctgtgacttcccagcagctgtggctggggacagggacactaggagggcctggcaaggaagtgtgcccttctcgtgggcccaccaaggctgaggcagagcttcctagcagacacaacttggaagggcttctcaggcacccatcctgacccccaggctggagaggagccaaaagcacttgttacatagtgattccttttgccctgtgggcctcagttcttgcagtagttgtgaatctgtgtctgaaatcactactttcttctcggatcctttttctcttttcgagttgttaggatgtgttttgtacagctgtcatttgataaagaaggttgacctctaccaggggcaagtctggcacctttacctagaagtactctgccatgtcttgcccgttcatttatcgtttgttgggtttcatgagggatcccattgaagtagatcccttttatgaagggatcccattgaatgcagcattaactcagaacgtagcataaagtcgtcactgctcccagctgggacgtggtgtcttggcatcccttcctgccgtccttgactctttcccatcttcagttctataattttctcccaaacaaatgctcttttagagttaacactaaagatctggtctttgccgtcaaggttgacagaacagctgttcatggtgtttgcggtgaaacccgtgttctctttcaatgcagtctgtggctttaacgtgtgtcctgtaatttcgccaagttcatttcttgcctctggtaacttgggggtggatttccttgggctctctaggtgtactgctatgtcagatgcaaaatgtcacccagcttcctgtcacatatccttgtctgtgcattcatgcatctacctcattccggttttctttctaatctcatgtattcctgttgtgaggaaatgtgttcttttcccgatccttttgtagttcatacacgtgacaattgggtttccacgcacgtgcatgagatgttcctccttcaaaccttgttactatgtcagcacattaactgcctggcatggaaaaagaaaaaaaaaaaagaaatatgttcttttcctaccatttgaaaaaaatcctccattgcttttattagagttttgaatacttgtgaaaattttcaaaagaaagtaattgattaccatttttgctgcttattacgatgagctgtgtccattagctgtgtcaccccactcttgcatttccagaatagtccctacccaattgcagcgggcatgtttttgagtggtgttgcattccatgtgcttgattttgtcctagaactggcacagcgcctgccctacctgcagccctgggttgtggccctgttgcgtaccatgtgatttgccaccccgcttctaggccatattaattcagccagaactgaacacctgacccaagggcagcaagcaatcatcagagcatagagctgacagaacatgatggaccacggacaccaccaggccttccagatctgaaatgcaaacaaggaaacagaagcttctaggcatcagaaggtgtggggagcagcacagtactcagaggagtgaggagcgtggcgcctgctgggaggaaggcctggccatggtatgttcttggatttctggcagcagccctcattggtccacgtgcgtccccactacagactccttgacttgagccagcttgagtgggtctctactcttttctattgtgttttgccacttggctgcttcctggccaagtcgcacctgactgcatgaacacctgttcaaacgtgtgttctctgttctctaagatgggtgaaagtcgatgccttctagtctcagtgaatttaacctgtgattttatgtctacgtatattgttcctttactgaacccaccacatgcgggccataaaatgagtgaaatcacagtgcaccctgttctcttatttttgaagtgtttcacgatttccagcatgtccatcagatggggggattgctaacttctctcttactcatgtacttacattctgtagttctcattgcatcactttggatgtttactttgaaaagcagaaactgtctctttaaacttggccctcaatgtcatttgcgtatctctgagaacaatagctatgtcccaccccagtttgtatttccgttggttgttggcacttttttctcattcccccatctcattaccttgtctgttttctggcactcactataatcagccttgcactagagctgtttgtggacttggcttcaccccctcctcctcagccctcccccacccattaaattgtgagctcttagaagacaggggtggcctttcatgtctgatcccctaccaaatctagcacagtgccttgcatcaagtagatttcaataaatatatgttaa

SEQ ID NO: 1093 - DNA, 5746 bp, Homo sapiens
gctgtcgaagtccacgtgtctgggaagagcatgaagttaaatgtgtgagctctgagtgggtggacagagagaagacagggtgaagatcacctccccagggtggccacttgatactccacagagcctccccaaggtgggcccagaggctgccttcctcaagctcctggaaggagcctgaccttgggaaacacctttgaactgaatgaatgacttgcctaaagcctggtctttgaagattgaagggggttccccttcaaaggccttgcctatgttcctccactattctcatgtcatctctggctgtcgccataaccaatctcctttcccatgagcaggcgttcccgttttaaatcctgccttggtccctcacctggcacaaggacaagtgctactggtgtcagacccatcgcccaacactgatcctgctaagtactctgaaagcacctccgcgacccgacaccagatgaagggggaagatgcccagccacaggagatggcgtccacaagcttcccaagggccagtggtcccagtcctgaattcagacagcacggggactctgacgggaagagagggagcccacagaatctgcccatagaacatcattttgcttgtaaagagtgtggggacacctttcggcttaaagtcctgcttgtccagcaccagagagtccacagtgaggagaagggctgggaatgtggcgactgcgggaaggtctttaggggggtggcggagtttaatgagcacaggaaaagccacgtagctgcggagccccagcccggccccagtagggccctggagaatgccgcggagaagagggagcagatggagagggaggcaaagcccttcgagtgcgaggagtgcggaaaacggtttaagaagaatgcaggcctgagtcagcatctgagggtccacagcagagagaagccctttgattgcgaggaatgcgggcggtcgttcaaagtcaacacccacctcttccgacatcagaaacttcacacttcggaaaagcctttcgcctgcaaggcgtgcagcagggatttcctggatcgccaggagcttctcaagcaccagcgcatgcacactggccacctgcccttcgactgcgacgactgcggcaagtccttccgaggggtcaacgggctggccgagcaccagcgcatccacagtggggccaagccatacgggtgtccccactgcggcaagctcttccgaaggagctcggagctcaccaagcaccggcggatccacacgggcgagaagccctacgcctgtggccagtgcggcaaggccttccgccagagctccagcctcctggagcacgcacgcatccacagtggcgagcggccctacgcatgcggcgagtgtggcaaggccttccgtgggccctctgacctcatcaagcaccggcgcatccacagcggactgaaaccctatgagtgcgacaaatgcggcaaggccttccgccggagctccggcctcagtcgccaccggcggatccacagtggggcgcggcgctgcgaatgcagccagtgtggccgcgtgttcaagaggcgctcggcactgcagaagcatcagccaacccaccacgagtagaaacgccctgtggtcccgcgggacagggacggagtccccagaggggatggcagagtcaaaggagatgaacagttttgtagcgcttatatattttgtcttccaaaaggttgagaccgatttatactgccaccagcaatttataagtgttacgttatgcccatcaagagtagcttgtaccatttaacttagtttggctagtttaactggtaggaagtaccatcaaggtatttcagtccacatgccttgaatccaagaatgagagaggacagatctggatgtggggtagggaggggcttagaggtcatcaactccaagctccccccgccccagagaaacacacagagctgttccacgatggcgtcctcataatgtgatcccagctttcctgaagagaacgttgccctcatgatttttggcctacttgaatttataaatttttagggatgtaaatagaacactcaaatgtcttaaaatatttaatttattaatttagttatacatacatactgtaaatcacatattatataaaataatatattaatttagaaaataccccatttttgccaccctccctttcacgaaatcattttactctgactcctcaccgtcttcaccaacatgggaaccctgtttgagtcatcagacagtttcaagacacacccagtcacttccatccgagctctgcacggtcgctcagtgacgatcccttcatgaggctctcattagaaattttctcccaagccataagaccatatttgcagaacattaggacgatttctcttgtcgttttttaatctgtcctgtgactgtacaatataaccacttaaggtcatactttttcaaacaacctttaaacgtcttttcttttaaagcacccaaaatgtcattgtgaggccaaacgcctagtaacagttactgaatctgggttaaatgtcggtatctttttttcttaaaccatttcaatttggtgtcccctatacatatccaaaactagcatcgattggggttgttttgaactaatgggtcttgtcctcaagcagcactattttgttcaaaataaaatagttgagagcatgcccctaagaagagatacatctcaaggactcaagtgcagggtgacgcctccttttggaaatgagcctctcctggtatcaggcctagatggtacttctccagccttccgtttcttgttctataaaacaggggtgatcacagcacctacctccgaaggttatcacgaggactgccatcgtggctgcagagtgccaggaccaccggcctggtatggaggtacacactcagtgaaggccatctgctgtcattgtcattgtcatagttattgccgtcattctgtggcttgtcaattccagaactggggatagaccccaggcctcctgaccaccagtctcatctttctcttatgcgatgacttaaatggtgtttctgttttttgcatgcaaatggtccgttcatctcctttgactagttatcaacttaccttcggatatattaactttatgtagcagttctttctatattgatggtgatgttctcttttccaattttattgctttgctttttgtagcagttttattacgtttttgttgtgaaagcttttaatttttacatatccaagcattcattttttgtccactcagtcataactttcattgcttctgtagctagatatgatgacattttctctagaattttaattacaaacaaaaagctgcaaccccagcccatcagaaggtgagtacaccaggtgggcaggctggatggaaatgggccagagaagcaggctctttcctcatccgagatgcggactccctgtctatctgtgggcaccacttgactatccaacctgaccactgcggcacactggagatgctcccatcatagattagccagaactctgtgactgctcatcattatagaccccgccagcagcagtggggcttggcctcacctagatcaatggagtggtccaaacttggtctgggagcaagcagcccagccatcctttgagctcctgggagccttggcaatgctccgagtggattcagtgactgagcagcagattcacccaagaaacatctccttggacacaagaagacttgcctagaccacatcctcctttcagccggtgactctagaactagaaagagattggttcataggcttctgctgtgggcagctaggggaaaattcacccatgtgttctggcatcacttcctatagccacacctaagtgagggcaacagagcagaggctcggagaggaaccctgcccctccgatggcttgtgcgttatgctgatagaagctggcagcactgccctgggctatgatttgcaacagccatgcccaggaggagcactaaagcaaaggtttggagggcagtggaacccttctgaaagcctgtgtggcatagaagtagaagctggtcctcctgggtctgagctaccatttccagtgggctcccccaagaggaacagcagcaagggctagcgaggaacctgcccctccagtggcccacagaagccacagatagaagccagccccaccagggctgtgctgtgacttcccagcagctgtggctggggacagggacactaggagggcctggcaaggaagtgtgcccttctcgtgggcccaccaaggctgaggcagagcttcctagcagacacaacttggaagggcttctcaggcacccatcctgacccccaggctggagaggagccaaaagcacttgttacatagtgattccttttgccctgtgggcctcagttcttgcagtagttgtgaatctgtgtctgaaatcactactttcttctcggatcctttttctcttttcgagttgttaggatgtgttttgtacagctgtcatttgataaagaaggttgacctctaccaggggcaagtctggcacctttacctagaagtactctgccatgtcttgcccgttcatttatcgtttgttgggtttcatgagggatcccattgaagtagatcccttttatgaagggatcccattgaatgcagcattaactcagaacgtagcataaagtcgtcactgctcccagctgggacgtggtgtcttggcatcccttcctgccgtccttgactctttcccatcttcagttctataattttctcccaaacaaatgctcttttagagttaacactaaagatctggtctttgccgtcaaggttgacagaacagctgttcatggtgtttgcggtgaaacccgtgttctctttcaatgcagtctgtggctttaacgtgtgtcctgtaatttcgccaagttcatttcttgcctctggtaacttgggggtggatttccttgggctctctaggtgtactgctatgtcagatgcaaaatgtcacccagcttcctgtcacatatccttgtctgtgcattcatgcatctacctcattccggttttctttctaatctcatgtattcctgttgtgaggaaatgtgttcttttcccgatccttttgtagttcatacacgtgacaattgggtttccacgcacgtgcatgagatgttcctccttcaaaccttgttactatgtcagcacattaactgcctggcatggaaaaagaaaaaaaaaaaagaaatatgttcttttcctaccatttgaaaaaaatcctccattgcttttattagagttttgaatacttgtgaaaattttcaaaagaaagtaattgattaccatttttgctgcttattacgatgagctgtgtccattagctgtgtcaccccactcttgcatttccagaatagtccctacccaattgcagcgggcatgtttttgagtggtgttgcattccatgtgcttgattttgtcctagaactggcacagcgcctgccctacctgcagccctgggttgtggccctgttgcgtaccatgtgatttgccaccccgcttctaggccatattaattcagccagaactgaacacctgacccaagggcagcaagcaatcatcagagcatagagctgacagaacatgatggaccacggacaccaccaggccttccagatctgaaatgcaaacaaggaaacagaagcttctaggcatcagaaggcctggccatggtatgttcttggatttctggcagcagccctcattggtccacgtgc

SEQ ID NO: 1094 - DNA, 6243 bp, Homo sapiens
gctgtcgaagtccacgtgtctgggaagagcatgaagttaaatgtgtgagctctgagtgggtggacagagagaagacagggtgaagatcacctccccagggtggccacttgatactccacagagcctccccaaggtgggcccagaggctgccttcctcaagctcctggaaggagcctgaccttgggaaacacctttgaactgaatgaatgacttgcctaaagcctggtctttgaagattgaagggggttccccttcaaaggccttgcctatgttcctccactattctcatgtcatctctggctgtcgccataaccaatctcctttcccatgagcaggcgttcccgttttaaatcctgccttggtccctcacctggcacaaggacaagtgctactggtgtcagacccatcgcccaacactgatcctgctaagtactctgaaagcacctccgcgacccgacaccagatgaagggggaagatgcccagccacaggagatggcgtccacaagcttcccaagggccagtggtcccagtcctgaattcagacagcacggggactctgacgggaagagagggagcccacagaatctgcccatagaacatcattttgcttgtaaagagtgtggggacacctttcggcttaaagtcctgcttgtccagcaccagagagtccacagtgaggagaagggctgggaatgtggcgactgcgggaaggtctttaggggggtggcggagtttaatgagcacaggaaaagccacgtagctgcggagccccagcccggccccagtagggccctggagaatgccgcggagaagagggagcagatggagagggaggcaaagcccttcgagtgcgaggagtgcggaaaacggtttaagaagaatgcaggcctgagtcagcatctgagggtccacagcagagagaagccctttgattgcgaggaatgcgggcggtcgttcaaagtcaacacccacctcttccgacatcagaaacttcacacttcggaaaagcctttcgcctgcaaggcgtgcagcagggatttcctggatcgccaggagcttctcaagcaccagcgcatgcacactggccacctgcccttcgactgcgacgactgcggcaagtccttccgaggggtcaacgggctggccgagcaccagcgcatccacagtggggccaagccatacgggtgtccccactgcggcaagctcttccgaaggagctcggagctcaccaagcaccggcggatccacacgggcgagaagccctacgcctgtggccagtgcggcaaggccttccgccagagctccagcctcctggagcacgcacgcatccacagtggcgagcggccctacgcatgcggcgagtgtggcaaggccttccgtgggccctctgacctcatcaagcaccggcgcatccacagcggactgaaaccctatgagtgcgacaaatgcggcaaggccttccgccggagctccggcctcagtcgccaccggcggatccacagtggggcgcggcgctgcgaatgcagccagtgtggccgcgtgttcaagaggcgctcggcactgcagaagcatcagccaacccaccacgagtagaaacgccctgtggtcccgcgggacagggacggagtccccagaggggatggcagagtcaaaggagatgaacagttttgtagcgcttatatattttgtcttccaaaaggttgagaccgatttatactgccaccagcaatttataagtgttacgttatgcccatcaagagtagcttgtaccatttaacttagtttggctagtttaactggtaggaagtaccatcaaggtatttcagtccacatgccttgaatccaagaatgagagaggacagatctggatgtggggtagggaggggcttagaggtcatcaactccaagctccccccgccccagagaaacacacagagctgttccacgatggcgtcctcataatgtgatcccagctttcctgaagagaacgttgccctcatgatttttggcctacttgaatttataaatttttagggatgtaaatagaacactcaaatgtcttaaaatatttaatttattaatttagttatacatacatactgtaaatcacatattatataaaataatatattaatttagaaaataccccatttttgccaccctccctttcacgaaatcattttactctgactcctcaccgtcttcaccaacatgggaaccctgtttgagtcatcagacagtttcaagacacacccagtcacttccatccgagctctgcacggtcgctcagtgacgatcccttcatgaggctctcattagaaattttctcccaagccataagaccatatttgcagaacattaggacgatttctcttgtcgttttttaatctgtcctgtgactgtacaatataaccacttaaggtcatactttttcaaacaacctttaaacgtcttttcttttaaagcacccaaaatgtcattgtgaggccaaacgcctagtaacagttactgaatctgggttaaatgtcggtatctttttttcttaaaccatttcaatttggtgtcccctatacatatccaaaactagcatcgattggggttgttttgaactaatgggtcttgtcctcaagcagcactattttgttcaaaataaaatagttgagagcatgcccctaagaagagatacatctcaaggactcaagtgcagggtgacgcctccttttggaaatgagcctctcctggtatcaggcctagatggtacttctccagccttccgtttcttgttctataaaacaggggtgatcacagcacctacctccgaaggttatcacgaggactgccatcgtggctgcagagtgccaggaccaccggcctggtatggaggtacacactcagtgaaggccatctgctgtcattgtcattgtcatagttattgccgtcattctgtggcttgtcaattccagaactggggatagaccccaggcctcctgaccaccagtctcatctttctcttatgcgatgacttaaatggtgtttctgttttttgcatgcaaatggtccgttcatctcctttgactagttatcaacttaccttcggatatattaactttatgtagcagttctttctatattgatggtgatgttctcttttccaattttattgctttgctttttgtagcagttttattacgtttttgttgtgaaagcttttaatttttacatatccaagcattcattttttgtccactcagtcataactttcattgcttctgtagctagatatgatgacattttctctagaattttaattacaaacaaaaagctgcaaccccagcccatcagaaggtgagtacaccaggtgggcaggctggatggaaatgggccagagaagcaggctctttcctcatccgagatgcggactccctgtctatctgtgggcaccacttgactatccaacctgaccactgcggcacactggagatgctcccatcatagattagccagaactctgtgactgctcatcattatagaccccgccagcagcagtggggcttggcctcacctagatcaatggagtggtccaaacttggtctgggagcaagcagcccagccatcctttgagctcctgggagccttggcaatgctccgagtggattcagtgactgagcagcagattcacccaagaaacatctccttggacacaagaagacttgcctagaccacatcctcctttcagccggtgactctagaactagaaagagattggttcataggcttctgctgtgggcagctaggggaaaattcacccatgtgttctggcatcacttcctatagccacacctaagtgagggcaacagagcagaggctcggagaggaaccctgcccctccgatggcttgtgcgttatgctgatagaagctggcagcactgccctgggctatgatttgcaacagccatgcccaggaggagcactaaagcaaaggtttggagggcagtggaacccttctgaaagcctgtgtggcatagaagtagaagctggtcctcctgggtctgagctaccatttccagtgggctcccccaagaggaacagcagcaagggctagcgaggaacctgcccctccagtggcccacagaagccacagatagaagccagccccaccagggctgtgctgtgacttcccagcagctgtggctggggacagggacactaggagggcctggcaaggaagtgtgcccttctcgtgggcccaccaaggctgaggcagagcttcctagcagacacaacttggaagggcttctcaggcacccatcctgacccccaggctggagaggagccaaaagcacttgttacatagtgattccttttgccctgtgggcctcagttcttgcagtagttgtgaatctgtgtctgaaatcactactttcttctcggatcctttttctcttttcgagttgttaggatgtgttttgtacagctgtcatttgataaagaaggttgacctctaccaggggcaagtctggcacctttacctagaagtactctgccatgtcttgcccgttcatttatcgtttgttgggtttcatgagggatcccattgaagtagatcccttttatgaagggatcccattgaatgcagcattaactcagaacgtagcataaagtcgtcactgctcccagctgggacgtggtgtcttggcatcccttcctgccgtccttgactctttcccatcttcagttctataattttctcccaaacaaatgctcttttagagttaacactaaagatctggtctttgccgtcaaggttgacagaacagctgttcatggtgtttgcggtgaaacccgtgttctctttcaatgcagtctgtggctttaacgtgtgtcctgtaatttcgccaagttcatttcttgcctctggtaacttgggggtggatttccttgggctctctaggtgtactgctatgtcagatgcaaaatgtcacccagcttcctgtcacatatccttgtctgtgcattcatgcatctacctcattccggttttctttctaatctcatgtattcctgttgtgaggaaatgtgttcttttcccgatccttttgtagttcatacacgtgacaattgggtttccacgcacgtgcatgagatgttcctccttcaaaccttgttactatgtcagcacattaactgcctggcatggaaaaagaaaaaaaaaaaagaaatatgttcttttcctaccatttgaaaaaaatcctccattgcttttattagagttttgaatacttgtgaaaattttcaaaagaaagtaattgattaccatttttgctgcttattacgatgagctgtgtccattagctgtgtcaccccactcttgcatttccagaatagtccctacccaattgcagcgggcatgtttttgagtggtgttgcattccatgtgcttgattttgtcctagaactggcacagcgcctgccctacctgcagccctgggttgtggccctgttgcgtaccatgtgatttgccaccccgcttctaggccatattaattcagccagaactgaacacctgacccaagggcagcaagcaatcatcagagcatagagctgacagaacatgatggaccacggacaccaccaggccttccagatctgaaatgcaaacaaggaaacagaagcttctaggcatcagaaggtgtggggagcagcacagtactcagaggagtgaggagcgtggcgcctgctgggaggaaggcctggccatgatgagtggccaactctggagcccaggatgttgcttcccagtctggtggtgaatcctccacaatctgagctggccctctggtgcccaaagcagactcctggggtccctgtattgggcacttacccacttcctgctggccgcagcatgacacctgatgctcctagagcagccaactgaattccagaagaaaggcttcagtggtgtgttttccagaaggaacctggctcctaggattaacagttgggtcaaatctcaaaaactctttgcccttaactgctgaaaactgccagcatctatagcagtcatagtcacaagatttcctttaaatttttcagcaattgttttcctaaggcattctgtaaagtctggcttgaagtttgtttagttgagataaaaatgtgtttgactgcactccagcctgagagacagagtgacatattgtctcaaaaataaataaacaaataagttttttaaaacatgtttg

SEQ ID NO: 1095 - DNA, 6308 bp, Homo sapiens
gccgcggggctgttagctcggctgggcacgggcggctccgtggcgcttcctgccacgccaggcctgcctgggccgcgccagcgccgctccaccgagggccgcgcgtcggccgccgccgggcctggatggggccttacctgccaggctgatcccttggagtagttctgaggcatgatgagtcatccgtgtgtgtctcttttgggcgttcccgttttaaatcctgccttggtccctcacctggcacaaggacaagtgctactggtgtcagacccatcgcccaacactgatcctgctaagtactctgaaagcacctccgcgacccgacaccagatgaagggggaagatgcccagccacaggagatggcgtccacaagcttcccaagggccagtggtcccagtcctgaattcagacagcacggggactctgacgggaagagagggagcccacagaatctgcccatagaacatcattttgcttgtaaagagtgtggggacacctttcggcttaaagtcctgcttgtccagcaccagagagtccacagtgaggagaagggctgggaatgtggcgactgcgggaaggtctttaggggggtggcggagtttaatgagcacaggaaaagccacgtagctgcggagccccagcccggccccagtagggccctggagaatgccgcggagaagagggagcagatggagagggaggcaaagcccttcgagtgcgaggagtgcggaaaacggtttaagaagaatgcaggcctgagtcagcatctgagggtccacagcagagagaagccctttgattgcgaggaatgcgggcggtcgttcaaagtcaacacccacctcttccgacatcagaaacttcacacttcggaaaagcctttcgcctgcaaggcgtgcagcagggatttcctggatcgccaggagcttctcaagcaccagcgcatgcacactggccacctgcccttcgactgcgacgactgcggcaagtccttccgaggggtcaacgggctggccgagcaccagcgcatccacagtggggccaagccatacgggtgtccccactgcggcaagctcttccgaaggagctcggagctcaccaagcaccggcggatccacacgggcgagaagccctacgcctgtggccttccgtgggccctctgacctcatcaagcaccggcgcatccacagcggactgaaaccctatgagtgcgacaaatgcggcaaggccttccgccggagctccggcctcagtcgccaccggcggatccacagtggggcgcggcgctgcgaatgcagccagtgtggccgcgtgttcaagaggcgctcggcactgcagaagcatcagccaacccaccacgagtagaaacgccctgtggtcccgcgggacagggacggagtccccagaggggatggcagagtcaaaggagatgaacagttttgtagcgcttatatattttgtcttccaaaaggttgagaccgatttatactgccaccagcaatttataagtgttacgttatgcccatcaagagtagcttgtaccatttaacttagtttggctagtttaactggtaggaagtaccatcaaggtatttcagtccacatgccttgaatccaagaatgagagaggacagatctggatgtggggtagggaggggcttagaggtcatcaactccaagctccccccgccccagagaaacacacagagctgttccacgatggcgtcctcataatgtgatcccagctttcctgaagagaacgttgccctcatgatttttggcctacttgaatttataaatttttagggatgtaaatagaacactcaaatgtcttaaaatatttaatttattaatttagttatacatacatactgtaaatcacatattatataaaataatatattaatttagaaaataccccatttttgccaccctccctttcacgaaatcattttactctgactcctcaccgtcttcaccaacatgggaaccctgtttgagtcatcagacagtttcaagacacacccagtcacttccatccgagctctgcacggtcgctcagtgacgatcccttcatgaggctctcattagaaattttctcccaagccataagaccatatttgcagaacattaggacgatttctcttgtcgttttttaatctgtcctgtgactgtacaatataaccacttaaggtcatactttttcaaacaacctttaaacgtcttttcttttaaagcacccaaaatgtcattgtgaggccaaacgcctagtaacagttactgaatctgggttaaatgtcggtatctttttttcttaaaccatttcaatttggtgtcccctatacatatccaaaactagcatcgattggggttgttttgaactaatgggtcttgtcctcaagcagcactattttgttcaaaataaaatagttgagagcatgcccctaagaagagatacatctcaaggactcaagtgcagggtgacgcctccttttggaaatgagcctctcctggtatcaggcctagatggtacttctccagccttccgtttcttgttctataaaacaggggtgatcacagcacctacctccgaaggttatcacgaggactgccatcgtggctgcagagtgccaggaccaccggcctggtatggaggtacacactcagtgaaggccatctgctgtcattgtcattgtcatagttattgccgtcattctgtggcttgtcaattccagaactggggatagaccccaggcctcctgaccaccagtctcatctttctcttatgcgatgacttaaatggtgtttctgttttttgcatgcaaatggtccgttcatctcctttgactagttatcaacttaccttcggatatattaactttatgtagcagttctttctatattgatggtgatgttctcttttccaattttattgctttgctttttgtagcagttttattacgtttttgttgtgaaagcttttaatttttacatatccaagcattcattttttgtccactcagtcataactttcattgcttctgtagctagatatgatgacattttctctagaattttaattacaaacaaaaagctgcaaccccagcccatcagaaggtgagtacaccaggtgggcaggctggatggaaatgggccagagaagcaggctctttcctcatccgagatgcggactccctgtctatctgtgggcaccacttgactatccaacctgaccactgcggcacactggagatgctcccatcatagattagccagaactctgtgactgctcatcattatagaccccgccagcagcagtggggcttggcctcacctagatcaatggagtggtccaaacttggtctgggagcaagcagcccagccatcctttgagctcctgggagccttggcaatgctccgagtggattcagtgactgagcagcagattcacccaagaaacatctccttggacacaagaagacttgcctagaccacatcctcctttcagccggtgactctagaactagaaagagattggttcataggcttctgctgtgggcagctaggggaaaattcacccatgtgttctggcatcacttcctatagccacacctaagtgagggcaacagagcagaggctcggagaggaaccctgcccctccgatggcttgtgcgttatgctgatagaagctggcagcactgccctgggctatgatttgcaacagccatgcccaggaggagcactaaagcaaaggtttggagggcagtggaacccttctgaaagcctgtgtggcatagaagtagaagctggtcctcctgggtctgagctaccatttccagtgggctcccccaagaggaacagcagcaagggctagcgaggaacctgcccctccagtggcccacagaagccacagatagaagccagccccaccagggctgtgctgtgacttcccagcagctgtggctggggacagggacactaggagggcctggcaaggaagtgtgcccttctcgtgggcccaccaaggctgaggcagagcttcctagcagacacaacttggaagggcttctcaggcacccatcctgacccccaggctggagaggagccaaaagcacttgttacatagtgattccttttgccctgtgggcctcagttcttgcagtagttgtgaatctgtgtctgaaatcactactttcttctcggatcctttttctcttttcgagttgttaggatgtgttttgtacagctgtcatttgataaagaaggttgacctctaccaggggcaagtctggcacctttacctagaagtactctgccatgtcttgcccgttcatttatcgtttgttgggtttcatgagggatcccattgaagtagatcccttttatgaagggatcccattgaatgcagcattaactcagaacgtagcataaagtcgtcactgctcccagctgggacgtggtgtcttggcatcccttcctgccgtccttgactctttcccatcttcagttctataattttctcccaaacaaatgctcttttagagttaacactaaagatctggtctttgccgtcaaggttgacagaacagctgttcatggtgtttgcggtgaaacccgtgttctctttcaatgcagtctgtggctttaacgtgtgtcctgtaatttcgccaagttcatttcttgcctctggtaacttgggggtggatttccttgggctctctaggtgtactgctatgtcagatgcaaaatgtcacccagcttcctgtcacatatccttgtctgtgcattcatgcatctacctcattccggttttctttctaatctcatgtattcctgttgtgaggaaatgtgttcttttcccgatccttttgtagttcatacacgtgacaattgggtttccacgcacgtgcatgagatgttcctccttcaaaccttgttactatgtcagcacattaactgcctggcatggaaaaagaaaaaaaaaaaagaaatatgttcttttcctaccatttgaaaaaaatcctccattgcttttattagagttttgaatacttgtgaaaattttcaaaagaaagtaattgattaccatttttgctgcttattacgatgagctgtgtccattagctgtgtcaccccactcttgcatttccagaatagtccctacccaattgcagcgggcatgtttttgagtggtgttgcattccatgtgcttgattttgtcctagaactggcacagcgcctgccctacctgcagccctgggttgtggccctgttgcgtaccatgtgatttgccaccccgcttctaggccatattaattcagccagaactgaacacctgacccaagggcagcaagcaatcatcagagcatagagctgacagaacatgatggaccacggacaccaccaggccttccagatctgaaatgcaaacaaggaaacagaagcttctaggcatcagaaggtgtggggagcagcacagtactcagaggagtgaggagcgtggcgcctgctgggaggaaggcctggccatggtatgttcttggatttctggcagcagccctcattggtccacgtgcgtccccactacagactccttgacttgagccagcttgagtgggtctctactcttttctattgtgttttgccacttggctgcttcctggccaagtcgcacctgactgcatgaacacctgttcaaacgtgtgttctctgttctctaagatgggtgaaagtcgatgccttctagtctcagtgaatttaacctgtgattttatgtctacgtatattgttcctttactgaacccaccacatgcgggccataaaatgagtgaaatcacagtgcaccctgttctcttatttttgaagtgtttcacgatttccagcatgtccatcagatggggggattgctaacttctctcttactcatgtacttacattctgtagttctcattgcatcactttggatgtttactttgaaaagcagaaactgtctctttaaacttggccctcaatgtcatttgcgtatctctgagaacaatagctatgtcccaccccagtttgtatttccgttggttgttggcacttttttctcattcccccatctcattaccttgtctgttttctggcactcactataatcagccttgcactagagctgtttgtggacttggcttcaccccctcctcctcagccctcccccacccattaaattgtgagctcttagaagacaggggtggcctttcatgtctgatcccctaccaaatctagcacagtgccttgcatcaagtagatttcaataaatatatgttaa

SEQ ID NO: 1096 - DNA, 7051 bp, Homo sapiens
cattctttgccaggctactttccccattgttcaagatgtgttttctcaggcatctccgtgccctggcttgtcattcagccagcatgtgagagaagactcaacaagatcagaaaccaaggaagaagaaatcaccagtctcttcccaggggatccagggacagggctgtcgtcactcatggcctttttcactttctttagttccacctactccccaaggtcttaccctccccaggatggagccccaggaaaccaggtcctggcagtccctcttgagatgccagaggcctaggtgagctgtgcttccctctgccttgcttgggattctctcaccgctccctgaatctggcctcagcctctgtctcttgccccagcatgacacacggcagagtatgaaccccagctgctgccttcctaccctccctctgcttctcttctggaggctgccaaggattggatgtccactgggcttggagttccaatcatccaggtggggaagctgagtttccatccaggaaagtgattgaatggaggtcccttggaaagacgagaggccaggtccatggcccagggatcctagtgcttgatcaggttctcttttcaggacttcttggagctgtggttaggcctccatgttagcaacagacacccactccagaccctcacctcttgtccctggcattactggcgctgcccctgcctcattctaaaatagatggaaagactgatcagccctgggaattctttcaggatttggtgacatttgatgatgtggcatggtacctcaccacaagggagtggtttaagctggaccctgaacagagggcactggaatattatgggaacgtgggcgttcccgttttaaatcctgccttggtccctcacctggcacaaggacaagtgctactggtgtcagacccatcgcccaacactgatcctgctaagtactctgaaagcacctccgcgacccgacaccagatgaagggggaagatgcccagccacaggagatggcgtccacaagcttcccaagggccagtggtcccagtcctgaattcagacagcacggggactctgacgggaagagagggagcccacagaatctgcccatagaacatcattttgcttgtaaagagtgtggggacacctttcggcttaaagtcctgcttgtccagcaccagagagtccacagtgaggagaagggctgggaatgtggcgactgcgggaaggtctttaggggggtggcggagtttaatgagcacaggaaaagccacgtagctgcggagccccagcccggccccagtagggccctggagaatgccgcggagaagagggagcagatggagagggaggcaaagcccttcgagtgcgaggagtgcggaaaacggtttaagaagaatgcaggcctgagtcagcatctgagggtccacagcagagagaagccctttgattgcgaggaatgcgggcggtcgttcaaagtcaacacccacctcttccgacatcagaaacttcacacttcggaaaagcctttcgcctgcaaggcgtgcagcagggatttcctggatcgccaggagcttctcaagcaccagcgcatgcacactggccacctgcccttcgactgcgacgactgcggcaagtccttccgaggggtcaacgggctggccgagcaccagcgcatccacagtggggccaagccatacgggtgtccccactgcggcaagctcttccgaaggagctcggagctcaccaagcaccggcggatccacacgggcgagaagccctacgcctgtggccagtgcggcaaggccttccgccagagctccagcctcctggagcacgcacgcatccacagtggcgagcggccctacgcatgcggcgagtgtggcaaggccttccgtgggccctctgacctcatcaagcaccggcgcatccacagcggactgaaaccctatgagtgcgacaaatgcggcaaggccttccgccggagctccggcctcagtcgccaccggcggatccacagtggggcgcggcgctgcgaatgcagccagtgtggccgcgtgttcaagaggcgctcggcactgcagaagcatcagccaacccaccacgagtagaaacgccctgtggtcccgcgggacagggacggagtccccagaggggatggcagagtcaaaggagatgaacagttttgtagcgcttatatattttgtcttccaaaaggttgagaccgatttatactgccaccagcaatttataagtgttacgttatgcccatcaagagtagcttgtaccatttaacttagtttggctagtttaactggtaggaagtaccatcaaggtatttcagtccacatgccttgaatccaagaatgagagaggacagatctggatgtggggtagggaggggcttagaggtcatcaactccaagctccccccgccccagagaaacacacagagctgttccacgatggcgtcctcataatgtgatcccagctttcctgaagagaacgttgccctcatgatttttggcctacttgaatttataaatttttagggatgtaaatagaacactcaaatgtcttaaaatatttaatttattaatttagttatacatacatactgtaaatcacatattatataaaataatatattaatttagaaaataccccatttttgccaccctccctttcacgaaatcattttactctgactcctcaccgtcttcaccaacatgggaaccctgtttgagtcatcagacagtttcaagacacacccagtcacttccatccgagctctgcacggtcgctcagtgacgatcccttcatgaggctctcattagaaattttctcccaagccataagaccatatttgcagaacattaggacgatttctcttgtcgttttttaatctgtcctgtgactgtacaatataaccacttaaggtcatactttttcaaacaacctttaaacgtcttttcttttaaagcacccaaaatgtcattgtgaggccaaacgcctagtaacagttactgaatctgggttaaatgtcggtatctttttttcttaaaccatttcaatttggtgtcccctatacatatccaaaactagcatcgattggggttgttttgaactaatgggtcttgtcctcaagcagcactattttgttcaaaataaaatagttgagagcatgcccctaagaagagatacatctcaaggactcaagtgcagggtgacgcctccttttggaaatgagcctctcctggtatcaggcctagatggtacttctccagccttccgtttcttgttctataaaacaggggtgatcacagcacctacctccgaaggttatcacgaggactgccatcgtggctgcagagtgccaggaccaccggcctggtatggaggtacacactcagtgaaggccatctgctgtcattgtcattgtcatagttattgccgtcattctgtggcttgtcaattccagaactggggatagaccccaggcctcctgaccaccagtctcatctttctcttatgcgatgacttaaatggtgtttctgttttttgcatgcaaatggtccgttcatctcctttgactagttatcaacttaccttcggatatattaactttatgtagcagttctttctatattgatggtgatgttctcttttccaattttattgctttgctttttgtagcagttttattacgtttttgttgtgaaagcttttaatttttacatatccaagcattcattttttgtccactcagtcataactttcattgcttctgtagctagatatgatgacattttctctagaattttaattacaaacaaaaagctgcaaccccagcccatcagaaggtgagtacaccaggtgggcaggctggatggaaatgggccagagaagcaggctctttcctcatccgagatgcggactccctgtctatctgtgggcaccacttgactatccaacctgaccactgcggcacactggagatgctcccatcatagattagccagaactctgtgactgctcatcattatagaccccgccagcagcagtggggcttggcctcacctagatcaatggagtggtccaaacttggtctgggagcaagcagcccagccatcctttgagctcctgggagccttggcaatgctccgagtggattcagtgactgagcagcagattcacccaagaaacatctccttggacacaagaagacttgcctagaccacatcctcctttcagccggtgactctagaactagaaagagattggttcataggcttctgctgtgggcagctaggggaaaattcacccatgtgttctggcatcacttcctatagccacacctaagtgagggcaacagagcagaggctcggagaggaaccctgcccctccgatggcttgtgcgttatgctgatagaagctggcagcactgccctgggctatgatttgcaacagccatgcccaggaggagcactaaagcaaaggtttggagggcagtggaacccttctgaaagcctgtgtggcatagaagtagaagctggtcctcctgggtctgagctaccatttccagtgggctcccccaagaggaacagcagcaagggctagcgaggaacctgcccctccagtggcccacagaagccacagatagaagccagccccaccagggctgtgctgtgacttcccagcagctgtggctggggacagggacactaggagggcctggcaaggaagtgtgcccttctcgtgggcccaccaaggctgaggcagagcttcctagcagacacaacttggaagggcttctcaggcacccatcctgacccccaggctggagaggagccaaaagcacttgttacatagtgattccttttgccctgtgggcctcagttcttgcagtagttgtgaatctgtgtctgaaatcactactttcttctcggatcctttttctcttttcgagttgttaggatgtgttttgtacagctgtcatttgataaagaaggttgacctctaccaggggcaagtctggcacctttacctagaagtactctgccatgtcttgcccgttcatttatcgtttgttgggtttcatgagggatcccattgaagtagatcccttttatgaagggatcccattgaatgcagcattaactcagaacgtagcataaagtcgtcactgctcccagctgggacgtggtgtcttggcatcccttcctgccgtccttgactctttcccatcttcagttctataattttctcccaaacaaatgctcttttagagttaacactaaagatctggtctttgccgtcaaggttgacagaacagctgttcatggtgtttgcggtgaaacccgtgttctctttcaatgcagtctgtggctttaacgtgtgtcctgtaatttcgccaagttcatttcttgcctctggtaacttgggggtggatttccttgggctctctaggtgtactgctatgtcagatgcaaaatgtcacccagcttcctgtcacatatccttgtctgtgcattcatgcatctacctcattccggttttctttctaatctcatgtattcctgttgtgaggaaatgtgttcttttcccgatccttttgtagttcatacacgtgacaattgggtttccacgcacgtgcatgagatgttcctccttcaaaccttgttactatgtcagcacattaactgcctggcatggaaaaagaaaaaaaaaaaagaaatatgttcttttcctaccatttgaaaaaaatcctccattgcttttattagagttttgaatacttgtgaaaattttcaaaagaaagtaattgattaccatttttgctgcttattacgatgagctgtgtccattagctgtgtcaccccactcttgcatttccagaatagtccctacccaattgcagcgggcatgtttttgagtggtgttgcattccatgtgcttgattttgtcctagaactggcacagcgcctgccctacctgcagccctgggttgtggccctgttgcgtaccatgtgatttgccaccccgcttctaggccatattaattcagccagaactgaacacctgacccaagggcagcaagcaatcatcagagcatagagctgacagaacatgatggaccacggacaccaccaggccttccagatctgaaatgcaaacaaggaaacagaagcttctaggcatcagaaggtgtggggagcagcacagtactcagaggagtgaggagcgtggcgcctgctgggaggaaggcctggccatggtatgttcttggatttctggcagcagccctcattggtccacgtgcgtccccactacagactccttgacttgagccagcttgagtgggtctctactcttttctattgtgttttgccacttggctgcttcctggccaagtcgcacctgactgcatgaacacctgttcaaacgtgtgttctctgttctctaagatgggtgaaagtcgatgccttctagtctcagtgaatttaacctgtgattttatgtctacgtatattgttcctttactgaacccaccacatgcgggccataaaatgagtgaaatcacagtgcaccctgttctcttatttttgaagtgtttcacgatttccagcatgtccatcagatggggggattgctaacttctctcttactcatgtacttacattctgtagttctcattgcatcactttggatgtttactttgaaaagcagaaactgtctctttaaacttggccctcaatgtcatttgcgtatctctgagaacaatagctatgtcccaccccagtttgtatttccgttggttgttggcacttttttctcattcccccatctcattaccttgtctgttttctggcactcactataatcagccttgcactagagctgtttgtggacttggcttcaccccctcctcctcagccctcccccacccattaaattgtgagctcttagaagacaggggtggcctttcatgtctgatcccctaccaaatctagcacagtgccttgcatcaagtagatttcaataaatatatgttaa

SEQ ID NO: 1097 - DNA, 2921 bp, Homo sapiens
cagcgagcgccgtcgtctgcccgggcccgcccatcggggtccccaaccccatccggaccccgccgcccgagcgcgcggccccggaagcacccgcctcccggcatggtgctcaaggccttcttccccacgtgctgcgtctcgacggacagcgggctgctggtgggacggtgggtgccggagcagagcagcgccgtggtcctggcggtcctgcactttcccttcatccccatccaggtcaagcagctcctggcccaggtgcggcaggccagccaggtgggcgtggccgtgctgggcacctggtgccactgccggcaggagcccgaggagagcctgggccgcttcctggagagcctgggtgctgtcttcccccatgagccctggctgcggctgtgccgggagagaggcggcacgttctggagctgcgaggccacccaccggcaagcgcccactgcccccggtgcccctggtgaggaccaggtcatgctcatcttctatgaccagcgccaggtgttgctgtcacagctacacctgcccaccgtcctgcccgaccgccaggctggagccaccactgccagcacggggggcctggctgccgtcttcgacacggtagcacgcagtgaggtgctcttccgcagtgaccgctttgatgagggccccgtgcggctgagccactggcagtcggagggcgtggaggccagcatcctcgcggagctggccaggcgagcctcgggacccatttgcctgctgttggccagcctgctgtcgctggtctcagctgtcagtgcctgccgagtgttcaagctctggcccctgtccttcctcgggagcaaactctccacgtgcgaacagctccggcaccggctggagcacctcacgctaatcttcagtacacggaaggcggagaaccctgcccagctgatgaggaaggccaacacggtggcctctgtgctgctggacgtggccctgggcctcatgctgctgtcctggctccacgggagaagccgcatcgggcatctggccgacgccctcgttcctgtggctgaccacgtggccgaggagctccagcatctgctgcagtggctgatgggtgctcccgccgggctcaagatgaaccgtgcactggaccaggtgctgggccgcttcttcctctaccacatccacctgtggatcagctacatccacctcatgtcccccttcgtggagcacatcctttggcacgtgggcctctcggcctgcctgggcctgacggtggccctgtccctcctctcggacattatcgccctcctcaccttccacatctactgcttttacgtctatggagccaggctgtactgcctgaagatccatggcctgtcctcactgtggcgtctgttccgggggaagaagtggaacgttctgcgccagcgcgtggactcctgttcctatgacctggaccagctgttcatcgggactctgctcttcaccatcctgctcttcctcctgcctaccacagccctgtactacctggtgttcaccctgctccggctcctggtggtcgccgtgcagggcctgatccatctgctcgtggacctcatcaactccctgccgctgtactcactgggtcttcggctctgccggccctacaggctggcggctggcgtgaagttccgtgtcctccggcacgaggccggcaggcccctccgcctcctgatgcagataaacccactgccctacagccgcgtggtgcacacctaccgcctccccagctgtggctgccaccccaagcactcctggggcgccctgtgccgcaagctgttccttggggagctcatctacccctggaggcagagaggggacaagcaggactgagggaactgctggctcgcctggcaccaccacacggccacagccagccatctgctctgccagggtggcaccagctcagctggcgcatgtcctgtgctttgtggacgctgctgtgtgctcctgaacacggcaggccctgctatcacaccttgggcttggaggtcattgggagtgagcagatgtgggggtggccagccaggctggccgcactccatcactggcactgcctgccttgggacccgcttcccacctgctgcggtcaccatggtggcgagcacagcaaccccaggtgtccagagcactgccccatgcccaccctgtgtacccaggtccagagggtccgtccaccacagcagccccaggtggagggctggtctccctgggggctccccagtggctctgccctggctgtgggggtggagggaccttgccaggatgaaccccccagtcccaggcaccctctagctccctcagccgaacagcaccctgcatctgggggattgaagcagtcgctgacccccgtccccagcgggcccgggccctcactccctgaaccacacggggtttatttgcggatgttccctggagaggtcgctttgtgaagaaaccatcagcaggctgtgagcatcgccaggctgctgtgggggcgggagcagcctcagtgtcaagggcccgcccactgacccagccgtacctattcgtccacggtgccccgtagcagcaggtcctgcggccaaatctgtctcccttcatgggcctcccagggaaggaggaagccctgctgtgcagacacctctgtggccccccaggagtgtgagtggcctggggagggggccgtggcactgaggccgaaagtgcctgccagacggcacggtctgggtgcgggtgttccctgtgagcccgagtccgcttcaggaggggagcctgcaggtgccggctggtgaggggatgacgcgctgtgggtgggaggaggcagcgcccatctcagcagcaccaggactgcctgggactccctggcaacccagcaccggggaagccgtcagctgctgtgacaataaaacctgccccgtgtctgg

SEQ ID NO: 1098 - DNA, 2878 bp, Homo sapiens
cagcgagcgccgtcgtctgcccgggcccgcccatcggggtccccaaccccatccggaccccgccgcccgagcgcgcggccccggaagcacccgcctcccggcatggtgctcaaggccttcttccccacgtgctgcgtctcgacggacagcgggctgctggtgggacggtgggtgccggagcagagcagcgccgtggtcctggcggtcctgcactttcccttcatccccatccaggtcaagcagctcctggcccaggtgcggcaggccagccaggtgggcgtggccgtgctgggcacctggtgccactgccggcaggagcccgaggagagcctgggccgcttcctggagagcctgggtgctgtcttcccccatgagccctggctgcggctgtgccgggagagaggcggcacgttctggagctgcgaggccacccaccggcaagcgcccactgcccccggtgcccctggtgaggaccaggtcatgctcatcttctatgaccagcgccaggtgttgctgtcacagctacacctgcccaccgtcctgcccgaccgccaggctggagccaccactgccagcacggggggcctggctgccgtcttcgacacggtagcacgcagtgaggtgctcttccgcagtgaccgctttgatgagggccccgtgcggctgagccactggcagtcggagggcgtggaggccagcatcctcgcggagctggccaggcgagcctcgggacccatttgcctgctgttggccagcctgctgtcgctggtctcagctgtcagtgcctgccgagtgttcaagctctggcccctgtccttcctcgggagcaaactctccacgtgcgaacagctccggcaccggctggagcacctcacgctaatcttcagtacacggaaggcggagaaccctgcccagctgatgaggaaggccaacacggtggcctctgtgctgctggacgtggccctgggcctcatgctgctgtcctggctccacgggagaagccgcatcgggcatctggccgacgccctcgttcctgtggctgaccacgtggccgaggagctccagcatctgctgcagtggctgatgggtgctcccgccgggctcaagatgaaccgtgcactggaccaggtgctgggccgcttcttcctctaccacatccacctgtggatcagctacatccacctcatgtcccccttcgtggagcacatcctttggcacgtgggcctctcggcctgcctgggcctgacggtggccctgtccctcctctcggacattatcgccctcctcaccttccacatctactgcttttacgtctatggagccaggctgtactgcctgaagatccatggcctgtcctcactgtggcgtctgttccgggggaagaagtggaacgttctgcgccagcgcgtggactcctgttcctatgacctggaccagctgttcatcgggactctgctcttcaccatcctgctcttcctcctgcctaccacagccctgtactacctggtgttcaccctgctccggctcctggtggtcgccgtgcagggcctgatccatctgctcgtggacctcatcaactccctgccgctgtactcactgggtcttcggctctgccggccctacaggctggcggataaacccactgccctacagccgcgtggtgcacacctaccgcctccccagctgtggctgccaccccaagcactcctggggcgccctgtgccgcaagctgttccttggggagctcatctacccctggaggcagagaggggacaagcaggactgagggaactgctggctcgcctggcaccaccacacggccacagccagccatctgctctgccagggtggcaccagctcagctggcgcatgtcctgtgctttgtggacgctgctgtgtgctcctgaacacggcaggccctgctatcacaccttgggcttggaggtcattgggagtgagcagatgtgggggtggccagccaggctggccgcactccatcactggcactgcctgccttgggacccgcttcccacctgctgcggtcaccatggtggcgagcacagcaaccccaggtgtccagagcactgccccatgcccaccctgtgtacccaggtccagagggtccgtccaccacagcagccccaggtggagggctggtctccctgggggctccccagtggctctgccctggctgtgggggtggagggaccttgccaggatgaaccccccagtcccaggcaccctctagctccctcagccgaacagcaccctgcatctgggggattgaagcagtcgctgacccccgtccccagcgggcccgggccctcactccctgaaccacacggggtttatttgcggatgttccctggagaggtcgctttgtgaagaaaccatcagcaggctgtgagcatcgccaggctgctgtgggggcgggagcagcctcagtgtcaagggcccgcccactgacccagccgtacctattcgtccacggtgccccgtagcagcaggtcctgcggccaaatctgtctcccttcatgggcctcccagggaaggaggaagccctgctgtgcagacacctctgtggccccccaggagtgtgagtggcctggggagggggccgtggcactgaggccgaaagtgcctgccagacggcacggtctgggtgcgggtgttccctgtgagcccgagtccgcttcaggaggggagcctgcaggtgccggctggtgaggggatgacgcgctgtgggtgggaggaggcagcgcccatctcagcagcaccaggactgcctgggactccctggcaacccagcaccggggaagccgtcagctgctgtgacaataaaacctgccccgtgtctggaaaaaaaaaaaaaaaaaaa

SEQ ID NO: 1099 - DNA, 2596 bp, Homo sapiens
gcttcttctgcccggagaggacgtcatttccgccgagtccctgacctgctgctaggatcgcgacgggaactggagcccgaggtccccgcgcggcccgggcctggcgccctgaggggaagagcggcccggcccgagccatgacggacgggatcctagggaaggcagccacaatggagatccctatccacgggaacggcgaagccaggcagcttcctgaagatgatgggctggagcaggacctccagcaggtgatggtgtcaggacccaacctcaatgaaaccagcattgtgtctggtggctatgggggctctggtgatggactcatccccacagggtctggccgccatccatctcacagcaccactccttctggccctggagatgaggtggctcggggcattgctggagaaaagtttgacatcgtcaagaaatggggcatcaacacctataagtgcacaaagcaactgttatcagaacgatttggtcgaggctcacggactgtggacctggagctagagctgcagattgagttgctgcgtgagacgaagcgcaagtatgagagtgtcctgcagctgggccgggcactgacagcccacctctacagcctgctgcagacccagcatgcactgggtgatgcctttgctgacctcagccagaagtccccagagcttcaggaggaatttggctacaatgcagagacacagaaactactatgcaagaatggggaaacgctgctaggagccgtgaacttctttgtctctagcatcaacacattggtcaccaagaccatggaagacacgctcatgactgtgaaacagtatgaggctgccaggctggaatatgatgcctaccgaacagacttagaggagctgagtctaggcccccgggatgcagggacacgtggtcgacttgagagtgcccaggccactttccaggcccatcgggacaagtatgagaagctgcggggagatgtggccatcaagctcaagttcctggaagaaaacaagatcaaggtgatgcacaagcagctgctgctcttccacaatgctgtgtccgcctactttgctgggaaccagaaacagctggagcagaccctgcagcagttcaacatcaagctgcggcctccaggagctgagaaaccctcctggctagaggagcagtgagctgctcccagcccaacttggctatcaagaaagacattgggaagggcagccccagggtgtgggagattggacatggtacatcctttgtcacttgccctctggcttgggctcctttttctggctggggcctgacaccagttttgcccacattgctatggtgggaagagggcctggaggcccagaagttgctgccctgtctatcttcctggccacagggcttcattcccagatcttttccttccacttcacagccaacggctatgacaaaaccactccctggccaatggcatcactcttcaggctggggtgtgctccctgaccaatgacagagcctgaaaatgccctgtcagccaatggcagctcttctcggactcccctgggccaatgatgttgcgtctaataccctttgtctctcctctatgcgtgcccattgcagagaaggggactgggaccaaaggggtggggataatggggagccccattgctggccttgcatctgaataggcctaccctcacccacccacccagtttaattgtgcttagagcccaagaagattgggatctagcactaggaataaacctttcataaaagcaggcccagcgaggtcaatttgtcggggactctaggagggtggcctgggtggagacaagctcagtctaatcaaacaccagaaccctatcaagtcaaaagagctggggccaggcagctgaagtcacaggtttcagagatggtttgaaggcccagtcttctctcccagcctcagttggagccaaagctttgtcctttagccagcaccaagatagctatggatcttaagagcaccagatccagagggggttgggtttgctgaccttcatcatgcattcattcatacagcaaatatttactgagtgctttcatttgccagggactgcgttaggccctggggaaacatcagtgaataaaacacggtccctgcccacagtgcttagggcctactgagggaaagaagtaaccaggcaactacaaaacagtgataagtattaggatacagaagtacagagggcgctgtgggagcacaaaggaggggcatctggcatggactggggtggaaatggggatgtcagtttgaaagctgagacctggccaggtgcggtggctcactcctgtaatcccagcactttgggaggccgaggcgggcggatcaccaggtcaggagatcaagaccatcctggctaacacggtgaaaacccatctctactaaaaatgcaagaaaattagcccggcacggtggctggcgcctgtagtcctgtagtcccagctactcgggaggctgaggcaggagaatggtgtgaacccgggaggcggagcttgcagtggagccaagattgcgccactgcactccagcctgggcaacagagcgggactccatctcaaaaaaaaaaaaaaaaaa

SEQ ID NO: 1100 - DNA, 2972 bp, Homo sapiens
acgcgcggagcgccgggtgcggccatgcggggaccgggcccgaccccgagcccgaccccgagcccaagcccgagccggagcccgagcgagaccccgagcccgagcccgagcgcgacccccggtgcggcgcggctaccccggcggaggcggcgggcgcggggcgcgctctgaggcccgggggatgcgccgccgcctcgaccatgggcgccgccgcctccaggaggagggcgctgaggagcgaggccatgtcctcggtggcggccaaagtgcgagcagcccgagcgtttggagagtacctgtcccagagtcaccctgagaaccgcaacggcgcagatcacctgctggctgatgcctactctggccacgacgggtcccccgagatgcagccggccccccagaacaagcgccgcctgtccctcgtctccaacggctgctacgagggcagcctctcagaggagcccagcattaggaagcccgcaggcgagggccctcagcctcgagtgtacaccatctctggggagcctgccctgctgcccagccctgaggcggaggccattgagctggcggtggtgaaggggcggcggcagcggcaccctcaccatcacagccagcccctgcgcgccagccctggtggcagccgggaggacgtcagcaggccctgccagagctgggcgggcagccgccagggctccaaggagtgccccggatgtgcccagctggctcctggccccacccctcgggcctttgggctggaccagccacctctgcctgagacctccggtcgccgcaagaagctggagaggatgtacagcgttgaccgtgtgtctgacgacatccctattcgtacctggttccccaaggaaaatcttttcagcttccagacagcaaccacaactatgcaagcggtgttcaggggctacgcggagaggaagcgccggaaacgggagaatgattccgcgtctgtaatccagaggaacttccgcaaacacctgcgcatggtcggcagccggagggtgaaggcccagacgttcgctgagcggcgcgagcggagcttcagccggtcctggagcgaccccacccccatgaaagccgacacttcccacgactcccgagacagcagtgacctgcagagctcccactgcacgctggacgaggccttcgaggacctggactgggacactgagaagggcctggaggctgtggcctgcgacaccgaaggcttcgtgccaccaaaggtcatgctcatttcctccaaggtgcccaaggctgagtacatccccactatcatccgccgggatgacccctccatcatccccatcctctacgaccatgagcacgcaaccttcgaggacatccttgaggagatagagaggaagctgaacgtctaccacaagggagccaagatctggaaaatgctgattttctgccagggaggtcctggacacctctatctcctcaagaacaaggtggccacctttgccaaagtggagaaggaagaggacatgattcacttctggaagcggctgagccgcctgatgagcaaagtgaacccagagccgaacgtcatccacatcatgggctgctacattctggggaaccccaatggagagaagctgttccagaacctcaggaccctcatgactccttatagggtcaccttcgagtcacccctggagctctcagcccaagggaagcagatgatcgagacgtactttgacttccggttgtatcgcctgtggaagagccgccagcactcgaagctgctggactttgacgacgtcctgtgaggggcagaggcctccgcccagtcaccatcaggccactccctctgcaccgggacctggggctgggccgcctcgtgctccccgggactgtgtggctccggtctcgcctggagccacttcagggcacctcagacgttgctcaggttccccctgtgggttccggtcctcgctgcacccgtggccgcagaggctgcagtccctgggggccgggaggatcccgccctgtggcccgtggatgctcagcggccaggcactgacctgccatgcctcgcctggaggctcagctgtgggcatccctccatggggttcatagaaataagtgcaatttctacacccccgaaacaattcaaagggaagcagcatttcttgttaactagttaagcactatgctgctagttacagtgtaggcaccccggcccagcagcccagcagcccacatgtgttcaggaccctccctgcccaccccctccctgccgtatcgatcaccagcaccagggtggcccgtgtgcgtggggccagcgtcgccgggctgcccagcctggctctgtctacactggccgagtctctgggtctgtctacactggccgagtctccgactgtctgtgctttcacttacactcctcttgccaccccccatccctgcttacttagacctcagccggcgccggacccggtaggggcagtctgggcagcaggaaggaagggcgcagcgtcccctccttcagaggaggctctgggtggggcctgctccccatccccccaagcccacccagcactctcattgctgctgttgagttcagcttttaccagcctcagtgtggaggctccatcccagcacacaggcctggggcttggcaggggcccagctggggctgggccctgggttttgagaaactcgctggcaccacagtgggcccctggacccggccgcgcagctggtggactgtaggggctcctgactgggcacaggagctcccagcttttgtccacggccagcaggatgggctgtcgtgtatatagctggggcgagggggcaggccccccttgtgcagagccaggggtctgagggcacctggctgtgttcccagctgagggagggctggggcgggggccgggcttggaacgatgtacgataccctcatagtgaccattaaacctgatcctccaccgcgaaaaaaaaaaaaaaaa

SEQ ID NO: 1101 - DNA, 800 bp, Homo sapiens
gccagcctaggccgaacttccggctctcactgctaggggcttaagcggagggagtcgagccagcgtcgccgcgatggtgttgttggagagcgagcagttcctgacggagctgaccagacttttccagaagtgccggacgtcgggcagcgtctatatcaccttgaagaagtatgacggtcgaaccaaacccattccaaagaaaggtactgtggagggctttgagcccgcagacaacaagtgtctgttacgagctaccgatgggaagaagaagatcagcactgtggtgagctccaaggaagtgaataagtttcagatggcttattcaaacctccttagagctaacatggatgggctgaagaagagagacaaaaagaacaaaactaagaagaccaaagcagcagcagcagcagcagcagcagcacctgccgcagcagcaacagcagcaacaacagcagcagcaacagcagcaacagcagcacagtaaagggcatacatttcctgctttcaccaattgaccactgaattgctattttttccttttggccagatagctaggtttctggttcccccacagtaggtgttttcacataagattagggtccttttggaaagaatagttgcagtgtttataggatagttgtggtaagaatctagtttattttgcatttggctaattggcctgtgctgcatggttatatactcctggattatagattaaaagtctctgtagacatctctgtgaagagcaagctatcattaaacatgtctgtttatcaaaaaaaaaaaaaaaaaaaaaaaaa

SEQ ID NO: 1102 - DNA, 2304 bp, Homo sapiens
acttccgggccctgcgtggcagttgaaagagtggcgggagaagttgcagggaattatttgatagcacatactgatggctctaaagaagtcatcaccctcactggattctggtgatagtgactctgaggagttgccaacatttgcctttctgaagaaggaaccatcttcaacaaagaggagacagcctgaaagggaagagaagattgtagtggttgacatctcagattgtgaagcctcctgtcctccagcaccagagttattttcaccacctgtcccagacatagctgaaactgtcacacaaacacagccagtcaggttgctaagcagtgaaagtgaagatgaagaagaatttattcctctggctcaaaggcttacatgtaagtttctgacccacaagcaactgagccctgaggactctagctccccagttaaaagtgttttggatcatcaaaataatgaaggtgcatcatgtgactggaaaaagccctttccaaagatccctgaagttcccctccatgataccccagagaggagtgcagcagataacaaggacctgatcttagatccatgctgtcagcttccagcctacctgtctacctgccctggccagagcagcagcttggcagtaaccaaaacaaattctgacatccttccaccccagaagaaaaccaagccgagtcagaaggtccagggaagaggctcacacggatgccagcagcagagacaagcaaggcagaaggaaagcaccctgagaagacaggaaagaaagaatgcagcactggttaccaggatgaaagcccagaggccagaggaatgcttaaaacacatcattgtagtgctggatccagtgctcttacagatggaaggtgggggccagctcctaggagcactgcagaccatggagtgccgctgtgtgattgaggcgcaggctgtgccttgcagtgtcacttggaggagaagggctgggccgtctgaggacagagaggactgggtggaggagccaacagtactggtgttgctccgggcagaggcatttgtgtccatgatcgacaatggaaagcagggaagcctggacagcactatgaaagggaaggaaacgcttcagggctttgtaactgacatcacagcaaagacagcagggaaagctctgtcactggtgattgtggatcaggagaaatgcttcagtgctcagaatcctccaagaagagggaaacagggagcaaataaacagaccaagaagcagcagcagagacaaccagaggccagcatagggtccatggtatccagggtagacgctgaagaggcattggtggatctgcagctacacacagaagcccaggctcaaattgtgcagagctggaaagagctggccgacttcacatgcgcattcacaaaggctgtggctgaggcgcccttcaagaagctccgagatgaaactaccttctccttctgtctggagagtgactgggctggaggggtgaaggtggaccttgctggcaggggactcgcactagtctggaggagacagattcagcagctgaaccgagtcagcctggaaatggccagtgcagttgtgaatgcctatccctccccacagctcctggtacaggcttatcagcagtgtttttcggataaagaacgccagaatttgctcgcagacatacaggtgcgccgtggggaaggtgtgacatccacttctcgccgcattggaccagaactatccaggcgtatctaccttcagatgaccactttacagccacatctctctttagatagtgctgactgattctagccctcagggatgaggatgaaaagctggaaacttccacttccccaacctcagagcctgactgtaatgaagagactggcagcacctcctggaacacaagcctaggtgaggcccagtctttcttgggtcttattatttgtgaaggtctctctgcctgtcggctggggcagagactgaaatactgccacctacctttggcatttaatgttcctctcctggcaaaaattcactgccacagacaaaccacccccactcctacccagccagccctcaaaacacaaaggaacaaagacagtccactcagacacttatttaataactgtagaaatccaaaagaattagcatcaaatcttgaagtcgtgagtgaagctgcgggttggcttgactgggctcagccactgagctgcctcaaccggccaaggaacgggattatgatgactatgcggacttctatattgtcttcatctcattgtgtgtattatgtatttagtttcaataaagcatttgtaccaatg

SEQ ID NO: 1103 - DNA, 4862 bp, Homo sapiens
aggacccggaagtgagggtgtgagaggcctctctggaagttgtcccgggtgttcgccgctggagcccgggtcgagaggacgaggtgccgctgcctggagaatcctccgctgccgtcggctcccggagcccagccctttcctaacccaacccaacctagcccagtcccagccgccagcgcctgtccctgtcacggaccccagcgttaccatgcatcctgccgtcttcctatccttacccgacctcagatgctcccttctgctcctggtaacttgggtttttactcctgtaacaactgaaataacaagtcttgatacagagaatatagatgaaattttaaacaatgctgatgttgctttagtaaatttttatgctgactggtgtcgtttcagtcagatgttgcatccaatttttgaggaagcttccgatgtcattaaggaagaatttccaaatgaaaatcaagtagtgtttgccagagttgattgtgatcagcactctgacatagcccagagatacaggataagcaaatacccaaccctcaaattgtttcgtaatgggatgatgatgaagagagaatacaggggtcagcgatcagtgaaagcattggcagattacatcaggcaacaaaaaagtgaccccattcaagaaattcgggacttagcagaaatcaccactcttgatcgcagcaaaagaaatatcattggatattttgagcaaaaggactcggacaactatagagtttttgaacgagtagcgaatattttgcatgatgactgtgcctttctttctgcatttggggatgtttcaaaaccggaaagatatagtggcgacaacataatctacaaaccaccagggcattctgctccggatatggtgtacttgggagctatgacaaattttgatgtgacttacaattggattcaagataaatgtgttcctcttgtccgagaaataacatttgaaaatggagaggaattgacagaagaaggactgccttttctcatactctttcacatgaaagaagatacagaaagtttagaaatattccagaatgaagtagctcggcaattaataagtgaaaaaggtacaataaactttttacatgccgattgtgacaaatttagacatcctcttctgcacatacagaaaactccagcagattgtcctgtaatcgctattgacagctttaggcatatgtatgtgtttggagacttcaaagatgtattaattcctggaaaactcaagcaattcgtatttgacttacattctggaaaactgcacagagaattccatcatggacctgacccaactgatacagccccaggagagcaagcccaagatgtagcaagcagtccacctgagagctccttccagaaactagcacccagtgaatataggtatactctattgagggatcgagatgagctttaaaaacttgaaaaacagtttgtaagcctttcaacagcagcatcaacctacgtggtggaaatagtaaacctatattttcataattctatgtgtatttttattttgaataaacagaaagaaattttgggtttttaatttttttctccccgactcaaaatgcattgtcatttaatatagtagcctcttaaaaaaaaaaaacctgctaggatttaaaaataaaaatcagaggcctatctccactttaaatctgtcctgtaaaagttttataaatcaaatgaaaggtgacattgccagaaacttaccattaacttgcactactagggtagggaggacttagggatgtttcctgtgtcgtatgtgcttttctttctttcatatgatcaattctgttggtattttcagtatctcatttctcaaagctaaagagatatacattctggatacttgggaggggaataaattaaagttttcacactgtgtactgtgttttactgattggttggatattgcttatgaaaattccatagtggtatttttttggattcttaatgtgtaacttaaacatactttgaagtggaggagagtcataagacagaacatttggcaggaattgtccttatgaaacaagaaaaagaaaatgaaaagtattattaagcttctgtgtttgtctaaaaatgtggcatatggatggcatttaaaactttgaatgaattatacctaaatctgggacagggaggtgacagtggaacaggctaccaatcagaactagatgacttttaaggctcctcctattatgagacttcaatttccaaagagaagaactagcagagaaattgtatttcagtaattttaagctccttctgtcttgtagagtcttgttatagttgtataaatcaaaaacacagaataaggaacatatttaactttttttcattataaaatggttagaggaccctaccccctctagattccctgatttccccaggcctgcagcatacagtaagatgggtccctgtgccaggcctcaatactgccagggaataaaaccagagggagaggaccctcagtgtcatatcaggaagcccagtgccagaggacagacaggttcaaaactggcttttcctctgggcctgggttggtgctataggccaagggtcattttatacttgggtataaatcaatcccagtttgggaaaagattatttttaagcttaaaaggctgacatgtgccattatatgtagtatgtaatatatgtaacatcttccaattcttttaaaataaaattaatatttataatggatatttaatgattgttatttttaaaaaccagcttataattcctcgttatgcatgatttatccaaagtttccatagttttattcaaaataataaatgttaataaggtgataaggggtatatttaatgtattgtatcaaattgtgaataagaaagtaggatggagctttctagaggttgggccttagttctgttatcctcattgcttttaaccaataagttaaatgaagttagagttatggtcttcaggttagattatggaccagatctgtgagggtcagcatggaaattcacattcaacaaggtagcacacaggaccaagagcagcacatgcaatcaactggaataatatagtaatcctgtaactgggtttgaaaaaataatcaacaaaagatacaattcaagggttaggttgcagagagctggcttgagagtagttattatgaaaaaggcctcaaggagtacgtgttcagtatgctctaagatgataaagtggctgttaaaaagggagttgatttgaggaagtattacttagcattcatgcatattgggcttaggctctagccctgccactatcattgtcttctctggactgtgaagtcactgaggacaaggaaactaaatttaatgtctgtatcactagtgcctagaatttctggacacttagtagtcaccatcaggcgtttatttaatgaatgagaagcaaagtgaccttggttacttttttaccctgaggggctcagcactcattaggacttggtgcctaattttataaaaagtcactaagctcaagtgcttggatgaaaggacagcgtggataaaaaggtttttaaaacatggatgttaaggctgttttgcttggagaagacttgggactgggacagtctttagatattatttgaaatgctggcactgtctatctggatcccagggcttgaactaggatttgaggaagtcacagggaagcagatttcagtctgacatttattcagtgcaagttttttggtgctgtagtatatgatgaaagatgtaaagctgaataaagcattatttctgccctagagttgttcacagcctagtcaggcatatggatatgtaaacaatgactgtaacgtgttatagatgtaaagacaaaataaaggttaaagagggcataaaggagcactcaattgcagagatttgaggacattatttttattttgagctttaaaaagatgaataggtgttctcaggaggtagggatctggctgagagggaataatctgagcaaaggtatgaaacagcctaatgcattagagaaaaaagttcttttagtaaggcatttggggttggggaagctagaaaaagaaatgggagctggtcacacagggccttgtgtgccagactaaggggtttgtagtatatattgtaggcagaagagatccatcaacagattgcaagcaaggaagtatgttcactttaaagtttgagaaagaatagtgtggaagcacgtctcaaatttagacttgttccccctctgaaccgtgaatcagaccatttcaggtagaagtcttccccggtttatctgatctactcggggcctcaggcttctcagctgggaagagaggatgcaagaccagactgaagaacacggttgagtccccagaaccaaaagggggcctttctgcttcttagccagctacctcttcgagtttttcaaattgtgagggggaccataaaaggatggaaacttttagatgacattctacaaattatttttttctttaaattaaaagaacctagccaataagatagagaatgggcatctaaggcatctcagagctctctgatgaagccaggttgtcaaagatcatttgcaaaagaagggaaaactggcatgacaaaagctacagagaggagagtgaaatatagaagtgtttgaaatgttcaagctcacaataagcttaaatttatagaaaatgctaaggttgtcaagaaggcttttttttttttcttttttaaacctgagggcaaaaaggaatggataaagtagtgtaatggattgacaatcaggaagaacagaataactcagttttttttctcctacaaggagatatggctggaccaaaataaaatgacatgaaattgcaaaaatgaaaa

SEQ ID NO: 1104 - DNA, 1867 bp, Homo sapiens
tgtggacgctgtgaatcgtggctggcccggttctccgcttctccccatcccctactttcctccctccctccctttccctccctcgtcgactgtttcttgctggtcgcagactccctgacccctccctcacccctccctaacctcggtgccaccggattgcccttcttttcctgttgcccagcccagccctagtgtcagggcgggggcctggagcagcccgaggcactgcagcagaagagagaaaagacaacgacgaccctcagctcgccagtccggtcgctggcttcgccgccgccatggcaatgagacagacgccgctcacctgctctggccacacgcgacccgtggttgatttggccttcagtggcatcacgccttatgggtatttcttaatcagcgcttgcaaagatggtaaacctatgctacgccagggagatacaggagactggattggaacatttttgggtcataaaggtgctgtttggggtgcaacactgaataaggatgccaccaaagcagctacagcagctgcagatttcacagccaaagtgtgggatgctgtctcaggagatgaattgatgaccctggctcataaacacattgtcaagactgtggatttcacgcaggatagtaattatttgttaaccgggggacaggataaactgttacgcatatatgacttgaacaaacctgaagcagaacctaaggaaattagtggtcatacttctggtataaaaaaagctctgtggtgcagtgaggataaacagattctttctgctgatgacaaaactgttcgactttgggatcatgctactatgacagaagtgaaatctctaaattttaatatgtctgttagtagtatggaatatattcctgagggagagattttggttataacttatggacgatctattgcttttcatagtgcagtaagtttggacccaattaaatcctttgaagctcctgcaaccatcaattctgcatctcttcatcctgagaaagaatttcttgttgcaggcggtgaagattttaaactttataagtatgattataatagtggagaagaattagaatcctacaagggacactttggtcctattcactgtgtgagatttagtcctgatggagaactctatgccagtggttcagaagatggaacattgagactatggcaaactgtggtaggaaaaacgtatggcctttggaaatgtgtgcttcctgaagaagatagtggtgagctggcaaagccaaagattggttttccagagacaacagaagaggagctagaagaaattgcttcagagaattcagagtgcatctttccttcagctcctgatgttaaggcctgagcgtcaatcatatgttgcagttagtatacaactgactaaaacaagcaagcagagaaaagcatcagccttccagagttactgtctgcttaaggcagaaacagcagtaaataatgaggaaaatgaattagctccagtgctggaacaactaactaacttggtgttacctgtaagtgaaaactcaagtgtcagatgaagggaggtggagttatcctcttatagtacagtggcctgttatctttttaatgaatatatacaagccaacatccaatttctattattacaattagggttcttgtagctgtttatgttaatatggagaagaaaactatattggctgatttttttctgatcttaaagcagaatgccttttctttttttgcttcagttgtaaagaagagggaatacatgataaagtaactggtttgatttctcgttcattgtacactgcctctgaacatctaattgtttttagttgtctaaataaaatgcctctaaaacaaaaaaaaaaaaaaaaaaaa

SEQ ID NO: 1105 - DNA, 2271 bp, Homo sapiens
gcctcgcggcaggagcgggatttccggggtcacgggaaccggcaggggaacgggataaagttcccggagaaaggaaaggagagcgtgggatagtaaaagagaagacgcggagaagaggagaggacctacaagaacggaggacaggggcgcacgatggtcccggggggagcggaaacaaaggcacgcaaaacggaaaagcgtgtgtaggggagcggaaaaggaagtcaccaccgtggcctgcgacgaaatggcgaaaagtcttttgaagacagcctctctgtctggaaggacaaaattgctacatcaaacaggattgtcactttatagtacatcccatggattttatgaggaagaagtgaaaaaaacacttcagcagtttcctggtggatccattgaccttcagaaggaagacaatggcattggcattcttactctgaacaatccaagtagaatgaatgccttttcaggtgttatgatgctacaacttctggaaaaagtaattgaattggaaaattggacagaggggaaaggcctcattgtccgtggggcaaaaaatactttctcttcaggatctgatctgaatgctgtgaaatcactaggaactccagagacttcctttaataagtgttgcgctggttcaaggttgggcattgggtggaggagcagaatttactacagcatgtgatttcaggttaatgactccagagagtaagatcagattcgtccacaaagagatgggcataataccaagctggggtggcaccacccggctagttgaaataatcggaagtagacaagctctcaaagtgttgagtggggcccttaaactggattcaaaaaatgctctaaacataggaatggttgaagaggtcttgcagtcttcagatgaaactaaatctctagaagaggcacaagaatggctaaagcaattcatccaagggccaccggaagtaattagagctttgaaaaaatctgtttgttcaggcagagagctatatttggaggaagcattacagaacgaaagagatcttttaggaacagtttggggtgggcctgcaaatttagaggctattgctaagaaaggaaaatttaataaataattggtttttcgtgtggatgtactccaagtaaagctccagtgactaatatgtataaatgttaaatgatattaaatatgaacatcagaattactttgaaggctactattaatatgcagacttacttttaatcatttgaatatctgaactcatttacctcatttcttgccaattactcacttgggtatttactgcgtaatctggaacatttagctaaaatatacacttttggcttaaaaattattgctgtcaattccaataataattcttagcttataaccaaagagcagtgtttaaaaggagagcttctatacaaaacctattcctggcgttacttttcatacaatttttgttctgttttacctggaaataatttaccaaaataactgagtgttgctgctaaagaacaaaagtggggaggtatcagggaacaagaaaacaagaaagggtatgatcaatcattttcttctgctccaaacagctggagtaaaattcatgggaaatggcccttcatttaaaaaaagatgtacctcactacccactacaaatttggaactttgttcttttcaataattagttttctattgtaaattacctactaaacagtggtagccatgacatggaaagtcaactgattctacaattggacattcatttgtgtgccctggaatttccaactagtaataaacaactactgttgatgtagttttaaaccacttgaagggactcatgaagcatcctgcaacataaatttgcatttttacatcagatttcttttttttcctgaaaaacaactaaccttctaacaactatctttcaaaagtaaatgtaataaaaatgcacaacataaaatgtttatgatcccagcaatacactttttaaaaaatgtgaaagtcaaagaattaagttctagttctgactcatcacaagaggtcaaaagtatttgctactgtaacattcaattcacatttgagaatcatggtaaaaataacttgcatttgccttaccatcatgatcctactgttgagttaggaaaatatggttagacagactcacattactttttttcagaggtaaactctagattactgtgtcaacccaatactatttggccatagatgtaaaaactaccaaataaaagtggattttgtggtctacaaaaaaaaaaaaaaaa

SEQ ID NO: 1106 - DNA, 2808 bp, Homo sapiens
gtccgtccttcctggtcctgcgggtccaggactgtccgcggggttgagggaaggggccgtgcccggtgccagcccaggtgctcgcggcctggctccatggccctggtcacagtgagccgttcgcccccgggcagcggcgcctccacgcccgtggggccctgggaccaggcggtccagcgaaggagtcgactccagcgaaggcagagctttgcggtgctccgtggggctgtcctgggactgcaggatggaggggacaatgatgatgcagcagaggccagttctgagccaacagagaaggccccgagtgaggaggagctccacggggaccagacagacttcgggcaaggatcccagagtccccagaagcaggaggagcagaggcagcacctgcacctcatggtacagctgctgaggccgcaggatgacatccgcctggcagcccagctggaggcaccccggcctccccggctccgctacctgctggtagtttctacacgagaaggagaaggtctgagccaggatgagacggtcctcctgggcgtggatttccctgacagcagctcccccagctgcaccctgggcctggtcttgcccctctggagtgacacccaggtgtacttagatggagacgggggcttcagcgtgacgtctggtgggcaaagccggatcttcaagcccatctccatccagaccatgtgggccacactccaggtattgcaccaagcatgtgaggcagctctaggcagcggccttgtaccgggtggcagtgccctcacctgggccagccactaccaggagagactgaactccgaacagagctgcctcaatgagtggacggctatggccgacctggagtctctgcggcctcccagcgccgagcctggcgggtcctcagaacaggagcagatggagcaggcgatccgtgctgagctgtggaaagtgttggatgtcagtgacctggagagtgtcacttccaaagagatccgccaggctctggagctgcgcctggggctccccctccagcagtaccgtgacttcatcgacaaccagatgctgctgctggtggcacagcgggaccgagcctcccgcatcttcccccacctctacctgggctcagagtggaacgcagcaaacctggaggagctgcagaggaacagggtcacccacatcttgaacatggcccgggagattgacaacttctaccctgagcgcttcacctaccacaatgtgcgcctctgggatgaggagtcggcccagctgctgccgcactggaaggagacgcaccgcttcattgaggctgcaagagcacagggcacccacgtgctggtccactgcaagatgggcgtcagccgctcagcggccacagtgctggcctatgccatgaagcagtacgaatgcagcctggagcaggccctgcgccacgtgcaggagctccggcccatcgcccgccccaaccctggcttcctgcgccagctgcagatctaccagggcatcctgacggccagccgccagagccatgtctgggagcagaaagtgggtggggtctccccagaggagcacccagcccctgaagtctctacaccattcccacctcttccgccagaacctgagggtggtggggaggagaaggttgtaggcatggaagagagccaggcagccccgaaagaagagcctgggccacggccacgtataaacctccgaggggtcatgaggtccatcagtcttctggagccctccttggagctggagagcacctcagagaccagtgacatgccagaggtcttctcttcccacgagtcttcacatgaagagcctctgcagcccttcccacagcttgcaaggaccaagggaggccagcaggtggacagggggcctcagcctgccctgaagtcccgccagtcagtggttaccctccagggcagtgccgtggtggccaaccggacccaggccttccaggagcaggagcaggggcaggggcaggggcagggagagccctgcatttcctctacgcccaggtcccggaaggtggtgagacaggccagcgtgcatgacagtggagaggagggcgaggcctgagccctcacacatgcccacgctcccctgacactgaagaggatccacaactccttggagaaacaccctcacgtctgttgccgcacacattcctctcagctccgccccatacccgtcactacagcctcacctcccacccctgtcactacggcctcacctcccacccctgtcactacagcctcacctcctacagccttaagtcccaggcccatgtctgcctgtccaagggctcaagactttctaactgggatgtggtagagggactgaaggtacctttgggggcaacagcaccctagtttcattctcaactctagccctgcacactcacctgtggcacggaatgaaaacagagcttcccgtgcaaaaagggtcacgcctcccacccccgccccctccctgcacctcctgtcctctcccagttcattcctggaaccagccaggccaggcaaccagtggcccccaaaggcaggcaggatcctcaggccccagccgcgggaggctggaagggctggcagatcgcttccctcatccacctccaccggtccaggtctttgctgctgtccccagacctcctgtgacaccacgccagatcacagggcaccaggccagagatagtcttctttttgtcctttctggcctctggctagtcagtttttcatagccttacagtatctggctttgtactgagaaataaaacacattttcatatttggttaaaaaaaaaaaaaaaaaaaa

SEQ ID NO: 1107 - DNA, 2604 bp, Homo sapiens
atggccctggtcacagtgagccgttcgcccccgggcagcggcgcctccacgcccgtggggccctgggaccaggcggtccagcgaaggagtcgactccagcgaaggcagagctttgcggtgctccgtggggctgtcctgggactgcaggatggaggggacaatgatgatgcagtagaggccagttctgagccaacagagaaggccccgagtgaggaggagctccacggggaccagacagacttcgggcaaggatcccagagtccccagaagcaggaggagcagaggcagcacctgcacctcatggtacagctgctgaggccgcaggatgacatccgcctggcagcccagctggaggcaccccggcctccccggctccgctacctgctggtagtttctacacgagaaggagaaggtctgagccaggatgagacggtcctcctgggcgtggatttccctgacagcagctcccccagctgcaccctgggcctggtcttgcccctctggagtgacacccaggtgtacttagatggagacgggggcttcagcgtgacgtctggtgggcaaagccggatcttcaagcccatctccatccagaccatgtgggccacactccaggtattgcaccaagcatgtgaggcagctctaggcagcggccttgtaccgggtggcagtgccctcacctgggccagccactaccaggagagactgaactccgaacagagctgcctcaatgagtggacggctatggccgacctggagtctctgcggcctcccagcgccgagcctggcgggtcctcagaacaggagcagatggagcaggcgatccgtgctgagctgtggaaagtgttggatgtcagtgacctggagagtgtcacttccaaagagatccgccaggctctggagctgcgcctggggctccccctccagcagtaccgtgacttcatcgacaaccagatgctgctgctggtggcacagcgggaccgagcctcccgcatcttcccccacctctacctgggctcagagtggaacgcagcaaacctggaggagctgcagaggaacagggtcacccacatcttgaacatggcccgggagattgacaacttctaccctgagcgcttcacctaccacaatgtgcgcctctgggatgaggagtcggcccagctgctgccgcactggaaggagacgcaccgcttcattgaggctgcaagagcacagggcacccacgtgctggtccactgcaagatgggcgtcagccgctcagcggccacagtgctggcctatgccatgaagcagtacgaatgcagcctggagcaggccctgcgccacgtgcaggagctccggcccatcgcccgccccaaccctggcttcctgcgccagctgcagatctaccagggcatcctgacggccagaacctgagggtggtggggaggagaaggttgtaggcatggaagagagccaggcagccccgaaagaagagcctgggccacggccacgtataaacctccgaggggtcatgaggtccatcagtcttctggagccctccttggagctggagagcacctcagagaccagtgacatgccagaggtcttctcttcccacgagtcttcacatgaagagcctctgcagcccttcccacagcttgcaaggaccaagggaggccagcaggtggacagggggcctcagcctgccctgaagtcccgccagtcagtggttaccctccagggcagtgccgtggtggccaaccggacccaggccttccaggagcaggagcaggggcaggggcaggggcagggagagccctgcatttcctctacgcccaggttccggaaggtggtgagacaggccagcgtgcatgacagtggagaggagggcgaggcctgagccctcacacatgcccacgctcccctgacactgaagaggatccacaactccttggagaaacaccctcacgtctgttgccgcacacattcctctcagctccgccccatacccgtcactacagcctcacctcccacccctgtcactacggcctcacctcccacccctgtcactacagcctcacctcctacagccttaagtcccaggcccatgtctgcctgtccaagggctcaagactttctaactgggatgtggtagagggactgaaggtacctttgggggcaacagcaccctagtttcattctcaactctagccctgcacactcacctgtggcacggaatgaaaacagagcttcccgtgcaaaaagggtcacgcctcccacccccgccccctccctgcacctcctgtcctctcccagttcattcctggaaccagccaggccaggcaaccagtggcccccaaaggcaggcaggatcctcaggccccagccgcgggaggctggaagggctggcagatcgcttccctcatccacctccaccggtccaggtctttgctgctgtccccagacctcctgtgacaccacgccagatcacagggcaccaggccagagatagtcttctttttgtcctttctggcctctggctagtcagtttttcatagccttacagtatctggctttgtactgagaaataaaacacattttcataaaaaaaaaaaaaaaaaa

SEQ ID NO: 1108 - DNA, 1965 bp, Homo sapiens
ttgctgcatgccttcattcctggtgccctctcttgtctcttccccagtcctgctgaagctgctctttagcccaggccccaagactatatggtccctgtggcagcagccaatgttgtttcaggaagcaacagcatttgaaaatatgaccaaagattggaattatttagaaggctctcaaaaggattgctacagagacacaatgctggacagttatgagaacacggtcccacagggatccttcttacagctctccatgatgcctcagagagctggaaatgatccacctggggtttcaaatgcaagtgaaatggaaatggagataagtaacatgagagaaaagtttcttatgagtgtaacaaagttagtagaaagcaaaagttacaacagcaaggtattttccaaagaaaagtactttcaaacaataaaggaagttaaagaagctaaagaaaaagggaagaagtcatcacgtgattatcgccgtgcagcaaaatatgatgtgatctctgtacagggcacagagaaactgatagaggctactcatggagaacgtgatcgaatacggtattatgtacataaggaagagttgtttgatattcttcatgatacacatctcagtattggacatggtgggcggacacgcatgctcaaggagctgcaaggaaaatatgggaatgtcaccaaagaagttattgtcttatatctgactctgtgtaaacagtgccaccagaagaacccagtacccaagagaggccttgcaccaaagcccatgacttttaaggacatagactccacatgccaagttgaaatacttgacatgcagtccagtgccgatggtgagttcaagttcattttatactaccaggatcactcaaccaagtttattattttacggccattaagaaccaaacaggcccatgaggtggtcagtgtcttgttagatattttcacaattcttggtacacccagtgtgttagactctgacagtggcgttgagttcacaaaccaggttgttcatgagctcaatgagttgtggccagacctaaagattgtatctggtaagtaccaccctggccaaagccagggctccctggaaggagcaagccgtgatgtaaagaacatgataagtacctggatgcagagtaaccactcatgtcactgggccaaaggcctccgattcatgcagatggtgaggaatcaggctttcgacgtttccttgcagcaaagtccatttgaggcaatgtttggctataaagccaaatttgggctatattcctcaaacttgccccgggaaactgtggctactttacaaacggaagaagagctagaaattgctgaagaacagctagaaaatagcctttggatcaggcaggaagaaagggctgagattggagcagacagatctgatatggacgatgacatggatcccactcctgaagcttcagaacccagcacctcacaagggacttccggtctcctctgctggtgaacagatggctgctgggtggacagtcacaggtgtctctctgagcatagtcatctgagaactgttgccagaggccccagaggaaaagattgaaggctgcactctcaggtcaagttgtacatggcagtccttgctcaaaaagacaaaagttcaggtctgtgtatttattcttagggctgccataaaaaattaccacaacctggccgggcgcagcgctcatgcccgtaatcccagcactttggtaggccgaggtgggcgggtcacttgagatcaggagttcaagactagcctggccaacatgatgaaaccctgtctctactgaaaatatagaaattggccaggcttggagctgtgtgcctgtaatcccagctaaccaggaggctgaggcaggagaatcacttgaacccgggaggcagaggttgcagtgagccgagaccatgccactgcactccggcctgggtgacaaagcaagactctgtctc

SEQ ID NO: 1109 - DNA, 2389 bp, Homo sapiens
gccggggcctcggccatgttcgcggggctgcaggacctgggcgtggccaacggcgaggacctgaaggagaccctgaccaactgcacggagccgctcaaggccatcgagcagttccagacagagaatggtgtgctgctgccatctcttcagtcagccctccccttcttggacttgcacgggacgccgcggctggagttccaccagtcggtattcgatgagctgcgggacaagctgctggagcgagtgtcagccatcgcttcggaggggaaggctgaggaaaggtacaagaagctggaagaccttctggagaagagcttttctctggtgaagatgccgtccctgcagcccgtggtgatgtgcgtcatgaagcacctgcccaaggttccggagaaaaaactgaagctggttatggctgacaaggagctgtatcgagcctgcgccgtggaggtgaagcggcagatctggcaagacaaccaggccctcttcggggacgaggtttccccactcctgaagcagtacatcctggagaaggagagcgctctcttcagtacagagctctctgtcctgcacaactttttcagtccttcccccaagaccaggcgccagggcgaggtggtgcagcggctgacgcggatggtggggaagaacgtgaagctgtacgacatggtgctgcagtttctgcgcacgctcttcctgcgcacgcggaatgtgcactactgcacgctgcgggctgagctgctcatgtccctgcacgacctggacgtgggtgaaatctgcaccgtggacccgtgccacaagttcacctggtgcctggacgcctgcatccgagagcggttcgtggacagcaagagggcgcgggagctgcaggggtttctcgatggcgtcaagaaaggccaggagcaggtgctgggggacctgtccatgatcctgtgtgaccccttcgccatcaacacgctggcactgagcacagtcaggcacctgcaggagctggtcggccaggagacactgcccagggacagccccgacctcctgctgctgctccggctgctggcgctgggccagggagcctgggacatgatcgacagccaggtcttcaaggagcccaagatggaggtagagctcatcaccaggttcctcccgatgctcatgtccttcctggtggatgactacactttcaatgtggatcagaaacttccggctgaggagaaagccccagtctcatatccaaacacacttcccgaaagcttcactaagtttctgcaggagcagcgcatggcctgcgaggtggggctgtactacgtcctgcacatcaccaagcagaggaacaagaacgcgctcctccgcctgctgcccgggctggtggagacctttggcgacttggcctttggcgacatcttcctccacctgctcacgggcaaccttgcgctgctggccgacgaatttgcccttgaggacttctgcagcagcctcttcgatggcttcttcctcaccgcctctccaaggaaggagaacgtgcaccggcacgcgctgcggctcctcattcacctgcaccccagggtggccccatctaagctggaggcgttgcagaaggccctggagcctacaggccagagcggagaggcagtgaaggagctttactcccagctcggcgagaagctggaacagctggatcaccggaagcccagcccggcacaggctgcggagacgccggccctggagctgcccctccccagcgtgcccgcccctgccccgctctgagggccctccagacctgctcgggtgctggggccatgccgagtcgcggccctgctcagccggaagaggctcccggacctggatgtacagggcagtctctcttcccggggctatggctgggcctgtcctgccgtcatggccccctgcttcctgctccttggagctggctcccggaccttgcccaccatccatgcagtggctcccagggcagagcctctccttgtactttggcagccatagaaagcgtgctcattttctgttttcctgtgttaggaaaaaaccacctgttttccaaggggagagggcggggcctgagggtgggggcggggcctcttcattggcccagcttggcgaaagcgaggcacactgcttactgccttggggttgtggagatggacccgtgacctcgtggaggccgtgtgggggcagcagcctggcctgtgccatggtgggtgtcctggggcctgtgcggagggagccacctcaccctgcagcccaggttgcaggtgtggccttgtttctccttgcccagcagtgctgccttcagcggccgtgacggggccagctggacacacggtgagattttctcgtatgtaaataaaaggcaatttggtaaaaaaaaaaaaaaaaaaaa

SEQ ID NO: 1110 - DNA, 1491 bp, Homo sapiens
cgagactccatctcaaaaacaaaacaaataaacgaacaaaaaaacccacaacgtattattttcttgtttacgaggtttcttgtctctctggctccaccagaagaggagcagggacccttcttgctgttgttcattgctgcatcccccacaccgagagcagagcctggcatgggcagaaagtcctcagtcgatatttggtggccccaagcgaatgaagcatccaagaagggaaagctgggggctccccactgcacttgccacctgagtcacattttcagaagcctctggaaagtcgtgcacagcccaggagtgttgagcaatttcggtttcctctgaggttgaaggacccaggcgtgtcagccctgctccagacaccttgggcatggaggagagtgtcgtacggccctcagtgtttgtggtggatggacagaccgacatcccattcacgaggctgggacgaagccaccggagacagtcgtgcagtgtggcccgggtgggtctgggtctcttgctgttgctgatgggggccgggctggccgtccaaggctggttcctcctgcagctgcactggcgtctaggagagatggtcacccgcctgcctgacggacctgcaggctcctgggagcagctgatacaagagcgaaggtctcacgaggtcaacccagcagcgcatctcacaggggccaactccagcttgaccggcagcggggggccgctgttatgggagactcagctgggcctggccttcctgaggggcctcagctaccacgatggggcccttgtggtcaccaaagctggctactactacatctactccaaggtgcagctgggcggtgtgggctgcccgctgggcctggccagcaccatcacccacggcctctacaagcgcacaccccgctaccccgaggagctggagctgttggtcagccagcagtcaccctgcggacgggccaccagcagctcccgggtctggtgggacagcagcttcctgggtggtgtggtacacctggaggctggggagaaggtggtcgtccgtgtgctggatgaacgcctggttcgactgcgtgatggtacccggtcttacttcggggctttcatggtgtgaaggaaggagcgtggtgcattggacatgggtctgacacgtggagaactcagagggtgcctcaggggaaagaaaactcacgaagcagaggctgggcgtggtggctctcgcctgtaatcccagcactttgggaggccaaggcaggcggatcacctgaggtcaggagttcgagaccagcctggctaacatggcaaaaccccatctctactaaaaatacaaaaattagccggacgtggtggtgcctgcctgtaatccagctactcaggaggctgaggcaggataattttgcttaaacccgggaggcggaggttgcagtgagccgagatcacaccactgcactccaacctgggaaacgcagtgagactgtgcctcaaaaaaaaaaaaaaaaa

SEQ ID NO: 1111 - DNA, 1395 bp, Homo sapiens
cgagactccatctcaaaaacaaaacaaataaacgaacaaaaaaacccacaacgtattattttcttgtttacgaggtttcttgtctctctggctccaccagaagaggagcagggacccttcttgctgttgttcattgctgcatcccccacaccgagagcagagcctggcatgggcagaaagtcctcagtcgatatttggtggccccaagcgaatgaagcatccaagaagggaaagctgggggctccccactgcacttgccacctgagtcacattttcagaagcctctggaaagtcgtgcacagcccaggagtgttgagcaatttcggtttcctctgaggttgaaggacccaggcgtgtcagccctgctccagacaccttgggcatggaggagagtgtcgtacggccctcagtgtttgtggtggatggacagaccgacatcccattcacgaggctgggacgaagccaccggagacagtcgtgcagtgtggcccgggacggacctgcaggctcctgggagcagctgatacaagagcgaaggtctcacgaggtcaacccagcagcgcatctcacaggggccaactccagcttgaccggcagcggggggccgctgttatgggagactcagctgggcctggccttcctgaggggcctcagctaccacgatggggcccttgtggtcaccaaagctggctactactacatctactccaaggtgcagctgggcggtgtgggctgcccgctgggcctggccagcaccatcacccacggcctctacaagcgcacaccccgctaccccgaggagctggagctgttggtcagccagcagtcaccctgcggacgggccaccagcagctcccgggtctggtgggacagcagcttcctgggtggtgtggtacacctggaggctggggaggaggtggtcgtccgtgtgctggatgaacgcctggttcgactgcgtgatggtacccggtcttacttcggggctttcatggtgtgaaggaaggagcgtggtgcattggacatgggtctgacacgtggagaactcagagggtgcctcaggggaaagaaaactcacgaagcagaggctgggcgtggtggctctcgcctgtaatcccagcactttgggaggccaaggcaggcggatcacctgaggtcaggagttcgagaccagcctggctaacatggcaaaaccccatctctactaaaaatacaaaaattagccggacgtggtggtgcctgcctgtaatccagctactcaggaggctgaggcaggataattttgcttaaacccgggaggcggaggttgcagtgagccgagatcacaccactgcactccaacctgggaaacgcagtgagactgtgcctcaaaaaaaaaaaaaaaaaaaaaaaaaaaaa

SEQ ID NO: 1112 - DNA, 2757 bp, Homo sapiens
cgcgcaaatcctcgtccgcgagaactgcaaggcccgcaatgccctgcgcctgcgtggaccgattagctttgaagtttaaatccaatggagaagactcaagaaacagtccaaagaattcttctagaaccctataaatacttacttcagttaccaggtaaacaagtgagaaccaaactttcacaggcatttaatcattggctgaaagttccagaggacaagctacagattattattgaagtgacagaaatgttgcataatgccagtttactcatcgatgatattgaagacaactcaaaactccgacgtggctttccagtggcccacagcatctatggaatcccatctgtcatcaattctgccaattacgtgtatttccttggcttggagaaagtcttaacccttgatcacccagatgcagtgaagctttttacccgccagcttttggaactccatcagggacaaggcctagatatttactggagggataattacacttgtcccactgaagaagaatataaagctatggtgctgcagaaaacaggtggactgtttggattagcagtaggtctcatgcagttgttctctgattacaaagaagatttaaaaccgctacttaatacacttgggctctttttccaaattagggatgattatgctaatctacactccaaagaatatagtgaaaacaaaagtttttgtgaagatctgacagagggaaagttctcatttcctactattcatgctatttggtcaaggcctgaaagcacccaggtgcagaatatcttgcgccagagaacagaaaacatagatataaaaaaatactgtgtacattatcttgaggatgtaggttcttttgaatacactcgtaatacccttaaagagcttgaagctaaagcctataaacagattgatgcacgtggtgggaaccctgagctagtagccttagtaaaacacttaagtaagatgttcaaagaagaaaatgaataatgttaagccattcttgattggacctcatagcttattttagttaatcttttttttgtcttttagccttaccaccttttaaaaaatttgttattctccagaaacagtaaataggtgagtaggggtggtgcaagtgaattcgttttcatttagaagcccctctgtacagataatcaaaattcaaagttgaaagaatcaaaagcagccacagttatgtaggtctgatttgaatgtcataattgcagtgacaggacattgccaccaactctatcctactaccatcaatgttgtgtttattccgtcaataaaaaagacttgcttccaggaatttttatccatacactttctaactgtactatctgggcagttccaagccagtttctattagctagctggaccaaagaccacaaatctctttttttcctaaacgctgctgtaaggaatatctcacttttccccccggaaacaccctcactgaagtcttctatgaaaaggctgataatgggctgggcgcggtggctcacgcctgtaatcccagcactttgggaggccgaggcgggcagatcacgaggtcaggagatcgagaccatcctgacacggtgaaaccctgtctctactaaaaatacaaaaaattagctgggcgtggtggtgggcgcctgtagtcccagctactcgggaggctgaggcaggagaatggtgtgaacccaggaggcggagcttgcagtgagccgagatagtgcctctgcactccagcctgggtgacagagcgagactccgtctcaaaaaaaagggctgataatgataaacagtgagcactccggtcctttttcttaggttttccttttttccttcctctccaccccacaagttttgctttttaaccaaggtgtctctgcttgatgaaattcacatgctagtctaaatctttttttctcccttgtaacatttatgtgccccaaactggttagtatatgggtacagcattccctttccaattgggaagcggaaaaagagagtatgggatattttagaagggagcctttgaaccttattatatttccccatcattgatagtgacaatcttaaaagggttgttttcttaccttaagtacaaaagcatggaaaaatgcgcttttccttcccgcccacatcaccaccccgacttgaagacagtaggtgcttgaatggaaagtgagtaggcatctttaatcgccctgattaaaggaaagtgttagcctgagagggcctgactgaaaagtaaccaaaggcttaatatcaaacactaattagctttttagtgccttaaccctgacctggttaccagttttctgtagtttctacacccaagccactgaagtcatctgtggcccaagaggtaggacaaaaaaaaaaaaaaaaaaagctgatttcaatatttgatttgttgacatcccaaaatgaaagttttatgtttcccttagaaacatgttttgcttggttctatagtatgttacttaggatctatttaccatatatttgtatgagaaatcctcacccaagcattcaacctaaatctttgaaaagttgggtgctgtctttagtaacttttaaaatagtttaaatctcccattttaatagtgataaggaaacctgttaaaatcatggctattgatgttatagtatggaaagttgaactttatgaacccatacttttaaaaagcatttttaaaaatctaacactgactatagaaacaaattaaaatgtctacctttaagtataaaaaaaaaaaaaaa

SEQ ID NO: 1113 - DNA, 2828 bp, Homo sapiens
gcaacgacgcctgcgcagtgtgaccgggatggcgcattttcttgcaccaactaatgcggtgtcgctggcggctgaggagggcggagagttctgtggtgaaatagtgggaaggattcatgtaggcatcgggaagagcctaagtccacattataaaataggaagttgatgcggggtacagttactcccggaccggcggcgtgaaagtcgtgatatcatcgttgaactgtaaacaagtgagaaccaaactttcacaggcatttaatcattggctgaaagttccagaggacaagctacagattattattgaagtgacagaaatgttgcataatgccagtttactcatcgatgatattgaagacaactcaaaactccgacgtggctttccagtggcccacagcatctatggaatcccatctgtcatcaattctgccaattacgtgtatttccttggcttggagaaagtcttaacccttgatcacccagatgcagtgaagctttttacccgccagcttttggaactccatcagggacaaggcctagatatttactggagggataattacacttgtcccactgaagaagaatataaagctatggtgctgcagaaaacaggtggactgtttggattagcagtaggtctcatgcagttgttctctgattacaaagaagatttaaaaccgctacttaatacacttgggctctttttccaaattagggatgattatgctaatctacactccaaagaatatagtgaaaacaaaagtttttgtgaagatctgacagagggaaagttctcatttcctactattcatgctatttggtcaaggcctgaaagcacccaggtgcagaatatcttgcgccagagaacagaaaacatagatataaaaaaatactgtgtacattatcttgaggatgtaggttcttttgaatacactcgtaatacccttaaagagcttgaagctaaagcctataaacagattgatgcacgtggtgggaaccctgagctagtagccttagtaaaacacttaagtaagatgttcaaagaagaaaatgaataatgttaagccattcttgattggacctcatagcttattttagttaatcttttttttgtcttttagccttaccaccttttaaaaaatttgttattctccagaaacagtaaataggtgagtaggggtggtgcaagtgaattcgttttcatttagaagcccctctgtacagataatcaaaattcaaagttgaaagaatcaaaagcagccacagttatgtaggtctgatttgaatgtcataattgcagtgacaggacattgccaccaactctatcctactaccatcaatgttgtgtttattccgtcaataaaaaagacttgcttccaggaatttttatccatacactttctaactgtactatctgggcagttccaagccagtttctattagctagctggaccaaagaccacaaatctctttttttcctaaacgctgctgtaaggaatatctcacttttccccccggaaacaccctcactgaagtcttctatgaaaaggctgataatgggctgggcgcggtggctcacgcctgtaatcccagcactttgggaggccgaggcgggcagatcacgaggtcaggagatcgagaccatcctgacacggtgaaaccctgtctctactaaaaatacaaaaaattagctgggcgtggtggtgggcgcctgtagtcccagctactcgggaggctgaggcaggagaatggtgtgaacccaggaggcggagcttgcagtgagccgagatagtgcctctgcactccagcctgggtgacagagcgagactccgtctcaaaaaaaagggctgataatgataaacagtgagcactccggtcctttttcttaggttttccttttttccttcctctccaccccacaagttttgctttttaaccaaggtgtctctgcttgatgaaattcacatgctagtctaaatctttttttctcccttgtaacatttatgtgccccaaactggttagtatatgggtacagcattccctttccaattgggaagcggaaaaagagagtatgggatattttagaagggagcctttgaaccttattatatttccccatcattgatagtgacaatcttaaaagggttgttttcttaccttaagtacaaaagcatggaaaaatgcgcttttccttcccgcccacatcaccaccccgacttgaagacagtaggtgcttgaatggaaagtgagtaggcatctttaatcgccctgattaaaggaaagtgttagcctgagagggcctgactgaaaagtaaccaaaggcttaatatcaaacactaattagctttttagtgccttaaccctgacctggttaccagttttctgtagtttctacacccaagccactgaagtcatctgtggcccaagaggtaggacaaaaaaaaaaaaaaaaaaagctgatttcaatatttgatttgttgacatcccaaaatgaaagttttatgtttcccttagaaacatgttttgcttggttctatagtatgttacttaggatctatttaccatatatttgtatgagaaatcctcacccaagcattcaacctaaatctttgaaaagttgggtgctgtctttagtaacttttaaaatagtttaaatctcccattttaatagtgataaggaaacctgttaaaatcatggctattgatgttatagtatggaaagttgaactttatgaacccatacttttaaaaagcatttttaaaaatctaacactgactatagaaacaaattaaaatgtctacctttaagtataaaaaaaaaaaaaaa

SEQ ID NO: 1114 - DNA, 2921 bp, Homo sapiens
gcaacgacgcctgcgcagtgtgaccgggatggcgcattttcttgcaccaactaatgcggtgtcgctggcggctgaggagggcggagagttctgtggtgaaatagtgggaaggattcatgtaggcatcgggaagagcctaagtccacattataaaataggaagttgatgcggggtacagttactcccggaccggcggcgtgaaagtcgtgatatcatcgttgaactattagctttgaagtttaaatccaatggagaagactcaagaaacagtccaaagaattcttctagaaccctataaatacttacttcagttaccaggtaaacaagtgagaaccaaactttcacaggcatttaatcattggctgaaagttccagaggacaagctacagattattattgaagtgacagaaatgttgcataatgccagtttactcatcgatgatattgaagacaactcaaaactccgacgtggctttccagtggcccacagcatctatggaatcccatctgtcatcaattctgccaattacgtgtatttccttggcttggagaaagtcttaacccttgatcacccagatgcagtgaagctttttacccgccagcttttggaactccatcagggacaaggcctagatatttactggagggataattacacttgtcccactgaagaagaatataaagctatggtgctgcagaaaacaggtggactgtttggattagcagtaggtctcatgcagttgttctctgattacaaagaagatttaaaaccgctacttaatacacttgggctctttttccaaattagggatgattatgctaatctacactccaaagaatatagtgaaaacaaaagtttttgtgaagatctgacagagggaaagttctcatttcctactattcatgctatttggtcaaggcctgaaagcacccaggtgcagaatatcttgcgccagagaacagaaaacatagatataaaaaaatactgtgtacattatcttgaggatgtaggttcttttgaatacactcgtaatacccttaaagagcttgaagctaaagcctataaacagattgatgcacgtggtgggaaccctgagctagtagccttagtaaaacacttaagtaagatgttcaaagaagaaaatgaataatgttaagccattcttgattggacctcatagcttattttagttaatcttttttttgtcttttagccttaccaccttttaaaaaatttgttattctccagaaacagtaaataggtgagtaggggtggtgcaagtgaattcgttttcatttagaagcccctctgtacagataatcaaaattcaaagttgaaagaatcaaaagcagccacagttatgtaggtctgatttgaatgtcataattgcagtgacaggacattgccaccaactctatcctactaccatcaatgttgtgtttattccgtcaataaaaaagacttgcttccaggaatttttatccatacactttctaactgtactatctgggcagttccaagccagtttctattagctagctggaccaaagaccacaaatctctttttttcctaaacgctgctgtaaggaatatctcacttttccccccggaaacaccctcactgaagtcttctatgaaaaggctgataatgggctgggcgcggtggctcacgcctgtaatcccagcactttgggaggccgaggcgggcagatcacgaggtcaggagatcgagaccatcctgacacggtgaaaccctgtctctactaaaaatacaaaaaattagctgggcgtggtggtgggcgcctgtagtcccagctactcgggaggctgaggcaggagaatggtgtgaacccaggaggcggagcttgcagtgagccgagatagtgcctctgcactccagcctgggtgacagagcgagactccgtctcaaaaaaaagggctgataatgataaacagtgagcactccggtcctttttcttaggttttccttttttccttcctctccaccccacaagttttgctttttaaccaaggtgtctctgcttgatgaaattcacatgctagtctaaatctttttttctcccttgtaacatttatgtgccccaaactggttagtatatgggtacagcattccctttccaattgggaagcggaaaaagagagtatgggatattttagaagggagcctttgaaccttattatatttccccatcattgatagtgacaatcttaaaagggttgttttcttaccttaagtacaaaagcatggaaaaatgcgcttttccttcccgcccacatcaccaccccgacttgaagacagtaggtgcttgaatggaaagtgagtaggcatctttaatcgccctgattaaaggaaagtgttagcctgagagggcctgactgaaaagtaaccaaaggcttaatatcaaacactaattagctttttagtgccttaaccctgacctggttaccagttttctgtagtttctacacccaagccactgaagtcatctgtggcccaagaggtaggacaaaaaaaaaaaaaaaaaaagctgatttcaatatttgatttgttgacatcccaaaatgaaagttttatgtttcccttagaaacatgttttgcttggttctatagtatgttacttaggatctatttaccatatatttgtatgagaaatcctcacccaagcattcaacctaaatctttgaaaagttgggtgctgtctttagtaacttttaaaatagtttaaatctcccattttaatagtgataaggaaacctgttaaaatcatggctattgatgttatagtatggaaagttgaactttatgaacccatacttttaaaaagcatttttaaaaatctaacactgactatagaaacaaattaaaatgtctacctttaagtataaaaaaaaaaaaaaa

SEQ ID NO: 1115 - DNA, 20431 bp, Homo sapiens
gctgcccagagcccccatagagagaggtccccgccgccaccctcatggatcagccacagttcagcggggcgccccgctttctcacccggcccaaggccttcgtggtgtcggtgggcaaggacgccaccctcagctgccagatcgtgggtaatcccacgccacaggtgagctgggagaaggaccagcagccggtggcggccggcgcgcgcttccgtctggcccaggacggcgacctctaccgcctcactatcctggacctggcgctgggcgacagtgggcaatacgtgtgccgcgcgcgcaatgccataggcgaggccttcgctgctgtgggcctgcaggtggacgcggaggccgcgtgcgccgagcaggcgccgcacttcctgctgcggcccacgtccatccgcgtgcgcgagggctcagaggccaccttccgctgccgcgtgggtggctccccgaggccggcagtgagctggtccaaggacgggcggcgcctgggtgagcccgacggcccccgcgtgcgcgtggaggagctcggcgaggcaagtgcgctgcgcattcgggcggcgcggccgcgcgacggcggcacttacgaggtccgcgccgagaacccgctgggcgctgccagcgccgccgcggcgctagtggtggactcggacgccgcggacacggccagccggcccgggacctccacggccgcgctcctggcgcacctgcagcggcggcgcgaggctatgcgcgccgagggcgcccccgcctcaccgcccagcaccggcacgcgcacctgcacggtgactgaaggcaagcacgcgcgcctcagctgctacgtgaccggcgagcccaagcccgagacggtgtggaagaaggacggccagctggtgaccgagggccggcgccacgtggtgtacgaggacgcgcaggagaacttcgtgctcaagatcctcttctgcaagcagtcggaccgcggcctctacacctgcacggcgtccaacctcgtgggccagacctacagctctgtgctggtcgtagtgcgcgagcccgcggttcccttcaaaaagcggctgcaagatctggaggtgcgggagaaggagtcggccacgttcctatgtgaggtgccccagccgtccactgaggccgcgtggttcaaggaggagacgcggttgtgggcgagcgccaagtacggcatcgaggaggagggcaccgagcgccgcctgaccgtgcgcaatgtctcggccgacgacgacgcggtgtacatctgcgagacgccagagggcagccgcacggtggcggagctcgcagtccaaggaaacctcctccgaaagctccctcggaagacggcggtgcgcgtgggcgacacggctatgttttgcgtggagctggcggtcccggtgggccccgtccactggctgcggaaccaggaggaagtggtggcggggggccgcgtggccatctccgcggagggcacgcgccacacactaaccatctcccagtgctgcctggaggatgtgggccaggtggcctttatggctggcgactgccagacgtccacccagttctgcgtgtcggcccccaggaagcctcccctgcaaccccctgtggatcctgtggtaaaggccaggatggagagttccgtgattctcagctggtccccaccaccccatggggaacgccctgtcactatcgacggctacctggtagagaagaagaagcttggcacctacacctggatcaggtgccacgaggctgaatgggtggctacacctgagctgaccgtggctgatgtggcggaggaggggaacttccagttccgagtgtccgctctcaacagctttggtcagagtccctacctcgagttcccggggactgtccacctggcccccaagctggccgtgaggacaccgctgaaggcggtgcaggcggtagagggtggcgaggtcactttctccgtggacctcacggtggcctcagcgggtgagtggttcctggatgggcaggccctgaaggccagcagtgtgtatgagatccactgtgatcgcacccggcacacgctcaccatccgggaggtgcccgccagcctgcacggggcgcagctgaagttcgtggccaacggcattgagagcagcatccggatggaggtccgggcggccccagggctgactgccaacaagccgccagccgcagctgcccgggaggtgctggctcggctgcacgaggaggcgcagctgctggctgagctgtcagatcaggctgcggctgtgacgtggctgaaggatggtcgcacactgtccccaggccccaagtatgaggtgcaggcatcggccgggcggcgggtgctccttgtgcgagatgtggcccgggacgatgcaggcctctacgagtgcgtcagccgcgggggccgcatcgcctaccagctctccgtgcaaggcctcgcgcgctttctgcacaaggacatggcgggcagctgtgtggatgccgtggctgggggcccggcgcagtttgagtgtgagacctccgaagcccacgtccacgtgcactggtacaaggatggcatggagctgggccactccggtgagcgcttcttgcaggaggatgtggggacgcggcaccggctggtggcagccacagtcaccaggcaggatgaaggcacctactcctgccgcgtgggcgaggactctgtggacttccggctccgcgtctctgagcccaaggtggtgtttgctaaggagcagctggcacgcaggaagctgcaggcagaggcaggagccagtgccacactgagctgcgaggtggcccaggcccagacggaggtgacgtggtacaaggatgggaagaagctgagctccagctcgaaagtgtgcatggaggccacaggctgcacgcgcaggctggttgtgcagcaggcaggccaggcggatgccggggagtatagctgcgaggctgggggccagcggctctccttccatctggatgtcaaagagcccaaggtggtgtttgccaaggaccaggtggcacacagtgaggtgcaggctgaggcaggggccagtgccacgctgagctgcgaggtggcccaggcccagacggaggtgatgtggtacaaagatgggaagaagctgagctccagcttgaaagtgcatgtagaggccaagggctgcagacggaggctggtggtgcagcaggcaggcaagacagatgccggggactacagctgcgaggccaggggccagagggtctccttccgcctgcacatcacagagcccaagatgatgtttgcaaaggagcagtcagtgcataatgaggtgcaggctgaggcgggggccagtgccatgctgagctgtgaggtggcccaggcccagacggaggtgacgtggtacaaggatgggaagaagctgagctccagctcaaaagtgggcatggaggtcaaagggtgcacacggaggctggtgctgccacaggcgggcaaagcagatgctggggagtacagctgtgaggctgggggccagagagtctccttccacctgcacatcacagagcccaagggggtgtttgcgaaggagcagtcagtgcataatgaggtgcaggctgaggcggggaccactgccatgctgagctgtgaggtggcccagccccagacagaggtgacgtggtacaaggacgggaagaagctgagctccagctcaaaagtacgcatggaggtcaagggctgcacacgaaggctggtagtgcagcaggtgggcaaagcagatgctggggagtacagctgcgaggctgggggccagagagtctcctttcaactgcacatcacagagcccaaggcagtgtttgccaaggagcagttggtgcataatgaggtgcggactgaggcaggggccagtgccacactgagctgtgaggtggcccaggcccagacagaggtgacgtggtacaaggatgggaagaagctgagctccagttcgaaagtgcgcatagaggctgcgggctgcatgcggcagctggtggtgcagcaggcaggccaggcagatgctggggagtacacctgtgaggctgggggccagcggctctccttccacctggatgtttcagagcccaaggcggtgtttgcaaaggagcagctggcacacaggaaggtgcaggccgaggcgggggccattgccacgctgagctgcgaggtggcccaggcccagacagaggtgacgtggtacaaggacgggaagaagctgagctccagctcgaaagttcgaatggaggctgtgggctgcacacggaggctggtggtgcagcaggcatgccaggcggacaccggggagtatagctgcgaggccgggggccagcggctctccttcagcctggacgtggcagagcccaaggtggtgtttgccaaggagcagccagtgcacagggaggtgcaggcccaggcgggggccagcaccacactcagctgcgaggtggctcaggcccagacggaggtgatgtggtacaaggacgggaagaagctgagcttcagctcgaaagtgcgcatggaggctgtgggctgcacacggaggctggtggtgcagcaggcgggccaggcggtcgccggggagtacagctgcgaggcggggagccagcggctctccttccacctgcacgtggcagagcccaaggcggtgtttgccaaggagcagccagcgagcagggaggtgcaggctgaggcggggaccagtgccacgctgagctgcgaggtggcccaggcccagacagaggtgacgtggtacaaggacgggaagaaactgagctccagctcgaaagtgcgaatggaggccgtgggctgcacacggaggctggtggtgcaggaggcaggccaggcggacgccggggagtacagctgcaaggccggggatcagcggctgtccttccacctgcacgtggcagagcccaaggtggtgtttgccaaggagcagccagcacacagggaggtgcaggctgaggcgggggccagtgccacgctgagctgcgaggtggcccaggcccagacagaggtgacgtggtacaaggatgggaagaagctgagttccagctcgaaagtgcgcgtggaggccgtgggctgcacacggaggctggtggtgcagcaggcgggccaggcggatgctggggagtacagctgtgaggcggggggccaacggctgtccttccgcctgcacgtggcagagctggagccccaaatttcagagagaccctgccgcagggagcctctggtggtcaaggagcatgaagacatcatcctgaccgccacactggccacaccctctgcggccacggtgacctggctcaaggatggtgtggagattcgccgcagcaagcggcatgagacagccagccagggggacacccacaccctgaccgtgcatggcgcccaggttctggacagcgccatctacagctgccgtgtgggcgcagaggggcaggacttcccagtgcaggtggaagaggtggccgccaagttctgccggctgctggagcctgtgtgcggcgagctgggtggcacggtgacactggcctgcgagctaagcccagcgtgtgcagaggtggtgtggcgctgcggcaacacgcagcttcgggtgggcaagcgcttccagatggtggccgaggggcccgtgcgctcactcactgtgttggggctgcgcgcagaggacgcaggggagtacgtgtgtgagagccgtgatgaccacaccagtgcgcagctcaccgtcagtgtgccccgagtggtgaagtttatgtctgggctgagcaccgtggtcgcagaggagggcggcgaggccaccttccagtgcgtggtgtcccccagtgatgtggcagtcgtgtggttccgggacggtgccctgcttcagcccagcgagaagtttgccatatcacagagtggcgccagccacagcctgaccatctcagacctggtgctggaggacgcgggccagatcaccgtggaggctgagggcgcctcatcctctgctgccctgagggtccgagaggcgcctgtgctgttcaaaaagaagctggagccgcagacggtggaggagcggagctcggtgaccctggaggtggagctgacgcggccgtggccggagctgaggtggacacggaacgcgacggccctggcgccgggaaagaacgtggagatccacgccgagggcgcccgccaccgcctggttctgcacaacgtaggttttgccgaccgtggcttctttggctgcgagacgccggatgacaagacacaggccaaactcaccgtggagatgcgccaggtacggctcgtacggggcctgcaggcagtggaggcacgggagcagggcacggctaccatggaggtgcagctgtcgcatgcggacgtggatggcagctggactcgtgacggtctgcggttccagcaggggcccacgtgccacctggctgtgcggggccccatgcacaccctcacactctcggggctgcggccagaggatagtggccttatggtcttcaaggccgaaggagtgcacacgtcggcgcggctcgtggtcaccgagcttcccgtgagcttcagccgcccgctgcaggacgtggtgaccactgagaaggagaaggttaccctggagtgcgagctgtcgcgtcctaatgtggatgtgcgctggctgaaggacggtgtggagctgcgggcaggcaagacgatggccatcgcagcccagggcgcctgcaggagcctcaccatttaccggtgcgagttcgcggatcagggagtgtatgtgtgtgatgcccatgatgcccagagctctgcctccgtgaaggtacaaggaaggacatacactctcatctaccggagagtcctggcggaagatgcaggagagatccaatttgtagccgaaaatgcagaatcgcgagcccagctccgagtgaaggagctgccagtgaccctcgtgcgcccgctgcgggacaagattgccatggagaagcaccgcggtgtgctggagtgtcaggtgtcccgggccagcgcccaggtgcggtggttcaagggcagtcaggagctgcagcccgggcccaagtacgagctggtcagtgatggcctctaccgcaagctgatcatcagtgatgtccacgcagaggacgaggacacctacacctgtgacgccggtgatgtcaagaccagtgcacagttcttcgtggaagagcaatccatcaccattgtgcggggtctgcaggacgtgacagtgatggagcccgctcctgcctggtttgagtgtgagacctccatcccctcagtgcggccacctaagtggctcctggggaagacggtgttgcaggctggggggaacgtgggcctggagcaggagggcacggtgcaccggctgatgctgcggcggacctgctccaccatgaccgggcccgtgcacttcaccgttggcaagtcgcgctcctctgcccgcctggtggtctcagacatccccgtagtcctcacacggccgttggagcccaagacagggcgtgagctgcagtcagtggtcctgtcctgcgacttccggccagcccccaaggctgtgcagtggtacaaggatgacacgcccctgtctccctctgagaagtttaagatgagcctggagggtcagatggctgagctgcgcatcctccggctcatgcctgctgatgctggtgtctaccggtgccaggcgggcagtgcccacagcagcactgaggtcactgtggaagcgcgggaggtgacagtgacagggccgctacaggatgcagaggccacggaggagggctgggccagcttctcctgtgagctgtcccacgaggatgaggaggtcgagtggtcgctcaacgggatgcccctgtacaacgacagcttccatgagatctcacacaagggccggcgccacacgctggtactgaagagcatccagcgggctgatgcgggcatagtacgcgcctcctccctgaaggtgtcgacctctgcccgcctggaggtccgagtgaagccggtggtgttcctgaaggcgctggatgacctgtccgcagaggagcgcggcaccctggccctgcagtgtgaagtctctgaccccgaggcccatgtggtgtggcgcaaagatggcgtgcagctgggccccagtgacaagtatgacttcctgcacacggcgggcacgcgggggctcgtggtgcatgacgtgagccctgaagacgccggcctgtacacctgccacgtgggctccgaggagacccgggcccgggtccgcgtgcacgatctgcacgtgggcatcaccaagaggctgaagacaatggaggtgctggaaggggaaagctgcagctttgagtgcgtcctgtcccacgagagtgccagcgacccggccatgtggacagtcggtgggaagacagtgggcagctccagccgcttccaggccacacgtcagggccgaaaatacatcctggtggtccgggaggctgcaccaagtgatgccggggaggtggtcttctctgtgcggggcctcacctccaaggcctcactcattgtcagagagaggccggccgccatcatcaagcccctggaagaccagtgggtggcgccaggggaggacgtggagctgcgctgtgagctgtcacgggcgggaacgcccgtgcactggctgaaggacaggaaggccatccgcaagagccagaagtatgatgtggtctgcgagggcacgatggccatgctggtcatccgcggggcctcgctcaaggacgcgggcgagtacacgtgtgaggtggaggcttccaagagcacagccagcctccatgtggaagaaaaagcaaactgcttcacagaggagctgaccaatctgcaggtggaggagaaaggcacagctgtgttcacgtgcaagacggagcaccccgcggccacagtgacctggcgcaagggcctcttggagctacgggcctcagggaagcaccagcccagccaggagggcctgaccctgcggctcaccatcagtgccctggagaaggcagacagcgacacctatacctgcgacattggccaggcccagtcccgggcccagctcctagtgcaaggccggagagtgcacatcatcgaggacctggaggatgtggatgtgcaggagggctcctcggccaccttccgttgccggatctccccggccaactacgagcctgtgcactggttcctggacaagacacccctgcatgccaacgagctcaatgagatcgatgcccagcccgggggctaccacgtgctgaccctgcggcagctggcgctcaaggactcgggcaccatctactttgaggcgggtgaccagcgggcctcggccgccctgcgggtcactgagaagccaagcgtcttctcccgggagctcacagatgccaccatcacagagggtgaggacttgaccctggtgtgcgagaccagcacctgcgacattcctgtgtgctggaccaaggatgggaagaccctgcgggggtctgcccggtgccagctgagccatgagggccaccgggcccagctgctcatcactggggccaccctgcaggacagtggacgctacaagtgtgaggctgggggcgcctgcagcagctccattgtcagggtgcatgcgcggccagtgcggttccaggaggccctgaaggacctggaggtgctggagggtggtgctgccacactgcgctgtgtgctgtcatctgtggctgcgcccgtgaagtggtgctatggaaacaacgtcctgaggccaggtgacaaatacagcctacgccaggagggtgccatgctggagctggtggtccggaacctccggccgcaggacagcgggcggtactcatgctccttcggggaccagactacttctgccaccctcacagtgactgccctgcctgcccagttcatcgggaaactgagaaacaaggaggccacagaaggggccacggccacgctgcggtgtgagctgagcaaggcagcccctgtggagtggagaaaggggtccgagaccctcagagatggggacagatactgtctgaggcaggacggggccatgtgtgagctgcagatccgtggcctggccatggtggatgccgcggagtactcgtgtgtgtgtggagaggagaggacctcagcctcactcaccatcaggcccatgcctgcccacttcataggaagactgagacaccaagagagcatagaaggggccacagccacgctgcggtgtgagctgagcaaggcggcccccgtggagtggaggaaggggcgtgagagcctcagagatggggacagacatagcctgaggcaggacggggctgtgtgcgagctgcagatctgtggcctggctgtggcagatgctggggagtactcctgtgtgtgtggggaggagaggacctctgccactctcaccgtgaaggccctgccagccaagttcacagagggtctgaggaatgaagaggccgtggaaggggccacagccatgttgtggtgtgaactgagcaaggtggcccctgtggagtggaggaaggggcccgagaacctcagagatggggacagatacatcctgaggcaggaggggaccaggtgtgagctgcagatctgtggcctggccatggcggacgccggggagtacttgtgtgtgtgcgggcaggagaggacctcagccacgctcaccatcagggctctgcctgccaggttcatagaagatgtgaaaaaccaggaggccagagaaggggccacagctgtgctgcagtgtgagctgaacagtgcagcccctgtggagtggagaaaggggtctgagacccttagagatggggacagatacagcctgaggcaggacgggactaaatgtgagctgcagattcgtggcctggccatggcagacactggggagtactcgtgcgtgtgcgggcaggagaggacctcggctatgctcaccgtcagggctctacccatcaagttcacagagggtctgaggaacgaagaggccacagaaggggcaacagccgtgctgcggtgtgagctgagcaagatggcccccgtggagtggtggaaggggcatgagaccctcagagatggagacagacacagcctgaggcaggacggggccaggtgtgagctgcagatccgcggcctcgtggcagaggacgctggggagtacctgtgcatgtgcgggaaggagaggacctcagccatgctcaccgtcagggccatgccttccaagttcatagagggtctgaggaatgaagaggccacagaaggggacacggccacgctgtggtgtgagctgagcaaggcggcaccggtggagtggaggaaggggcatgagaccctcagagatggggacagacacagcctgaggcaggacgggtccaggtgtgagctgcagatccgtggcctggctgtggtggatgccggggagtactcgtgtgtgtgcgggcaggagaggacctcagccacactcactgtcagggccctgcctgccagattcatagaagatgtgaaaaaccaggaggccagagaaggggccacggccgtgctgcaatgtgagctgagcaaggcggcccccgtggagtggaggaaggggtctgagaccctcagaggtggggacagatacagcctgaggcaggatgggaccagatgtgagctgcagattcatggcctgtctgtggcagacactggggagtactcgtgtgtgtgcgggcaggagaggacctcggccacactcaccgtcagggccccacagccagtgttccgggagccgctgcagagtctgcaggcggaggagggctccacggccaccctgcagtgtgagctgtctgagcccactgctacagtggtctggagcaagggtggcctgcagctgcaggccaatgggcgccgggagccacggcttcagggctgcaccgcggagctggtgttacaggacctacaacgtgaagacactggcgaatacacttgcacctgtggctcccaggccaccagtgccaccctcactgtcacagctgcgcctgtgcggttcctccgagagctgcagcaccaggaggtggatgagggaggcaccgcacacttatgctgcgagctgagccgggcgggtgcgagcgtggagtggcgcaagggctccctacagctcttcccttgtgccaagtaccagatggtgcaggatggtgcagctgcagagctgctggtacgcggagtggagcaggaggatgcgggtgactacacgtgtgacacgggccacacgcagagcatggccagcctctctgtccgtgtccccaggcccaagttcaagacccggcttcagagtctggagcaggagacaggtgacatagcccggctgtgctgtcagctgagtgatgcagagtcgggggccgtggtgcaatggctcaaggagggcgtggagctgcatgcgggccccaagtacgagatgcggagccagggggccacgcgggagctgctgatccaccaactggaggccaaggacacgggcgagtatgcctgtgtgacaggcggccagaaaaccgctgcctccctcagggtcacagagcctgaggtgaccattgtacgggggctggttgatgcggaggtgacggccgatgaggatgttgagttcagctgtgaggtgtccagggctggagccacaggcgtgcagtggtgcctacagggcctgccactgcaaagcaatgaggtgacagaggtggctgtgcgggatggccgcatccacaccctgcggctgaagggcgtgacgcccgaggacgctggcactgtctccttccatttgggaaaccatgcttcctctgcccagctcaccgtcagagctcctgaggtgaccatcctggagcccctgcaggacgtgcagctcagtgagggccaggatgccagcttccagtgccggctatccagagcttcaggccaggaggcccgctgggctttaggaggggtgcccctgcaggccaacgagatgaatgacatcactgtggagcagggcacactccacctgctcaccctgcacaaggtgacccttgaggatgctggaactgtcagtttccacgtgggcacgtgtagctctgaggcccagctgaaagtcacagccaagaacacggtggtgcgggggctggagaatgtggaggcgctggagggcggcgaggcgctgttcgagtgccagctgtcccagcccgaggtggccgcccacacctggctgctggacgacgaacccgtgcacacctcggagaacgccgaggtggtcttcttcgagaacggcctgcgccacctgctgctgctcaaaaacttgcggccacaagacagctgccgggtgaccttcctggctggggatatggtgacgtccgcattcctcacggtccgaggctggcgcctggagatcctggagcctctgaaaaacgcggcggtccgggccggcgcacaggcatgcttcacctgcacgctcagcgaggcggtgcccgtgggagaggcgtcctggtacatcaatggcgcggcagtgcagccggatgacagcgactggactgtcaccgccgacggcagtcaccacgccctactgctgcgcagcgcccagccccaccacgccggggaggtcaccttcgcttgccgcgacgccgtggcctctgcgcggctcaccgtgctgggcctccctgatcccccagaggatgctgaggtggtggctcgcagcagccacactgtgacactgtcttgggcagctcccatgagtgatggaggcggtggtctctgtggctaccgcgtggaggtgaaggagggggccacaggccagtggcggctgtgccacgagctggtgcctggacccgagtgtgtggtggatggcctggcccccggggagacctaccgcttccgtgtggcagctgtgggccctgtgggtgctggggaaccggttcacctgccccagacagtgcggcttgcagagccaccgaagcctgtgcctccccagccctcagcccctgagagccggcaggtggcagctggtgaagatgtctctctggagcttgaggtggtggctgaggctggtgaggtcatctggcacaagggaatggagcgcatccagcccggtgggcggttcgaggtggtctcccagggtcggcaacagatgctggtgatcaagggcttcacggcagaagaccagggcgagtaccactgtggcctggctcagggctccatctgccctgcggctgccaccttccaggtggcactgagcccagcctctgtggatgaggcccctcagcccagcttgccccccgaggcagcccaggagggtgacctgcacctactgtgggaggccctggctcggaaacgtcgcatgagccgtgagcccacgctggactccattagcgagctgccagaggaggacggccgctcgcagcgcctgccacaggaggcagaggaggtggcacctgatctctctgaaggctactccacggccgatgagctggcccgcactggagatgctgacctctcacacaccagctctgatgatgagtcccgggcaggcaccccttccctggtcacctacctcaagaaggctgggaggccaggcacctcaccactggccagcaaggttggggccccagcagccccctctgtgaagccacagcagcagcaggagccactggctgctgtgcgcccaccactgggagacctgagcaccaaagacctgggtgatccctcaatggacaaggcagctgtgaagatccaggctgcctttaagggctacaaggtccggaaggagatgaagcagcaggaagggcccatgttctcccacacatttggggacaccgaggcacaggtgggggatgccctgcggctggagtgtgtcgtggccagcaaggcagatgtgcgagcccgctggctgaaggatggtgtggagctgaccgatgggcggcaccatcacatcgaccagcttggggatggcacctgctctctgctgatcactggcctggaccgtgctgatgctggctgctacacctgtcaggtgagcaacaagtttggccaggtgacccacagtgcctgtgtggtggtcagtgggtcagagagtgaagccgagagctcctctgggggtgagctggacgatgccttccgccgggctgcccgtcggctgcaccggctcttccgcaccaaaagtccggctgaagtttcagatgaggagctcttcctgagtgcagacgagggccctgcagagccagaggagcccgcggactggcagacataccgcgaagatgagcatttcatctgcatccgttttgaggcgctcactgaggcccgccaggcggtaactcgcttccaggagatgtttgccacactgggcattggggtggagatcaagctggtggaacaggggcctcggagggtagagatgtgcatcagcaaagagactcctgcccctgtggtgcctccagagccattgcccagcctactgacttctgacgctgccccagtgttcctgactgagttgcagaaccaagaagtgcaggatgggtatcctgtgagctttgactgcgtggtgacaggtcagcccatgcccagtgtgcgctggttcaaggatgggaagttgttggaggaggatgatcactacatgattaatgaagaccaacagggtggccatcagctcatcatcacagccgtggtgccagcagacatgggcgtctaccgctgcctggccgagaacagcatgggtgtctcctccaccaaggctgagctccgtgtggacttgacaagcacagactatgacactgcagcagatgccacggagtcctcatcctacttcagtgcccaaggctacctgtccagccgggagcaggagggaacagagtccaccactgatgagggccagctgccccaggtggtggaggagctgagagacctccaggtggcccctggcacacgcctggccaagttccagctcaaggtgaaaggctaccctgctcccagattatactggttcaaagatggccagcccctgaccgcatctgcccacatccgcatgactgacaagaagatcctgcacaccctggagatcatctccgtcacccgggaggactctggccagtatgcagcctatatcagcaatgccatgggtgctgcctactcgtctgcccggctgctggttcgaggccctgatgagccagaagagaagcctgcatcagatgtgcatgagcagctggtgccgccccgaatgctggagaggttcacccccaagaaagtgaagaaaggctccagcatcaccttctctgtgaaggtagaaggacgcccggtgcccaccgtgcactggctcagggaggaggctgagagaggcgtgctgtggattggccctgacacaccgggctacaccgtggccagctctgcgcagcagcacagcctggtcctgctggacgtgggccggcagcaccagggcacctacacatgcattgccagcaacgctgccggccaggccctctgctccgccagcctgcacgtctcgggcctgcctaaggtggaggagcaggagaaagtgaaggaagcgctgatttccactttcctgcaggggaccacacaagccatctcagcacaggggttggaaactgcgagttttgctgaccttggtgggcagaggaaagaagagcctctggctgccaaggaggccctcggccacctgtccctcgctgaggtgggcacagaggagttcctgcagaaactgacctcccagatcactgagatggtatcggccaagatcacgcaggccaagctgcaggtgcccggaggtgacagtgatgaggactccaagacaccatctgcatccccccgccatggccgatcacggccatcctccagcatccaggagtcttcctcagagtcagaggacggcgatgcccgaggcgagatctttgacatctacgtggtcaccgctgactacctgcccctaggggctgagcaggatgccatcacgctgcgggaaggccagtatgtggaggtcctggatgcagcccacccactgcgctggcttgtccgcaccaagcccaccaagtccagcccctcacggcagggctgggtgtcaccagcctacctggacaggaggctcaagctgtcacctgagtggggggccgctgaggcccctgagttccctggggaggctgtgtctgaagacgaatacaaggcaaggctgagctctgtgatccaggagctgctgagttctgagcaggccttcgtggaggagctgcagttcctgcagagccaccacctgcagcacctggagcgctgcccccacgtgcccatagctgtggccggccagaaggcagtcatcttccgcaatgtgcgggacatcggccgcttccacagcagcttcctgcaggagttgcagcagtgcgacacggacgacgacgtggccatgtgcttcatcaagaaccaggcggcctttgagcagtacctggagttcctggtggggcgtgtgcaggctgagtcggtggtcgtcagcacggccatccaggagttctacaagaaatacgcggaggaggccctgttggcaggggacccctctcagcccccgccaccacctctgcagcactacctggagcagccagtggagcgggtgcagcgctaccaggccttgctgaaggagctgatccgcaacaaggcgcggaacagacagaactgcgcgctgctggagcaggcctatgccgtggtgtctgccctgccacagcgcgctgagaacaagctgcacgtgtccctcatggagaactacccaggcaccctgcaggccctgggcgagcccatccgccagggccacttcatcgtgtgggagggtgcaccgggggcccgcatgccctggaagggccacaaccgtcacgtgttcctcttccgcaaccacctggtaatctgcaagccccggcgagactcccgcaccgataccgtcagctacgtgttccggaacatgatgaagctgagcagcatcgacctgaacgaccaggtggagggggatgaccgcgccttcgaggtgtggcaggagcgggaggactcggtgcgcaagtacctgctgcaggcacggacagccattatcaagagctcgtgggtgaaggagatctgtggcatccagcagcgtctggccctgcctgtgtggcggcccccggactttgaagaggagctggccgactgcacagccgagctgggtgagacagtcaagctggcctgccgcgtgacgggcacacccaagcctgtcatcagctggtacaaagatgggaaagcagtgcaggtggacccccaccacatcctcattgaagaccctgatggctcgtgtgcactcatcctggacagcctgaccggtgtggactctggccagtacatgtgcttcgcggccagcgccgctggcaactgcagtaccctgggcaagatcctggtgcaagtcccaccacggttcgtgaacaaggtccgggcctcaccctttgtggagggagaggacgcccagttcacctgcaccatcgaaggcgccccgtacccgcagatcaggtggtacaaggacggggccctgctgaccactggcaacaagttccagacactgagtgagcctcgcagcggcctgctagtgctggtgatccgggcggccagcaaggaggacctggggctctacgagtgtgagctggtgaaccggctgggctccgcgcgggctagtgcggagctgcgcattcagagccccatgctgcaggcccaggagcagtgtcacagggagcagctcgtggctgcagtggaagtcactgagcaagagactaaagtccccaagaaaaccgtcatcatagaagagaccatcaccactgtggtgaagagcccacgtggccaacgacggtcccccagcaagtccccctcccgctcaccttcccgctgctctgccagcccgctgaggccaggcctactggcccccgacctgctgtacctgccaggtgctggccagccccgcaggccggaggcagaaccaggccagaagcccgtggtgcccacactgtatgtgacggaggccgaggcccactctccagctctgcccggactctcggggccccagcccaagtgggtggaggtggaggagaccattgaagtccgggtgaagaagatgggcccgcagggtgtgtctcccaccacagaggtgcccaggagctcatcggggcatctcttcacactgcccggtgcgacccccggaggggaccccaattccaacaactccaacaacaagctgctggcccaggaggcctgggcccagggcacagccatggtcggcgtcagagagccccttgtcttccgcgtggatgccagaggcagtgtggactgggctgcttctggcatgggcagcctggaggaggagggcaccatggaggaggcgggagaggaagagggggaagacggagacgcctttgtgacggaggagtcccaggacacacacagccttggggatcgtgaccccaagatcctcacgcacaacggccgcatgctgacactggctgacctggaagattacgtgcctggggaaggggagaccttccactgtggtggccctgggcctggcgcccctgatgaccctccctgcgaggtctcggtgatccagagagagatcggggagcccacggtggggcagcctgtgctgctcagcgtggggcatgcactgggtccccgaggccctctcggcctctttaggcctgagccccgtggggcgtcaccaccgggaccccaggtccgtagccttgagggcacctccttcctcttgcgggaggccccggctcggcctgtgggcagtgctccctggacgcagtctttctgcacccgcatccggcgttctgcggacagtggccagagcagcttcaccacagagctttccacccagaccgtcaacttcgggacagtgggggagacggtcacccttcacatctgcccagacagggatggggatgaggcggcacagccctgatgctgctgccatggtggcttggggcagcggggagaaaggagtgtccttgaggcctaggacgctgcccggcctcagcagcagccctgggagcctcctgagggccctccctgtccctggccacgggcccttcttacctcactcaacttcagccaggaggactgggtggtgcttgcaatgttggaatgaccggctcaaagacctcagctctgggctgtttcctgtcagcctggcaggagcctcaggactgtggacgaaggatgtggccttgggcatttgtcctgttcccacatgggcctggtccctccctcctggccccagccacagctgccaggcctgacatggccttgcctctcctgcagtcttggtgactgagacccttgggtggcgcttcccagctctgcaggccctcctggccttttctgcagggtggacacagggtctgtgtgtgggcagcagcccctgtctctcagcaagaataaagcagcttcctgtgcaaaaaaaaaaaaaaaaaaaaaaaaaaaaaa

SEQ ID NO: 1116 - DNA, 3759 bp, Homo sapiens
ccttttgtgggagtccggtctgtccacttgccggtccctcagaccgtcggcggtctctgtccgcttcgggacctgtccgctggtcgctccgcgtccgatggctcctggccgcggaaccttaggcctggccctggtctccgagcgcgggttcgccgggaggagcgtgtggcgggggtgtgccggggcgtgagtgcgccgagcatggggctgagcctggtgtggggagtgggtatctgcggagccggcctgaaccccacctcagccgggcgcggggagggggctccgtgcgtgtgatcgtgcagctgtgagcgcgtggccgccccgcggggctccgctgcaggcccctcagccccaggagcagtactcgctcttcagggcctgccctggatcctggaggctacacagctgcccactcctcctggggaggctgccgtggaggccatggagatccctgccccggagcccgagaagacaggtacagcttcactcttgtagtcagtatgtctgtggatttgcacttgaggatattgacactcagagagatcaggccagtttcccagaagcatccagcatcttttttttttttttttaaatggaatctcactctgtcacccaggcgggagtggtgcaatggcttgatcttccgctcactgcaacctctgcttcccgggttcaaactattctcccgcctcaacctcccaagtagttgggattgcaggcacgcgccaccacgcccggctaatgtttgtatttttagtagagacggggttttgccatgtttcccaggctggtcttaagctcaagcgatccgcccgcctcggcctcccaaagtgctgggattacaggcgtgagccgatcggctcctggcctcctgcttctttcttccccgcgcccaatcatttgttcccactcagacgtgcttgattggcggtagcagctcttttcgtcatgaattggagtgtctgagacacaggcagattattcctcgatgctgtttctgttggtgctagctactggggctcgttccccacctggccttgctggcaggttctgcctcctctctgattctcacttgtgccacgacaggtgggctttaagctcagccgtgagcctggtagccgtgaccttgactcatttctccttcgccagctctttcctctcaggatcctgctctttccctgaaagagaatctcgaggatatatcgggttggggtcttcccgaagccaggtccaaggaatcggtgagtttcaaggatgtggctgtggacttcacccaggaggagtggggtcaactagactcccctcagagggccttgtaccgggatgtgatgttggagaactaccagaaccttcttgccctaggacctccactgcacaagccagatgtgatctctcatctggaacgaggcgaggagccatggagcatgcagagggaagtccccagagggccctgtccagaatgggagctgaaggcggtgccctctcaacagcagggcatttgcaaagaagaaccggcccaggagcccatcatggagcggcccctcggcggggcgcaggcgtgggggcgccaggcaggtgctctgcagaggagtcaggctgcgcctgggcgccgcacctgccatggtctgggacgtcctgtagaggaattccccctcaggtgtcccctcttcgcccagcaacgcgttcccgaggggggacccttgctggacacacgcaagaacgtccaggccactgagggcagaaccaaggcccccgcgagactgtgtgcaggggaaaacgcctccacgccaagtgagccagaaaagttcccccaggtgcgccggcagcgcggggcgggcgccggggagggcgagttcgtgtgcggcgagtgcgggaaggcgttccgccagagctcctccctcacgctgcaccggcgctggcacagccgggagaaggcttacaagtgcgatgaatgcggcaaggccttcacctggagcaccaaccttctggagcaccggcgcatccacaccggcgagaagcccttcttctgcggcgagtgcgggaaggccttcagctgccactcgtccctcaacgtgcaccagcgcatccacacgggcgagcggccctacaagtgcagcgcctgcgagaaggccttcagctgcagctcgctgctcagcatgcacctgcgggtgcacaccggcgagaagccctaccggtgcggcgagtgcggcaaggccttcaaccagcgtacacacctcacacgccaccaccgcatccacacgggcgagaagccctaccagtgcggctcctgcggcaaggccttcacctgccactcatccctcaccgtgcatgagaagatccacagcggggacaagccgttcaagtgcagcgactgcgagaaggccttcaacagccgctcgcgcctcaccctccaccagaggacgcacacgggcgagaagcccttcaagtgcgccgactgcgggaagggcttcagctgccacgcgtacctgctcgtgcaccggcgcatccacagcggcgagaagcccttcaagtgcaacgagtgcggcaaagccttcagctcccacgcctacctcatcgtgcaccggcgcatccacacaggcgagaagcccttcgactgcagccagtgttggaaggccttcagctgccactcgtccctcatcatgcaccagcgcatccacaccggtgagaagccctacaagtgcagcgagtgcggcagagccttcagccagaaccactgtctcattaaacatcagaaaatccactccggggagaagtcgtttaagtgtgagaaatgtggggagatgttcaactggagctcgcacctcactgagcaccagaggctgcacagcgaggggaagcccttggccatccagttcaacaaacacctgctcagcacatactacgtgcctggcagcctgctgggtgcaggggatgctggactgagggacgtggatcccatcgacgcgctggatgtggcaaagctcttgtgcgtggttccccccagagctggcaggaatttctccctggggagcaaacctcgaaactaacatgatgtgctttggtgtcagtagctgctttctgagctactcaacaaggaaagcaccctggtcctccctggctcctagatccagaccaccttcctccaggtgtgggagccttgccttatcaccccaatcaggtctgcatgccagggtgcctcctctagttaaagtcagtcacctccccagaagggccacactccaggaggagtgttgagagtcatttgaggtagtcttgccacctgttttccttgatgggcctggaagttgttgacaaggggaaagatctttcttgccaataaaaagaagggatatcgttgggtgccatggctcacacctgtaatcttaacactgtgggaggccaaggcaaggggatcacttgagcccaggagtctaggaccagcctggacaacatggtgagacctcgtctctacaaaaaatgcaaaaattagccagatgtggcggcatgtccctgtggtcccagctactcaggaggctgaggtgggaggatcatttgagcctaggaggtcaaggctgcagtgagccatgattcacagcactgcactgcagcctgggtgacaaagcaagaccctgtgtgaaattaaaaggaggtatatcaactgttgtatcctcggacgggctcctgacatggctttaatcaggagtttcctccataaactattattttcagaataataataaaacaagaattatgactagc

SEQ ID NO: 1117 - DNA, 1965 bp, Homo sapiens
atgggctgctgcagctccgcttcctccgccgcgcagagctccaaacgagaatggaagccgctggaggaccgtagctgcacagacataccatggctgctgctcttcatcctcttctgcattgggatgggatttatttgtggcttttcaatagcaacaggtgcagcagcaagactagtgtcaggatacgacagctatggaaatatctgtgggcagaaaaatacaaagttggaagcaataccaaacagtggcatggaccacacccagcggaagtatgtattctttttggatccatgcaacctggacttgataaaccggaagattaagtctgtagcactgtgtgtagcagcgtgtccaaggcaagaactgaaaactctgagtgatgttcagaagtttgcagagataaatggttcagccctatgtagctacaacctaaagccttctgaatacactacatctccaaaatcttctgttctctgccccaaactaccagttccagcgagtgcacctattccattcttccatcgctgtgctcctgtgaacatttcctgctatgccaagtttgcagaggccctgatcacctttgtcagtgacaatagtgtcttacacaggctgattagtggagtaatgaccagcaaagaaattatattgggactttgcttgttatcactagttctatccatgattttgatggtgataatcaggtatatatcaagagtacttgtgtggatcttaacgattctggtcatactcggttcacttggaggcacaggtgtactatggtggctgtatgcaaagcaaagaaggtctcccaaagaaactgttactcctgagcagcttcagatagctgaagacaatcttcgggccctcctcatttatgccatttcagctacagtgttcacagtgatcttattcctgataatgttggttatgcgcaaacgtgttgctcttaccatcgccttgttccacgtagctggcaaggtcttcattcacttgccactgctagtcttccaacccttctggactttctttgctcttgtcttgttttgggtgtactggatcatgacacttctttttcttggcactaccggcagtcctgttcagaatgagcaaggctttgtggagttcaaaatttctgggcctctgcagtacatgtggtggtaccatgtggtgggcctgatttggatcagtgaatttattctagcatgtcagcagatgacagtggcaggagctgtggtaacatactattttactagggataaaaggaatttgccatttacacctattttggcatcagtaaatcgccttattcgttaccacctaggtacggtggcaaaaggatctttcattatcacattagtcaaaattccgcgaatgatccttatgtatattcacagtcagctcaaaggaaaggaaaatgcttgtgcacgatgtgtgctgaaatcttgcatttgttgcctttggtgtcttgaaaagtgcctaaattatttaaatcagaatgcatacacagccacagctatcaacagcaccaacttctgcacctcagcaaaggatgcctttgtcattctggtggagaatgctttgcgagtggctaccatcaacacagtaggagattttatgttattccttggcaaggtgctgatagtctgcagcacaggtttagctgggattatgctgctcaactaccagcaggactacacagtatgggtgctgcctctgatcatcgtctgcctctttgctttcctagtcgctcattgcttcctgtctatttatgaaatggtagtggatgtattattcttgtgttttgccattgatacaaaatacaatgatgggagccctggcagagaattctatatggataaagtgctgatggagtttgtggaaaacagtaggaaagcaatgaaagaagctggtaagggaggcgtcgctgattccagagagctaaagccgatgctgaagaaaaggtga

SEQ ID NO: 1118 - DNA, 4301 bp, Homo sapiens
gctgcgcgcacgcgaccgcatccgggctccttcggccccgccatgggctgctgcagctccgcttcctccgccgcgcagagctccaaacgagaatggaagccgctggaggaccgtagctgcacagacataccatggctgctgctcttcatcctcttctgcattgggatgggatttatttgtggcttttcaatagcaacaggtgcagcagcaagactagtgtcaggatacgacagctatggaaatatctgtgggcagaaaaatacaaagttggaagcaataccaaacagtggcatggaccacacccagcggaagtatgtattctttttggatccatgcaacctggacttgataaaccggaagattaagtctgtagcactgtgtgtagcagcgtgtccaaggcaagaactgaaaactctgagtgatgttcagaagtttgcagagataaatggttcagccctatgtagctacaacctaaagccttctgaatacactacatctccaaaatcttctgttctctgccccaaactaccagttccagcgagtgcacctattccattcttccatcgctgtgctcctgtgaacatttcctgctatgccaagtttgcagaggccctgatcacctttgtcagtgacaatagtgtcttacacaggctgattagtggagtaatgaccagcaaagaaattatattgggactttgcttgttatcactagttctatccatgattttgatggtgataatcaggtatatatcaagagtacttgtgtggatcttaacgattctggtcatactcggttcacttggaggcacaggtgtactatggtggctgtatgcaaagcaaagaaggtctcccaaagaaactgttactcctgagcagcttcagatagctgaagacaatcttcgggccctcctcatttatgccatttcagctacagtgttcacagtgatcttattcctgataatgttggttatgcgcaaacgtgttgctcttaccatcgccttgttccacgtagctggcaaggtcttcattcacttgccactgctagtcttccaacccttctggactttctttgctcttgtcttgttttgggtgtactggatcatgacacttctttttcttggcactaccggcagtcctgttcagaatgagcaaggctttgtggagttcaaaatttctgggcctctgcagtacatgtggtggtaccatgtggtgggcctgatttggatcagtgaatttattctagcatgtcagcagatgacagtggcaggagctgtggtaacatactattttactagggataaaaggaatttgccatttacacctattttggcatcagtaaatcgccttattcgttaccacctaggtacggtggcaaaaggatctttcattatcacattagtcaaaattccgcgaatgatccttatgtatattcacagtcagctcaaaggaaaggaaaatgcttgtgcacgatgtgtgctgaaatcttgcatttgttgcctttggtgtcttgaaaagtgcctaaattatttaaatcagaatgcatacacagccacagctatcaacagcaccaacttctgcacctcagcaaaggatgcctttgtcattctggtggagaatgctttgcgagtggctaccatcaacacagtaggagattttatgttattccttggcaaggtgctgatagtctgcagcacaggtttagctgggattatgctgctcaactaccagcaggactacacagtatgggtgctgcctctgatcatcgtctgcctctttgctttcctagtcgctcattgcttcctgtctatttatgaaatggtagtggatgtattattcttgtgttttgccattgatacaaaatacaatgatgggagccctggcagagaattctatatggataaagtgctgatggagtttgtggaaaacagtaggaaagcaatgaaagaagctggtaagggaggcgtcgctgattccagagagctaaagccgatggcttcgggagcaagttctgcttgaacctagccgacggttatggaaacccattgacattccaaaacaatatatacacacacacataaatcagccaaaatcagagaaaaggaacagggatttaataccttttttatgcttatttttgtcaaacatgtactcctttcatacgggtggcttttacaaggcaacttccgtcatttaatgttttcaactgtaattgtcttaatggaaatgttaaaattcatatctgattaacatttttaataacttagaggagattttaactttatttaaaaataggtaaaattattgtacctaattatgtctaaagtttattcaggggtaatttccctgatgtctgtataaaatcaagatcttattttactgatgcataagtcctagtgggtcaagactaggcatatgctttcagataaataaggaattactccaatcagttttccccaatcaaagaagccatgtcattttacttttagaaacatacaattgggcccaatatgggaattttcataatagttcatacatttgtcagccaacattaaaaggtaaccaactcctcaggtatttgtagtttaccctaacgcttctttaaaagaaagtaggtaaaaaaagaaaagggtagataatctttcgtatgcaaacttttcccttatattttgtctttctttcctttttgactttagtagcatcctccacacatttgtgtgcctgatttgaaaggaagctggggcacccagcgagtttagcctttaagtttctgtgtattgatttgcagattaagtaatgctgagaggaataaagaagggacagaaacatggaacataaagcattgaaaattccggtgcttgggcttcggcttcagagtaacgtcagtggcttagggttaaacggccattttattcaaatgcttgctatacaatctgaaaacacactggcaggtgctcctctccttggcaattcattgagtatccagagttctacgatgtttaactgaagaattggctaatgttttgatcctccagtgtgactgttgtttttgtttgggggtgggtttggggttttttgcttttttattcctgaagcttaccagatatgaatggctaatactccattgttctgcttgttgtaatggtgaatgctttaagaaaaaaaagtgtaatttgctaagaataattcatgatctgtttatgcgataactcctttttgttacaatttttttaaaaaaagctatttttgttaatgtaaagtaaatatttcagagcaaattttttaaacttattgcactaaatacaggctctgtacaaaaaaaaaaaaaaaaaagcctcagcattttatcattccatggaaggagaatcttttgaaagaaagcattgcctcctaccagaactagacagtgaattagatcggtattatggaaatgcatacaagtaatgtcactagggcttaataagcagccgtttgctaatgtgcttcctttcaaagggttggacctttaaattgctgcaaaaggtaaattgtatttttttttaagtattggtgttctttactctagctaggctaaaatttgctaaatgccttggtttcttttaaaagttcatgtaatatttctgatttttcagaatatttgcaataagagtctggattttaaaaaacacatgcatacacacaattaagagctcatgtcttagcaagatctgggaaaccaacattgcgagagtagctattttgaaagaataattctccagaagttaacatctaatatctagtatcaccaaacagtatcgctgttctcttttattcatttgaaatgaatataattatataactaacaattgtccaaatagatgagagagcaaatcatgtgagaaaattcagaataccatctgtttcatagccgcacagattttggactttcacaaacattgggaactaaatttagaattggcaaaagtctagaagatgggtatcaaaacagaagacattccaggagctagcaattttaagaggtgtccctccaaagtgacctgatggaagtcctgaacttggaaattaggttctactcacttggacatccctgcatcatggactgttgctgctccctgttccatatgctcgcaatctcagctatttggaagctaccaggaatgctttctaattatcatttgcaactagaactgtaatcagaaagaaattttgtatttttgtataacttgattgtgtgccattttatataacaggtcctgttttacaaataaattttgttttactaaaaaaaaaaaaaaaaaaaaaaa

SEQ ID NO: 1119 - DNA, 604 bp, Homo sapiens
gcagacgcaggggtcggcgccgggtgagagcgtgcggccggattcaccacaacatggcaaatctttttataaggaaaatggtgaaccctctgctctatctcagtcgtcacacggtgaagcctcgagccctctccacatttctatttggatccattcgaggtgcagcccccgtggctgtggaacccggggcagcagtgcgctcacttctctcacccggcctcctgccccatctgctgcctgcgctggggttcaaaaacaagactgtccttaagaagcgctgcaaggactgttacctggtgaagaggcggggtcggtggtacgtctactgtaaaacccatccgaggcacaagcagagacagatgtagaccctttccctccagagtcacgcacatactcgtcatcgcatcacttgggagaatggttgtatcttatggaaggaattatcacatcaaggagtcaggggaaagtgactggaagcaaacgccctaaaagttacccatcacgtttcagtgtaaatgagtaactatagaagacattgcgttatcttatttccaaaacgttccaactaaaaaacattttcctattaaaatagaccttccgaata

SEQ ID NO: 1120 - DNA, 2989 bp, Homo sapiens
ggcgcgcgggcgagcggttgtgcttgtgcttgtggcgcgtggtgcgggtttcggcggcggctgaggaagaagcgcgggcggcgccttcgggaggcgagcaggcagcagttggccgtgccgtagcagcgtcccgcgcgcggcgggcagcggcccaggaggcgcgtggcggcgctcggcctcgcggcggcggcggcggcagcggcccagcagttggcggcgagcgcgtctgcgcctgcgcggcgggccccgcgcccctcctccccccctgggcgcccccggcggcgtgtgaatggcggcctccgcggcggcagcctcggcagcagcggcctcggccgcctctggcagcccgggcccgggcgagggctccgctggcggcgaaaagcgctccaccgccccttcggccgcagcctcggcctctgcctcagccgcggcgtcgtcgcccgcggggggcggcgccgaggcgctggagctgctggagcactgcggcgtgtgcagagagcgcctgcgacccgagagggagccccgcctgctgccctgtttgcactcggcctgtagtgcctgcttagggcccgcggcccccgccgccgccaacagctcgggggacggcggggcggcgggcgacggcaccgtggtggactgtcccgtgtgcaagcaacagtgcttctccaaagacatcgtggagaattatttcatgcgtgatagtggcagcaaggctgccaccgacgcccaggatgcgaaccagtgctgcactagctgtgaggataatgccccagccaccagctactgtgtggagtgctcggagcctctgtgtgagacctgtgtagaggcgcaccagcgggtgaagtacaccaaggaccatactgtgcgctctactgggccagccaagtctcgggatggtgaacgtactgtctattgcaacgtacacaagcatgaaccccttgtgctgttttgtgagagctgtgatactctcacctgccgagactgccagctcaatgcccacaaggaccaccagtaccagttcttagaggatgcagtgaggaaccagcgcaagctcctggcctcactggtgaagcgccttggggacaaacatgcaacattgcagaagagcaccaaggaggttcgcagctcaatccgccaggtgtctgacgtacagaagcgtgtgcaagtggatgtcaagatggccatcctgcagatcatgaaggagctgaataagcggggccgtgtgctggtcaatgatgcccagaaggtgactgaggggcagcaggagcgcctggagcggcagcactggaccatgaccaagatccagaagcaccaggagcacattctgcgctttgcctcttgggctctggagagtgacaacaacacagcccttttgctttctaagaagttgatctacttccagctgcaccgggccctcaagatgattgtggatcccgtggagccacatggcgagatgaagtttcagtgggacctcaatgcctggaccaagagtgccgaggcctttggcaagattgtggcagagcgtcctggcactaactcaacaggccctgcacccatggcccctccaagagccccagggcccctgagcaagcagggctctggcagcagccagcccatggaggtgcaggaaggctatggctttgggtcaggagatgatccctactcaagtgcagagccccatgtgtcaggtgtgaaacggtcccgctcaggtgagggcgaggtgagcggccttatgcgcaaggtgccacgagtgagccttgaacgcctggacctggacctcacagctgacagccagccacccgtcttcaaggtcttcccaggcagtaccactgaggactacaaccttattgttattgaacgtggcgctgccgctgcagctaccggccagccagggactgcgcctgcaggaacccctggtgccccacccctggctggcatggccattgtcaaggaggaggagacggaggctgccattggagcccctcctactgccactgagggccctgagaccaaacctgtgcttatggctcttgcggagggtcctggtgctgagggtccccgcctggcctcacctagtggcagcaccagctcagggctggaggtggtggctcctgagggtacctcagccccaggtggtggcccgggaaccctggatgacagtgccaccatttgccgtgtctgccagaagccaggcgatctggttatgtgcaaccagtgtgagttttgtttccacctggactgtcacctgccggccctgcaggatgtaccaggggaggagtggagctgctcactctgccatgtgctccctgacctgaaggaggaggatggcagcctcagcctggatggtgcagacagcactggcgtggtggccaagctctcaccagccaaccagcggaaatgtgagcgtgtactgctggccctattctgtcacgaaccctgccgccccctgcatcagctggctaccgactccaccttctccctggaccagcccggtggcaccctggatctgaccctgatccgtgcccgcctccaggagaagttgtcacctccctacagctccccacaggagtttgcccaggatgtgggccgcatgttcaagcaattcaacaagttaactgaggacaaggcagacgtgcagtccatcatcggcctgcagcgcttcttcgagacgcgcatgaacgaggccttcggtgacaccaagttctctgctgtgctggtggagcccccgccgatgagcctgcctggtgctggcctgagttcccaggagctgtctggtggccctggtgatggcccctgaggctggagcccccatggccagcccagcctggctctgttctctgtcctgtcaccccatccccactcccctggtggcctgactcccactccctggtggccccatcccccagttcctcacgatatggtttttacttctgtggatttaataaaaacttcaccagttaaaaaaaaaaaaaaaaaaaaaaaaaaaaaa

SEQ ID NO: 1121 - DNA, 1164 bp, Homo sapiens
gggtaagctgtggcggcgtgggagcacctctggggctatggaggcccctgagccgggagaagccctggagttgagcctggcgggtgcccatggccatggagtgcacaagaaaaaacacaagaagcacaagaagaaacacaagaagaaacaccatcaggaagaagacgccgggcccacgcagccgtcccctgccaagcctcagctcaaactcaaaatcaagcttgggggacaagtcctggggaccaagagtgttcctaccttcactgtgatcccagaggggcctcgctcaccctctccccttatggttgtggataatgaagaggaacctatggaaggagtcccccttgagcagtaccgtgcctggctggatgaagacagtaatctctctccctctccacttcgggacctatcaggagggttagggggtcaggaggaagaggaggaacagaggtggctggatgccctggagaagggggagctggatgacaatggagacctcaagaaggagatcaatgagcggctgcttactgctcgacagcgagctctgctccagaaggcgcggagtcaaccttcccctatgctgccgctgcctgtagctgagggctgcccacctcccgccctcacagaggagatgctgctgaagcgcgaggagcgggcgcggaagcggcggctccaggcggcgcggcgggcagaagagcacaagaaccagactatcgagcgcctcaccaagactgcggcgaccagtgggcggggaggccgggggggcgcacggggcgagcggcggggagggcgggctgcggctccggcccccatggtgcgctactgcagcggagcacagggttccaccctttccttcccacctggcgtccccgcccccacggcagtgtctcagcggccatccccctcaggcccgccgccgcgctgctctgtccccggctgtccccatccgcgccgctacgcttgctcccgcacaggccaggcactctgtagtcttcagtgctaccgcatcaacctgcagatgcggctgggggggcccgagggtcctggatccccccttttggctacgtaaggcccttaacccggactctgcgccccgtcccatgcccgctcttgagtatcttccccaccctattaaattacatccggtgcaaaaaaaaaaaaaaa

SEQ ID NO: 1122 - DNA, 3599 bp, Homo sapiens
gcccgttgtctgtgtgtgggactgaggggccccgggggcggtgggggctcccggtgggggcagcggtggggagggagggcctggacatggcgctgaggggccgccccgcgggaagatgaataagggctggctggagctggagagcgacccaggcctcttcaccctgctcgtggaagatttcggtgtcaagggggtgcaagtggaggagatctacgaccttcagagcaaatgtcagggccctgtatatggatttatcttcctgttcaaatggatcgaagagcgccggtcccggcgaaaggtctctaccttggtggatgatacgtccgtgattgatgatgatattgtgaataacatgttctttgcccaccagctgatacccaactcttgtgcaactcatgccttgctgagcgtgctcctgaactgcagcagcgtggacctgggacccaccctgagtcgcatgaaggacttcaccaagggtttcagccctgagagcaaaggatatgcgattggcaatgccccggagttggccaaggcccataatagccatgccaggcccgagccacgccacctccctgagaagcagaatggccttagtgcagtgcggaccatggaggcgttccactttgtcagctatgtgcctatcacaggccggctctttgagctggatgggctgaaggtctaccccattgaccatgggccctggggggaggacgaggagtggacagacaaggcccggcgggtcatcatggagcgtatcggcctcgccactgcaggggagccctaccacgacatccgcttcaacctgatggcagtggtgcccgaccgcaggatcaagtatgaggccaggctgcatgtgctgaaggtgaaccgtcagacagtactagaggctctgcagcagctgataagagtaacacagccagagctgattcagacccacaagtctcaagagtcacagctgcctgaggagtccaagtcagccagcaacaagtccccgctggtgctggaagcaaacagggcccctgcagcctctgagggcaaccacacagatggtgcagaggaggcggctggttcatgcgcacaagccccatcccacagccctcccaacaaacccaagctagtggtgaagcctccaggcagcagcctcaatggggttcaccccaaccccactcccattgtccagcggctgccggcctttctagacaatcacaattatgccaagtcccccatgcaggaggaagaagacctggcggcaggtgtgggccgcagccgagttccagtccgcccaccccagcagtactcagatgatgaggatgactatgaggatgacgaggaggatgacgtgcagaacaccaactctgcccttaggtataaggggaagggaacagggaagccaggggcattgagcggttctgctgatgggcaactgtcagtgctgcagcccaacaccatcaacgtcttggctgagaagctcaaagagtcccagaaggacctctcaattcctctgtccatcaagactagcagcggggctgggagtccggctgtggcagtgcccacacactcgcagccctcacccacccccagcaatgagagtacagacacggcctctgagatcggcagtgctttcaactcgccactgcgctcgcctatccgctcagccaacccgacgcggccctccagccctgtcacctcccacatctccaaggtgctttttggagaggatgacagcctgctgcgtgttgactgcatacgctacaaccgtgctgtccgtgatctgggtcctgtcatcagcacaggcctgctgcacctggctgaggatggggtgctgagtcccctggcgctgacagagggtgggaagggttcctcgccctccatcagaccaatccaaggcagccaggggtccagcagcccagtggagaaggaggtcgtggaagccacggacagcagagagaagacggggatggtgaggcctggcgagcccttgagtggggagaaatactcacccaaggagctgctggcactgctgaagtgtgtggaggctgagattgcaaactatgaggcgtgcctcaaggaggaggtagagaagaggaagaagttcaagattgatgaccagagaaggacccacaactacgatgagttcatctgcacctttatctccatgctggctcaggaaggcatgctggccaacctagtggagcagaacatctccgtgcggcggcgccaaggggtcagcatcggccggctccacaagcagcggaagcctgaccggcggaaacgctctcgcccctacaaggccaagcgccagtgaggactgctggccctgactctgcagcccactcttgccgtgtggccctcaccagggtccttccctgccccacttccccttttcccagtattactgaatagtcccagctggagagtccaggccctgggaatgggaggaaccaggccacattccttccatcgtgccctgaggcctgacacggcagatcagccccatagtgctcaggaggcagcatctggagttggggcacagcgaggtactgcagcttcctccacagccggctgtggagcagcaggacctggcccttctgcctgggcagcagaatatatattttacctatcagagacatctatttttctgggctccaacccaacatgccaccatgttgacataagttcctacctgactatgctttctctcctaggagctgtcctggtgggcccaggtccttgtatcatgccacggtcccaactacagggtcctagctgggggcctgggtgggccctgggctctgggccctgctgctctagccccagccaccagcctgtccctgttgtaaggaagccaggtcttctctcttcattcctcttaggagagtgccaaactcagggacccagcactgggctgggttgggagtagggtgtcccagtggggttggggtgagcaggctgctgggatcccatggcctgagcagagcatgtgggaactgttcagtggcctgtgaactgtcttccttgttctagccaggctgttcaagactgctctccatagcaaggttctagggctcttcgccttcagtgttgtggccctagctatgggcctaaattgggctctaggtctctgtccctggcgcttgaggctcagaagagcctctgtccagcccctcagtattaccatgtctccctctcaggggtagcagagacagggttgcttataggaagctggcaccactcagctcttcctgctactccagtttcctcagcctctgcaaggcactcagggtgggggacagcaggatcaagacaacccgttggagcccctgtgttccagaggacctgatgccaaggggtaatgggcccagcagtgcctctggagcccaggccccaacacagccccatggcctctgccagatggctttgaaaaaggtgatccaagcaggcccctttatctgtacatagtgactgagtggggggtgctggcaagtgtggcagctgcctctgggctgagcacagcttgacccctctagcccctgtaaatactggatcaatgaatgaataaaactctcctaagaatctcctgagaaaaaaaaaaaaaaaaa

SEQ ID NO: 1123 - DNA, 4234 bp, Homo sapiens
ccgggatggctggaccgggcagcacgggggggcagatcggggctgcggccctggcaggcggcgcgcggtccaaggtagccccgagcgtggacttcgaccatagctgctcggacagtgtcgagtacctgacgctcaacttcgggcccttcgaaacagtgcatcgctggcggcgcctcccgccctgcgacgagttcgtgggtgcccggcgcagcaagcacacagtggtggcctataaagatgccatttatgtatttggtggagacaatgggaagaccatgctcaatgacctcctgcggttcgatgtgaaagactgctcctggtgcagggcctttaccactgggaccccaccggccccccgttaccaccactcggccgtcgtctatgggagcagcatgtttgtctttgggggttacactggggacatttattccaattctaacttgaagaataaaaacgacctctttgaatacaagtttgcaactggccagtggacggagtggaaaattgaaggacggttgccagtcgctaggtcagcccatggggccacggtgtacagtgacaagctgtggatctttgctggctatgacggcaacgccaggttgaatgacatgtggacaattggcctccaggaccgagagctcacctgctgggaggaggtggcccagagtggcgagatccccccatcttgctgcaacttccccgtggctgtgtgccgggacaagatgtttgtattctctgggcaaagcggagccaaaataaccaacaacctcttccagtttgaattcaaggacaagacgtggacacgcatcccaactgaacacctgctccggggctccccaccacccccgcagcggcgctacgggcataccatggtggcctttgaccgccacctctatgtgtttgggggtgcggccgacaacacgctgcccaacgagctgcactgctatgacgtggacttccagacctgggaggtcgtccagcccagctccgacagcgaggttggtggggctgaagtgcccgagcgagcctgtgcttccgaggaggtgcccaccctgacctatgaggagcgggttggcttcaagaagtcccgagatgtgtttggcctggactttggcaccacctcagccaagcagcccacccagcctgcctcggagctgcccagtgggaggctcttccacgcggctgctgtcatctcggacgccatgtacatcttcgggggcacggtggacaacaacatccgcagcggggagatgtacaggttccagttctcctgttaccctaaatgcacgctgcacgaggactacgggcggctgtgggagagccgccagttctgcgacgtggagttcgtgctgggtgagaaggaggagtgcgtgcagggccacgtagccattgtcacagcgcggagccgctggcttcgcaggaagatcacgcaggcgcgggagaggctggcccagaagctggagcaggaggccgccccagttcccagggaggcccccggcgtggctgctggtggggcccggccgcccctgctgcacgtggccatccgggaggccgaggcccggcccttcgaggtgctcatgcagttcctctacaccgacaagatcaaatacccacggaaaggccatgtggaggatgtgctgctcatcatggatgtgtacaaactggcactgagcttccagttgtgccgcctggagcagctgtgccgccagtacatcgaggcctccgtggacctgcagaacgtgctggttgtgtgcgagagtgccgcccggctgcagctgagccaactcaaggagcactgcctgaacttcgtggtaaaggagtcccacttcaaccaggtgatcatgatgaaggagttcgagcgcctctcctctccactgatagtggagattgtgcggcggaagcagcagccgccccctcgcactcccttggaccagccagtggacattggcacatctctgatccaggacatgaaggcatacctggagggagcgggcgcggaattctgtgacatcactctgttgcttgacgggcacccacggccagcccacaaggctatcctggccgcccgctccagctactttgaagccatgttccggtccttcatgcccgaagatgggcaggtgaacatctccatcggggagatggtgcccagcaggcaggccttcgagtccatgctgcgctacatctactacggcgaggtcaacatgccgcccgaggactcgctctacttgtttgcggccccctactactacggcttctacaacaaccggctgcaggcgtactgcaagcagaacctggagatgaacgtgacggtgcagaacgtgctgcagatcctggaggcagctgacaaaacgcaggcactggacatgaagcggcactgcctgcacatcattgtgcaccagttcaccaaggtctccaagttgcccaccctgcggtcgctgagccagcagctgctgctggacatcatagactccctggcctcccacatctcagacaagcagtgcgcagagctgggcgccgacatctgaggccctgtggcgcctgcccattgtgaagaatcgccgtgcctgcctgccctgcctactgagaagactaccggctatgcgcatgcctatggcagtgggtgcacctgccaggccaagggtcagggtgcccagagcctccaaagagagctgaggggatgtggggccccaaactcattaattcactgaagacacaggtcccacagggagcggatgatgaagcagaccccctcctgtcatcaccctctcctggtgtagtgtggatgcgaggccacggctcagtgatgggctcaccacccagaagtggggagagactttgggcctcccacccagtggggcttggcctggcttctgtggcctgggcgtgttgtggactcaggcactggggcctgtcaccaaggctcctccaacatgcgggaggaggcttagcagacttgcgctgcaccagcgaatctgcctgggctgctcctgtcccacccaccctcactgagatccatgtaaggggctcctcttcccacctggaacttgtgagtggggacccatgatgtatgggtctcacctgacttgaggtgaattttggagtgaagggccctgaggtcagctcccaggtcggtcgtgctgggccaggcctggttttcacaggggctgaaggatcccagtccacctgtgtgcatgtcagggctcggccgggaagaagccagcaaagtcccccgtgtcccttgctgagtattctgtcacagacaagcctccattaaagccacagcagtgctacccaccacacacaccttgctggcccggccaccactgctggcttcagccccttgagcagcccatggcttagcagacccccagatgtaggtcagtggccttacctgtctctatccatgctgtcaactcctgcctccacctggggtcacccagtcacattgggaagggctgtgaaggcctccaggctggccccttccaggggaatcctggaggcctggggtgggctcctgccccttctgccctgccttgcccctgcactatgctcttggctcctgtggaaggagggctgccctcttgccctagtgagggccccatgtggatccactctagtgctgggagccagcgctcccttactgggaacaggattccaggacccctttcttgttgtggctgccatgaagccacagctccttggggaagtgacctgctctcctttgggtgtatgcaggtgtgtggggggccctgagtggcaagttgcttagctaacaggagatccataggcagcctgcaggctaggaagtggcctagtgcaagatgagctgggaacaagggaggagagagcaggagctggggcagaggctgagccgggaggcccttgaggtgaggacacagcaggcccaggaccatggctggggaggatatgtcagcacctggaagtggagtgcaggctgcagcgcccagccatgtgggccaggtgcattcactcagagtggggccacacacccatctacccagtttccacaagatgtggctcctgccacacccacagggcagcctcctccaaatccctcctggaggggcctacccagaagcctccttgaaccagtctgcaaccctgctctatgctgacccttgtcactgaaccctgatctagacttatatgaataaatgaaattacatgccaagggccctaaaaagcaaattttaaaaaaaaaaaaaaaaaa

SEQ ID NO: 1124 - DNA, 2359 bp, Homo sapiens
ctccctaagcaggctgaggaagaagagatagcaagccctcacctaacttgacccctttcttgtctctccccgctgctagcttctcccttctcgctgccttgcggggtgggaaaacgtggaaggaattctgggaaaaccagatgtctgggttctctattcccgtctggcttgattctggacaaggggcttcctctccagggcctcggtttccccatctttaaaatggactgatagcatagacctgcccacctttcagaggtgcccgaagccttgacgagataacagatgagaagtggttttcgttgtgatgagccagctgaagcggttgcaccggagcgccagaccgtcagcggtgcagtggctctcgcgtccttcacatccccccacacccatcccgtggatgatgggggaaggcactactcctggggttccccgaagcggatcctgggactgggacctggggacgcggtgagaggcagccctgaagctgagtccagaggtctggggcgtcattgtcccagggcggacccagccccagaccctacaactaaacccaaggccagccgagaagcactaccactggcgggctgagctgagctctcattcttcttaggactctggacctttggaggaaatgaaagggacccagttggaaatatagtctttcttcgcgccccctacatctctctcccccggcggaaacgcggcccaaactgttacgaagtggaagaggctggatagctcttcataattaatcaggaatgggaggtttgagcaggtttacttgatgagggaaacattatagcctcgccaattcattcattatttcaacaattacttattgaacacctgctacgtggcagacagtaagagcctggatagtttctccccgtttttcaaagtcgctaaacgcgaccagagggcagaggagaggccggtaacctaagagtcctggctccgccccctccgcgtttggccttgcctgctcctcccaccaccacttcgctcagaggcggctactggctcaagaggacgacagaagccagtctctgatgcccaccgcattctccagcttcaggcctcaagccctgtagccgagaaggcgaggcctaatgttacaccaccggtctgttccgcctccgtttcggggtccacccgaaaagctttcagatcggatcctcggtgagacggcactcgattaaataggtctgtctctacaggccaaggaggcgggtttggtgcggccactccaaggccaaagcgagaaaatcttactgcgcacgcgcaatagacagccgatggagccaccgatggagccgtccggaggggagcaagagcccggagccgtcaggttcctggacctgccctgggaagacgtgctgctcccacacgtcctgaaccgggtcccgctgcgccagctgctacggctgcagcgcgttagccgggccttccggtcgctggtgcagcttcacctggccgggctgcgtcgcttcgatgccgcgcaggtgggtccgcagatcccgcgggccgcattggcccggctgctgcgggatgccgaggggctgcaggagctggcactggcgccgtgtcacgaatggctgtcagacgaggacctggtgccggtgctggcgcggaatccgcagctgcggagtgtggcgttgggcggctgcgggcaactgagtcgccgggcgcttggggctttggccgagggctgcccacgcctgcagcgcctgtcgctcgcgcactgtgactgggtggacgggctggcgctgcgcggcctcgctgatcactgcccggccctggaggagctggatctcaccgcctgccgccagctcaaggacgaggccatcgtgtacctggcgcagaggcgcggcgctggtctccgcagcctctctctggccgtcaacgccaacgtgggggacgccgcggttcaagagttggctcggaactgcccagaactccaccaccttgacctcaccggctgcctccgcgtcggaagcgacggtgtcaggacattggccgagtactgccccgtgctgcgttcgctgcgggtgcggcactgccaccatgtggcggagtccagcctgagccgcttgcggaagcgcggcgtggacatcgacgtggagccgccgctgcaccaggccctggtgctgctgcaggatatggcgggcttcgcaccttttgtcaacctgcaggtctgaccgcctgccaatcggagcacagctggactgtgtggctggggcctgacactgagctgtagggaaactgaactgtgaggacctctggtgagaggccagtgccctgccccaccctggagcttcaaataaagagctttttacccccaaaaaaaaaaaaaaaa

SEQ ID NO: 1125 - DNA, 5039 bp, Homo sapiens
caagccgactgtgagccaggaagtgctcttggggagcccaggccaagccatccattcttgggtcctttggagggtagatatggattcccagtttctccagcggccagtgctccccctagtccacacagtgagaccgtgaaagcagatgctccggggcactcctgggcagcttttgctcagtggatgatgggtgactacagactccctgaccacccccagcccatggaaattctcaacctgtacttgggagacagcctggagccccacccaggagagtgcccaagggaaacgtgcagccatgaggatccaccggagcctttcgaggagcaaacctgggccactgaccctcctgaacctaccagacaaaatgttcctccctggggctccggtgtggagctcacacacctggggagctgggtccatcaggacgggctggagccttgccaggagcaaacccgggccactgaccctcctgaatctaccagacaagatgctcctccctggggctccggtgtggagctcacacacctggggagcccctctgcccagagggagcacaggcagaacacagcatcaccagggtcaccagtgaacagccatctaccggggagcccaaagcagaaccggagcacgtccacacaggtagtgttctgggcaggcatcctgcaggcccagatgtgtgtcctagacctggaggaggagctggagaagacggaagggctcaaggctgggctgaaatgctgtctccccacgccccctgtggacctccccggggacacgggcctgcactccagcccacctgagaatgaagactcaggggaagacagcagtgagcctgagggagagggccaggcatggctgagagagggaaccccagactcttccccacagtggggagctgaggaggagagcatgttcttcagcaaccccctcttcctggcgagtccttgctcagagaacagtgcttctggagagtgcttttcctggggggcttcagactcccatgcaggtgtgaggactggacctgagagcccagcgactctggagcctcccctcccagaagacacagtgctgtgggagctggaaagtgagccagatttgggggacggcgctgctatcagtgggcattgtacccctccattccctgtgcccatctataaaccacactccatctgctgggcctcagtggctgccgctgagggggctcctgcagcacctcctggtcacggggagagtgagggagataggcttggtcctgctccatctgcagcaccgtgtgtggacgaagcattgacctgggaatcaggatgtgtcggatctgatcttggccctgctgcacatcctgtgcaaccttgggcctctctcagccctgagggctggcagagaggaggtcctttttggccccaggtgactcttaactcccaggacagagatgagagggagggtggacacccccaggaatctcttccctgcaccttggccccctgcccctggaggagcccagcttcttctccagagcctagcagcccagaatctgagagcagaggccctggtcccaggcccagccctgcatcgtcccaggagggcagcccgcagcttcaacaccacagctcaggcattttgcccaagtggacactagatgcttcacagtcttcactcttggagacggatggggaacagccaagttccttgaagaaaaaggaggcaggggaggccccaaaaccaggcgaggaagtaaagagtgaaggaacagccaggcctgcagagactggagacgtccagcctgacattcacctgacttctgcagaacatgagaatctgaggacaccgatgaactcttcttggcttcctgggagccctatgccccaagcacagtccccagaggaaggccagagaccaccagctggagacaagctagctaatggcgtcaggaacaacaaggtagcctggaacttggcctcacgcctctatcgcctggagggcttccggaagtctgaagtggctgcctacctgcagaagaacaatgactttagcagggctgtggctgaggagtacctgtccttcttccagtttggaggccagagtctggaccgagccctccggagcttcctccaggccttggtgctcagtggggagactcaggaacgggagcgaatcctctaccagttctccagacgcttccaccattgcaatccggggatcttcccctcagtagattctgtacacaccttgacatgtgcaatcatgctgcttaacacggacctgcatggacagaacattgggaagagcatgagctgccaggaattcataaccaacctgaatgggctgagggatggcgggaacttccccaaggagctgctgaaggccctctactggtctatccgcagcgagaagctcgagtgggccgtggatgaagaagacacagccagacctgagaaggcccagccgtccctgccagctggcaagatgagcaagcccttccttcagctggctcaggatcccacagtgcccacctacaagcagggcatcctggctcggaaaatgcatcaagatgcagacggcaagaagacgccatggggcaagcgtggctggaagatgttccacaccttactgcgagggatggttctctacttcctgaagcagggagaagaccactgtctggagggggagagcttggtggggcagatggtggatgagcccgtgggggtgcaccactcgctggccacccccgccacgcattacaccaagaagccgcacgtcttccagctgcgcacggctgactggcgcctctacctcttccaggcacccactgccaaggagatgagctcctggatcgcgcgcatcaacttggctgcggccacgcactccgcgccgcccttccccgccgctgtgggctcccagcgcagattcgtgcggcccatcctgcccgtgggccccgcccagagctccctggaggagcagcatcgatcccacgagaactgcctggacgctgccgcggacgacctgctggatctacagaggaacctgccggagcggcggggccgtggccgcgagctggaggagcaccgcctgcggaaggagtacctggagtacgagaaaacccgctacgagacctacgtgcagctgctggtggcccgcctgcactgcccctctgatgctctggacctgtgggaggagcagctggggagggaagctggaggcactcgggagcccaagctcagcctgaagaagtcccactcgagcccgtccctgcaccaggatgaggctcccaccacggccaaggtgaagcgcaacatctcagagcgcagaacctaccggaagatcatccctaagcggaaccgcaatcagctgtgaagccagcaccacctcagagacactgttccctgctccagggtagacctgagatgaacctccctggaggagacttatttcaatgagtccaccatgacggatgaggcacctcctttccctgctgaaggacaaaccttgtttccctgtggccctcattcttgtgctccctgaagctttcctaatattgctgtgctccccaccacccccatggcagtccctccgcagccccagtccctggccacgcccaagggaagagggaggtgaggacttgactttcctcccagagctcagcccatgtcaccctccaggccccagaatccagagtggcctcatttcctagacttgctgagaactcagcacttgtttgagaaccagtgcttatgtggtgtgcccttggcttctgggggagagcttggggcagcagaggcccctgggcagcccagccaggggagccacagccccgaggatggtcttgctctgggaattaggtgaccttcctggggaggccccaggagagtgaatcagggactcttgagaaattcctaaccagcctcctgtgacccagggagcagggtcgctaaggtcctgcccactgaggggacagccttctgggcagggacctcggggggcttcaagggctctgcacggctgtggggccctgtgcctttgtctccttgtgtctcctttcccccgaagtagatgaaacagtctcacatacccaactgctcatcaacagagcagagctgatggcatgagtgagggctgggcggggtggggcctccagagctttgcagggaaccctggaaccctaggaacaaggagcctttgttccaacagagcagagaaggaggttctctatgttcagaccactggagaggatagagaggtaaaaggtggcgacagtttcccttaggggtctgcctggcaggagccacagctcaggagagttgtgagggatgggacggaggctggcgaccaggcgaggcctaggccaggctcgggagacttttctgtgctcctttctacacatgccttaaaccttccttcctgtggggtgcctggaccccttccccatctctggcagctcagagggtctctgctgctctcccctgggaaatcccctcatcctgccctctggctgcctcccagctgggcttgttctctgagggaggttccggagactcatggacttggggctctgcctgtaggaaggaggctgggccggagggaccagccaccattgtctctgttcagccaagtgtgcaagtaggctgcccgccaagagggggcctctgctacccgctgctgcctgccggctgacacactgcctccccagccttcctgctaggccaccctcctcccttcccatgcttgtaaccagctctggggcttgcacctccacaaagtaaggttggcccttggaggccatgtttgggtctccggccagggcctagggctaggccatgcacccaatgggtgcacaataaataacaggtcaacaaagagggaggtgtgtcagtgtgtgaggaagggaggtcaggcagctaggaccacctgcagtgtggcaggcttcatccctctttgctccaagtgtgtatgtgtgtctgtgcatgtgtgtagtgtctgtgtctgtgtgttcatgcatatgcaggagtcacacggtcataggccatcaaagctggaggaga

SEQ ID NO: 1126 - DNA, 1833 bp, Homo sapiens
tgcgcgccgcccggccaggcccgcaaagaggcctccgagcgccatggctgcgcccccggcccgcgcggacgctgatccttcgcccacgtcgccacctacggcccgagacacaccaggccggcaggctgagaaaagcgagaccgcgtgcgaggaccgcagcaatgcagagtccctggacaggctcctgccacctgtgggcactgggcgctctccccggaagcggaccaccagccagtgcaagtcagagcctcccctgctgcgtacaagcaagcgtaccatctacaccgccgggcggccgccctggtacaatgaacacggcacgcaatccaaagaggccttcgccatcggcttgggaggcggcagtgcctctgggaagaccactgtggccagaatgatcatcgaggccctggatgtgccctgggtggtcttgctgtccatggactccttctacaaggtgctgactgagcagcagcaggaacaggccgcacacaacaacttcaacttcgaccacccagatgcctttgacttcgacctcatcatttccaccctcaagaagctgaagcaggggaagagtgtcaaggtgcccatttatgacttcaccacgcacagccggaagaaggactggaaaacactgtatggtgcaaacgtcatcatctttgagggcatcatggcctttgctgacaagacactgttggagctcctggacatgaagatctttgtggacacagactccgacatccgcctggtacggcggctgcgccgggacatcagtgagcgcggccgggacatcgagggtgtcatcaagcagtacaacaagtttgtcaagccctccttcgaccagtacatccagcccaccatgcgcctggcagacatcgtggtccccagagggagcggcaacacggtggccatcgacctgattgtgcagcacgtgcacagccagctggaggagcgtgaactcagcgtcagggctgcgctggcctcggcacaccagtgccacccgctgccccggacgctgagcgtcctgaagagcacgccgcaggtacggggcatgcacaccatcatcagggacaaggagaccagtcgcgacgagttcatcttctactccaagagactgatgcggctgctcatcgagcacgcgctctccttcctgccctttcaggactgcgtcgtacagaccccgcaggggcaggactatgcgggcaagtgctatgcggggaagcagatcaccggtgtgtccattctgcgcgccggtgaaaccatggagcccgcgctgcgcgctgtgtgcaaagacgtgcgcatcggcaccatcctcatccagaccaaccagcttaccggggagcccgagctccactacctgaggctgcccaaggacatcagcgatgaccacgtgatcctcatggactgcaccgtgtccacgggcgcggcggccatgatggcagtgcgcgtgctcctggaccacgacgtgcctgaggacaagatctttttgctgtcgctgctcatggcagagatgggcgtgcactcagtggcctatgcatttccgcgagtgagaatcatcaccacggcggtggacaagcgggtcaatgaccttttccgcatcatcccaggcattgggaactttggcgaccgctactttgggacagacgcggtccccgatggcagtgacgaggaggaagtggcctacacgggttagctgcccagtgagccatcccgtccccaccaccctcctcctgcctcctgacccaggactgctgaatacaaagatgttaatttttaaaatgttactagtataatttattctatgcattttataaaataaataaagctttagaaaaa

SEQ ID NO: 1127 - DNA, 2913 bp, Homo sapiens
gaatggctggggttggctgaagagcgcacagtggagttttaatgtccgccatgttggccatggcgtattgaagagagcgagcgagagaggagcggagcggcacagcctcccaccctcccggctggtgttagtgcccggacggcgggctctgcgctccgcccctcaagtccccggcagcggttggcgagtgggggccgaacccccggttctccatgatcccgctggccggggccgtttccccagagcggagaggtatctgctgcgcctgagatgagtaaactgtcgtttcgggcgcgggcgctagacgcctcgaagccgctgccggttttccgctgtgaggatctgcccgacctgcacgaatacgcctcgataaacagggccgtgccgcagatgcccaccggaatggagaaggaagaggagtcggaacatcatcttcagcgggctatttcagcacagcaggtgtatggcgagaagagggataatatggttataccggtcccagaggcagaaagtaatattgcttactatgagtctatatatcctggggaatttaagatgccaaagcagctcattcacatacagccttttagtttggatgctgaacagcctgattatgatttggattctgaagatgaagtatttgtgaataaactgaaaaagaaaatggacatctgcccattgcaatttgaggagatgattgaccgcctagaaaaaggcagtggtcagcagccagtcagtctgcaggaagccaaactactgctaaaagaagatgatgaactaattagagaagtttatgaatattggattaaaaagagaaaaaactgtcgagggccatctcttattccatcagtaaaacaagagaagcgagatggttccagcacaaatgatccttatgtggcttttagaaggcgtactgaaaaaatgcagactcgaaaaaatcgcaaaaatgatgaagcctcttacgaaaaaatgcttaagctgcgacgagatctaagtcgagctgttactattctagagatgataaaaagaagagaaaaaagtaaaagagagctattgcacttaacactggaaattatggaaaagaggtataatttgggcgactacaatggagagatcatgtctgaggttatggcacagagacagccaatgaaacctacttatgccatccccatcatccctattactaatagcagtcaatttaaacaccaggaagcaatggatgtgaaggagttcaaagttaataagcaagataaagccgatcttatccgaccgaaacggaaatatgaaaagaagcccaaagtcttaccatcgtctgccgctgctactccccaacagacgagtcctgctgcactgccagtcttcaatgctaaagatctgaatcagtatgactttcccagctcagacgaagaacctctctcccaggttttgtctggctcttcggaagctgaggaagacaatgatcctgatggtccttttgctttccgtaggaaagcaggctgtcagtactatgctcctcacttagaccaaactggcaactggccttggactagtcctaaagatggaggattaggggatgtgcgatatagatactgcttaactactctcaccgtaccccaaaggtgtattggatttgcacgaagacgggttgggcgcggtggaagggtcttactggacagagctcattcagactatgacagtgtgtttcaccatctggatttggaaatgctttcctcaccacaacattctccagtcaatcagtttgccaatacctcagaaacaaatacctcggacaaatctttctctaaagacctcagtcagatactagtcaatatcaaatcatgtagatggcggcattttaggcctcggacaccatccctacatgacagtgacaatgatgaactctcctgtagaaaattatataggagtataaaccgaacaggaacagcacaacctgggacccagacatgcagtacctctacgcaaagtaaaagtagcagtggttcagcacactttgcatttacagccgaacaataccagcaacatcaacagcaactggcactcatgcagaaacagcagcttgcacaaattcagcaacagcaagcaaatagtaattcctccaccaacacatcacagaaccttgcatctaaccagcagaaaagtggctttcgcctgaatatacagggtttagaaagaacactacagggttttgtttctaagactttggattctgctagtgcacagtttgctgcttctgctttggtgacatcagaacaactgatgggattcaagatgaaggatgatgtggtgcttggaatcggggtgaatggcgtccttccagcctcaggagtatacaagggcttacacctcagtagtactacaccaacagcacttgtacatacaagtccatcaacggcaggttcagctttgttacagccttcaaatattacacagacttcaagttcccacagtgcactgagtcatcaagtaactgctgccaattctgcaacaactcaggttctgattgggaacaacattcgattaactgtaccttcatcagttgccactgtaaactctattgccccaataaatgcacgacatatacctaggactttaagtgctgttccatcatctgccttaaagctggccgctgcagcaaactgtcaagtttccaaggtcccatcttcatcctctgtagattcagttccaagggaaaatcatgaatcagaaaagccagcactgaacaacatagcagacaacacagtagcgatggaggtgacgtagcttcctccgagtggaactgcagcctggggacttgattaggtgctatgcatcagtagcattttgaatgcaagggatgatggaaagcagcacatgcgtttctgtggcagctgtggggacttgacagcaatgctc

SEQ ID NO: 1128 - DNA, 4863 bp, Homo sapiens
ctcacttccgcccaggtgaggcagggccgacaccgagcccgcccgacccgggctcccacctgctcctccagcgcaccaggtgtctttaagagtgattgaagagaataattcaaaatgcctgaaaatcctgctacagataaactgcaggtgctgcaggtacttgatcgcctgaaaatgaaattgcaggagaagggtgacacgtcgcagaatgagaagttatctatgttttatgagacactaaagagtcctctcttcaaccagatactcacacttcagcagtccatcaagcaactgaagggtcaactcaaccatataccctcagattgttcagccaactttgatttttctaggaaaggtttgttagtgttcacagatggttccattactaatggaaatgtccacaggccctctaataactcgactgtatctgggttatttccgtggaccccgaagttgggaaatgaagactttaactcagtcattcaacagatggctcagggccggcaaattgaatatatagatatagaacggccttcaactggaggccttggattcagtgtggtggccctcagaagtcaaaatctcggaaaagttgatatcttcgtgaaggatgtccagccagggagtgtagcagacagggatcaaagattaaaggaaaatgatcaaatattggccattaatcacacgccattggatcagaacatttcccatcagcaagcaattgcattattacaacaaaccactggatctttgagactgattgtggccagggaaccagtccacacaaaaagcagtacttctagcagcctaaatgatacaactctgcctgaaacagtttgttggggccatgttgaagaggttgagctcattaatgatggctctggactaggttttggaatagttggaggaaaaacaagtggcgtggttgtgaggactatagttcctggaggattagcagatcgagatggaagactccagacaggggaccacatcttgaagattggtggcacaaacgtgcagggaatgaccagtgagcaagttgcacaagttctaaggaactgtgggaattcagtcaggatgctcgttgctagagatccagctggtgacatttcagtcaccccccctgcccctgcagccttacctgttgccctgcctactgtagccagcaagggccctggttctgacagttctctttttgaaacttataatgttgagcttgtgagaaaagatgggcagagtcttggaattagaattgttggctatgttggaacatctcatacaggggaagcttcagggatttatgtgaaaagtataatacctggcagtgctgcgtaccacaatggccacattcaagtgaatgacaaaatagttgctgtcgatggcgtgaacattcagggttttgccaaccatgatgttgttgaagtattacgaaatgcagggcaggtggtacacctaaccctagttcgaaggaagacatcctcatctacttctccacttgaaccaccttcagacagaggaactgttgtagaaccactgaaaccaccagctctctttctaactggagcagtggaaactgaaactaatgtggatggtgaagatgaggaaattaaagaaagaattgatactttaaaaaatgacaacatacaagccttagaaaaattggaaaaagtcccagactctccagaaaatgagctgaaatccagatgggaaaacctgttgggtcctgattatgaagtaatggttgctactttggacacacagattgcagatgatgctgagttacagaaatattcaaagctgctgcctattcacactctgaggcttggtgtggaagtggattcctttgatgggcaccattatatttcttcaattgtttctggtggtcctgttgatacattgggtctcctacagccagaagatgagctgcttgaggtcaatggcatgcagctttatggaaaatctcgccgagaagcagtctcctttcttaaagaagtgccacccccttttactttggtttgctgtcggaggttgtttgatgatgaagcttctgtagatgaaccaaggcgcactgaaacctctcttcctgagacagaggttgaccacaatatggatgtcaatactgaagaagatgatgatggggaattagcactgtggtcccctgaagtcaagattgttgaactagtaaaagattgtaaaggtttgggattcagcattttggattaccaggaccctttagatcctacaagatcagtgattgtgatccgctccctggtagcagatggtgtagcagaaagaagtgggggactattacctggagaccgcctggtctcagtcaatgaatactgtttggacaacacctcacttgctgaagctgtggaaatattgaaagctgtgccaccaggcctagtacaccttggcatctgtaagcctttggtggaagataatgaagaagaaagttgttatattttacattcaagcagtaatgaagacaagactgaattttcaggaacaattcatgatataaattcatctttaatactcgaagcacccaagggatttagagatgaaccatattttaaagaagaacttgtggatgaaccatttctagatctgggaaagtctttccattcccaacaaaaagagatagagcaaagcaaggaggcctgggagatgcatgaatttctgactcctagattgcaggaaatggatgaagaaagagaaatgcttgttgatgaagaatatgagttatatcaagatccctcaccatccatggagttgtatcccttgtcgcacattcaagaggccactcctgtgccctctgtgaatgaacttcactttggtacacagtggttgcatgataatgaaccatccgagtctcaagaggcaagaaccgggaggactgtctattcccaggaggcacagccgtatggctattgccctgaaaatgtgatgaaagaaaattttgtcatggagtccctaccatctgtaccatcaactgaaggaaacagtcaacaaggcagatttgacgacctggaaaatcttaattcattagcaaaaactagtctggatttaggcatgatcccgaatgatgtccaaggtcctagcttgctcattgaccttcctgttgtggctcaaaggagggagcaagaagatttgcctttatatcaacaccaagcgacacgagttatttccaaggcctcagcatacacaggaatgttgtcttctagatatgccactgatacatgtgagttacctgagagagaagaaggcgaaggagaagaaactccaaattttagccactggggtccaccgagaattgttgagatttttagagaacccaatgtgtctcttgggatcagtattgttggtggacaaactgttataaaacgtctaaagaatggagaggagcttaaaggtatattcatcaaacaagttttagaagacagtccagcagggaagacgaacgcacttaaaactggagataaaatacttgaggtgtctggagtagatttgcagaatgcctcacacagcgaagcagttgaggccattaagaatgcaggaaaccctgtggtgttcattgttcagagtttgtcatccactccacgagtcattcctaacgtacataacaaggccaacaaaatcaccggtaaccagaaccaggacacccaagaaaagaaagaaaagaggcaaggaactgctccaccgccaatgaaacttcctcctccttataaagctctgactgatgacagtgatgaaaatgaagaagaagatgcctttaccgaccaaaaaatcagacaaagatatgcagatctgcctggagaactgcacattattgaacttgaaaaagataagaatggacttggactcagccttgctggtaataaagaccgatcacgcatgagcatatttgtggtgggaattaacccggaaggacctgctgccgcagatggacgaatgcgtattggagatgaactcttagagataaacaatcagattctgtatggaagaagtcaccaaaatgcatctgccattattaagactgccccatcaaaggtcaagctggttttcatcagaaacgaggatgcagtcaatcagatggccgttactccctttccagtgccatcaagttctccatcttctattgaggatcagagcggcaccgaacctattagtagtgaggaagatggcagcgtcgaagttggtattaaacaattgcctgaaagtgaaagcttcaaactggctgtcagccagatgaaacagcaaaaatatccaacaaaagtctccttcagttcacaagagataccattagcaccagcttcatcataccattcaacagatgcagacttcacaggctatggtggtttccaggctcctctgtcagtggaccccgcaacgtgtcccattgtccctggacaggaaatgattatagaaatatccaagggacgttcagggcttggtctcagcattgtgggaggaaaagacacacccttgttctggaggctgggaagtccaagagcatggagccagcatctggtgagggccttcatgctgcatcatcctgtgacagaagttgaagggcaaaatgctatagttatccatgaagtctatgaagaaggggcagcagccagagatggaagactttgggctggtgaccagatattagaggttaatggggttgacctgaggaactccagccacgaagaagccatcacagccctgaggcagaccccccagaaggtgcggctggtggtgtatagagatgaggcacactaccgggatgaggagaacttggagattttccctgtggatctgcagaagaaagctggccggggcctgggcctgagcatcgttgggaaacggtaa

SEQ ID NO: 1129 - DNA, 5520 bp, Homo sapiens
ctcacttccgcccaggtgaggcagggccgacaccgagcccgcccgacccgggctcccacctgctcctccagcgcaccaggtgtctttaagagtgattgaagagaataattcaaaatgcctgaaaatcctgctacagataaactgcaggtgctgcaggtacttgatcgcctgaaaatgaaattgcaggagaagggtgacacgtcgcagaatgagaagttatctatgttttatgagacactaaagagtcctctcttcaaccagatactcacacttcagcagtccatcaagcaactgaagggtcaactcaaccatataccctcagattgttcagccaactttgatttttctaggaaaggtttgttagtgttcacagatggttccattactaatggaaatgtccacaggccctctaataactcgactgtatctgggttatttccgtggaccccgaagttgggaaatgaagactttaactcagtcattcaacagatggctcagggccggcaaattgaatatatagatatagaacggccttcaactggaggccttggattcagtgtggtggccctcagaagtcaaaatctcggaaaagttgatatcttcgtgaaggatgtccagccagggagtgtagcagacagggatcaaagattaaaggaaaatgatcaaatattggccattaatcacacgccattggatcagaacatttcccatcagcaagcaattgcattattacaacaaaccactggatctttgagactgattgtggccagggaaccagtccacacaaaaagcagtacttctagcagcctaaatgatacaactctgcctgaaacagtttgttggggccatgttgaagaggttgagctcattaatgatggctctggactaggttttggaatagttggaggaaaaacaagtggcgtggttgtgaggactatagttcctggaggattagcagatcgagatggaagactccagacaggggaccacatcttgaagattggtggcacaaacgtgcagggaatgaccagtgagcaagttgcacaagttctaaggaactgtgggaattcagtcaggatgctcgttgctagagatccagctggtgacatttcagtcaccccccctgcccctgcagccttacctgttgccctgcctactgtagccagcaagggccctggttctgacagttctctttttgaaacttataatgttgagcttgtgagaaaagatgggcagagtcttggaattagaattgttggctatgttggaacatctcatacaggggaagcttcagggatttatgtgaaaagtataatacctggcagtgctgcgtaccacaatggccacattcaagtgaatgacaaaatagttgctgtcgatggcgtgaacattcagggttttgccaaccatgatgttgttgaagtattacgaaatgcagggcaggtggtacacctaaccctagttcgaaggaagacatcctcatctacttctccacttgaaccaccttcagacagaggaactgttgtagaaccactgaaaccaccagctctctttctaactggagcagtggaaactgaaactaatgtggatggtgaagatgaggaaattaaagaaagaattgatactttaaaaaatgacaacatacaagccttagaaaaattggaaaaagtcccagactctccagaaaatgagctgaaatccagatgggaaaacctgttgggtcctgattatgaagtaatggttgctactttggacacacagattgcagatgatgctgagttacagaaatattcaaagctgctgcctattcacactctgaggcttggtgtggaagtggattcctttgatgggcaccattatatttcttcaattgtttctggtggtcctgttgatacattgggtctcctacagccagaagatgagctgcttgaggtcaatggcatgcagctttatggaaaatctcgccgagaagcagtctcctttcttaaagaagtgccacccccttttactttggtttgctgtcggaggttgtttgatgatgaagcttctgtagatgaaccaaggcgcactgaaacctctcttcctgagacagaggttgaccacaatatggatgtcaatactgaagaagatgatgatggggaattagcactgtggtcccctgaagtcaagattgttgaactagtaaaagattgtaaaggtttgggattcagcattttggattaccaggaccctttagatcctacaagatcagtgattgtgatccgctccctggtagcagatggtgtagcagaaagaagtgggggactattacctggagaccgcctggtctcagtcaatgaatactgtttggacaacacctcacttgctgaagctgtggaaatattgaaagctgtgccaccaggcctagtacaccttggcatctgtaagcctttggtggaagataatgaagaagaaagttgttatattttacattcaagcagtaatgaagacaagactgaattttcaggaacaattcatgatataaattcatctttaatactcgaagcacccaagggatttagagatgaaccatattttaaagaagaacttgtggatgaaccatttctagatctgggaaagtctttccattcccaacaaaaagagatagagcaaagcaaggaggcctgggagatgcatgaatttctgactcctagattgcaggaaatggatgaagaaagagaaatgcttgttgatgaagaatatgagttatatcaagatccctcaccatccatggagttgtatcccttgtcgcacattcaagaggccactcctgtgccctctgtgaatgaacttcactttggtacacagtggttgcatgataatgaaccatccgagtctcaagaggcaagaaccgggaggactgtctattcccaggaggcacagccgtatggctattgccctgaaaatgtgatgaaagaaaattttgtcatggagtccctaccatctgtaccatcaactgaaggaaacagtcaacaaggcagatttgacgacctggaaaatcttaattcattagcaaaaactagtctggatttaggcatgatcccgaatgatgtccaaggtcctagcttgctcattgaccttcctgttgtggctcaaaggagggagcaagaagatttgcctttatatcaacaccaagcgacacgagttatttccaaggcctcagcatacacaggaatgttgtcttctagatatgccactgatacatgtgagttacctgagagagaagaaggcgaaggagaagaaactccaaattttagccactggggtccaccgagaattgttgagatttttagagaacccaatgtgtctcttgggatcagtattgttggtggacaaactgttataaaacgtctaaagaatggagaggagcttaaaggtatattcatcaaacaagttttagaagacagtccagcagggaagacgaacgcacttaaaactggagataaaatacttgaggtgtctggagtagatttgcagaatgcctcacacagcgaagcagttgaggccattaagaatgcaggaaaccctgtggtgttcattgttcagagtttgtcatccactccacgagtcattcctaacgtacataacaaggccaacaaaatcaccggtaaccagaaccaggacacccaagaaaagaaagaaaagaggcaaggaactgctccaccgccaatgaaacttcctcctccttataaagctctgactgatgacagtgatgaaaatgaagaagaagatgcctttaccgaccaaaaaatcagacaaagatatgcagatctgcctggagaactgcacattattgaacttgaaaaagataagaatggacttggactcagccttgctggtaataaagaccgatcacgcatgagcatatttgtggtgggaattaacccggaaggacctgctgccgcagatggacgaatgcgtattggagatgaactcttagagataaacaatcagattctgtatggaagaagtcaccaaaatgcatctgccattattaagactgccccatcaaaggtcaagctggttttcatcagaaacgaggatgcagtcaatcagatggccgttactccctttccagtgccatcaagttctccatcttctattgaggatcagagcggcaccgaacctattagtagtgaggaagatggcagcgtcgaagttggtattaaacaattgcctgaaagtgaaagcttcaaactggctgtcagccagatgaaacagcaaaaatatccaacaaaagtctccttcagttcacaagagataccattagcaccagcttcatcataccattcaacagatgcagacttcacaggctatggtggtttccaggctcctctgtcagtggaccccgcaacgtgtcccattgtccctggacaggaaatgattatagaaatatccaagggacgttcagggcttggtctcagcattgtgggaggaaaagacacacccttgaatgctatagttatccatgaagtctatgaagaaggggcagcagccagagatggaagactttgggctggtgaccagatattagaggttaatggggttgacctgaggaactccagccacgaagaagccatcacagccctgaggcagaccccccagaaggtgcggctggtggtgtatagagatgaggcacactaccgggatgaggagaacttggagattttccctgtggatctgcagaagaaagctggccggggcctgggcctgagcatcgttgggaaacgaaatggaagcggagtgtttatttctgacatcgtgaaaggcggagccgcagacctggatgggagattgattcagggagatcagatcttatctgtgaatggggaggacatgagaaatgcctcacaggagacagtggccaccatcctcaagtgtgcacagggacttgtgcagctagagattggaagactccgagctggttcctggacctccgcaaggacgacatcacagaacagtcagggtagtcagcagagtgcacacagcagctgtcatccctccttcgctcctgtcatcactggcctgcaaaacctggttggcacaaaaagagtttcagatccttcccagaaaaattcaggcacagatatggaaccaaggactgttgagataaacagggagctcagtgatgcccttggaatcagtattgctggaggaagaggaagtcccttaggagatatccccgtatttattgccatgattcaggctagcggagtggccgcacggacacagaagcttaaagttggagatcggattgtcagcattaacgggcaacctttggatgggctgtctcacgcggatgtggttaatctgctgaagaacgcctacgggcgcattatcctgcaggttgtagcagataccaatataagcgccatagcagctcagcttgaaaacatgtctacaggctaccaccttggttcgcccactgctgaacaccatccagaagacacagaggagcagctgcagatgacggccgattaa

SEQ ID NO: 1130 - DNA, 4773 bp, Homo sapiens
ctcacttccgcccaggtgaggcagggccgacaccgagcccgcccgacccgggctcccacctgctcctccagcgcaccaggtgtctttaagagtgattgaagagaataattcaaaatgcctgaaaatcctgctacagataaactgcaggtgctgcaggtacttgatcgcctgaaaatgaaattgcaggagaagggtgacacgtcgcagaatgagaagttatctatgttttatgagacactaaagagtcctctcttcaaccagatactcacacttcagcagtccatcaagcaactgaagggtcaactcaaccatataccctcagattgttcagccaactttgatttttctaggaaaggtttgttagtgttcacagatggttccattactaatggaaatgtccacaggccctctaataactcgactgtatctgggttatttccgtggaccccgaagttgggaaatgaagactttaactcagtcattcaacagatggctcagggccggcaaattgaatatatagatatagaacggccttcaactggaggccttggattcagtgtggtggccctcagaagtcaaaatctcggaaaagttgatatcttcgtgaaggatgtccagccagggagtgtagcagacagggatcaaagattaaaggaaaatgatcaaatattggccattaatcacacgccattggatcagaacatttcccatcagcaagcaattgcattattacaacaaaccactggatctttgagactgattgtggccagggaaccagtccacacaaaaagcagtacttctagcagcctaaatgatacaactctgcctgaaacagtttgttggggccatgttgaagaggttgagctcattaatgatggctctggactaggttttggaatagttggaggaaaaacaagtggcgtggttgtgaggactatagttcctggaggattagcagatcgagatggaagactccagacaggggaccacatcttgaagattggtggcacaaacgtgcagggaatgaccagtgagcaagttgcacaagttctaaggaactgtgggaattcagtcaggatgctcgttgctagagatccagctggtgacatttcagtcaccccccctgcccctgcagccttacctgttgccctgcctactgtagccagcaagggccctggttctgacagttctctttttgaaacttataatgttgagcttgtgagaaaagatgggcagagtcttggaattagaattgttggctatgttggaacatctcatacaggggaagcttcagggatttatgtgaaaagtataatacctggcagtgctgcgtaccacaatggccacattcaagtgaatgacaaaatagttgctgtcgatggcgtgaacattcagggttttgccaaccatgatgttgttgaagtattacgaaatgcagggcaggtggtacacctaaccctagttcgaaggaagacatcctcatctacttctccacttgaaccaccttcagacagaggaactgttgtagaaccactgaaaccaccagctctctttctaactggagcagtggaaactgaaactaatgtggatggtgaagatgaggaaattaaagaaagaattgatactttaaaaaatgacaacatacaagccttagaaaaattggaaaaagtcccagactctccagaaaatgagctgaaatccagatgggaaaacctgttgggtcctgattatgaagtaatggttgctactttggacacacagattgcagatgatgctgagttacagaaatattcaaagctgctgcctattcacactctgaggcttggtgtggaagtggattcctttgatgggcaccattatatttcttcaattgtttctggtggtcctgttgatacattgggtctcctacagccagaagatgagctgcttgaggtcaatggcatgcagctttatggaaaatctcgccgagaagcagtctcctttcttaaagaagtgccacccccttttactttggtttgctgtcggaggttgtttgatgatgaagcttctgtagatgaaccaaggcgcactgaaacctctcttcctgagacagaggttgaccacaatatggatgtcaatactgaagaagatgatgatggggaattagcactgtggtcccctgaagtcaagattgttgaactagtaaaagattgtaaaggtttgggattcagcattttggattaccaggaccctttagatcctacaagatcagtgattgtgatccgctccctggtagcagatggtgtagcagaaagaagtgggggactattacctggagaccgcctggtctcagtcaatgaatactgtttggacaacacctcacttgctgaagctgtggaaatattgaaagctgtgccaccaggcctagtacaccttggcatctgtaagcctttggtggaagataatgaagaagaaagttgttatattttacattcaagcagtaatgaagacaagactgaattttcaggaacaattcatgatataaattcatctttaatactcgaagcacccaagggatttagagatgaaccatattttaaagaagaacttgtggatgaaccatttctagatctgggaaagtctttccattcccaacaaaaagagatagagcaaagcaaggaggcctgggagatgcatgaatttctgactcctagattgcaggaaatggatgaagaaagagaaatgcttgttgatgaagaatatgagttatatcaagatccctcaccatccatggagttgtatcccttgtcgcacattcaagaggccactcctgtgccctctgtgaatgaacttcactttggtacacagtggttgcatgataatgaaccatccgagtctcaagaggcaagaaccgggaggactgtctattcccaggaggcacagccgtatggctattgccctgaaaatgtgatgaaagaaaattttgtcatggagtccctaccatctgtaccatcaactgaaggaaacagtcaacaaggcagatttgacgacctggaaaatcttaattcattagcaaaaactagtctggatttaggcatgatcccgaatgatgtccaaggtcctagcttgctcattgaccttcctgttgtggctcaaaggagggagcaagaagatttgcctttatatcaacaccaagcgacacgagttatttccaaggcctcagcatacacaggaatgttgtcttctagatatgccactgatacatgtgagttacctgagagagaagaaggcgaaggagaagaaactccaaattttagccactggggtccaccgagaattgttgagatttttagagaacccaatgtgtctcttgggatcagtattgttggtggacaaactgttataaaacgtctaaagaatggagaggagcttaaaggtatattcatcaaacaagttttagaagacagtccagcagggaagacgaacgcacttaaaactggagataaaatacttgaggtgtctggagtagatttgcagaatgcctcacacagcgaagcagttgaggccattaagaatgcaggaaaccctgtggtgttcattgttcagagtttgtcatccactccacgagtcattcctaacgtacataacaaggccaacaaaatcaccggtaaccagaaccaggacacccaagaaaagaaagaaaagaggcaaggaactgctccaccgccaatgaaacttcctcctccttataaagctctgactgatgacagtgatgaaaatgaagaagaagatgcctttaccgaccaaaaaatcagacaaagatatgcagatctgcctggagaactgcacattattgaacttgaaaaagataagaatggacttggactcagccttgctggtaataaagaccgatcacgcatgagcatatttgtggtgggaattaacccggaaggacctgctgccgcagatggacgaatgcgtattggagatgaactcttagagataaacaatcagattctgtatggaagaagtcaccaaaatgcatctgccattattaagactgccccatcaaaggtcaagctggttttcatcagaaacgaggatgcagtcaatcagatggccgttactccctttccagtgccatcaagttctccatcttctattgaggatcagagcggcaccgaacctattagtagtgaggaagatggcagcgtcgaagttggtattaaacaattgcctgaaagtgaaagcttcaaactggctgtcagccagatgaaacagcaaaaatatccaacaaaagtctccttcagttcacaagagataccattagcaccagcttcatcataccattcaacagatgcagacttcacaggctatggtggtttccaggctcctctgtcagtggaccccgcaacgtgtcccattgtccctggacaggaaatgattatagaaatatccaagggacgttcagggcttggtctcagcattgtgggaggaaaagacacacccttgaatgctatagttatccatgaagtctatgaagaaggggcagcagccagagatggaagactttgggctggtgaccagatattagaggttaatggggttgacctgaggaactccagccacgaagaagccatcacagccctgaggcagaccccccagaaggtgcggctggtggtgtatagagatgaggcacactaccgggatgaggagaacttggagattttccctgtggatctgcagaagaaagctggccggggcctgggcctgagcatcgttgggaaacggtaa

SEQ ID NO: 1131 - DNA, 5349 bp, Homo sapiens
ctcacttccgcccaggtgaggcagggccgacaccgagcccgcccgacccgggctcccacctgctcctccagcgcaccaggtgtctttaagagtgattgaagagaataattcaaaatgcctgaaaatcctgctacagataaactgcaggtgctgcaggtacttgatcgcctgaaaatgaaattgcaggagaagggtgacacgtcgcagaatgagaagttatctatgttttatgagacactaaagagtcctctcttcaaccagatactcacacttcagcagtccatcaagcaactgaagggtcaactcaaccatataccctcagattgttcagccaactttgatttttctaggaaaggtttgttagtgttcacagatggttccattactaatggaaatgtccacaggccctctaataactcgactgtatctgggttatttccgtggaccccgaagttgggaaatgaagactttaactcagtcattcaacagatggctcagggccggcaaattgaatatatagatatagaacggccttcaactggaggccttggattcagtgtggtggccctcagaagtcaaaatctcggaaaagttgatatcttcgtgaaggatgtccagccagggagtgtagcagacagggatcaaagattaaaggaaaatgatcaaatattggccattaatcacacgccattggatcagaacatttcccatcagcaagcaattgcattattacaacaaaccactggatctttgagactgattgtggccagggaaccagtccacacaaaaagcagtacttctagcagcctaaatgatacaactctgcctgaaacagtttgttggggccatgttgaagaggttgagctcattaatgatggctctggactaggttttggaatagttggaggaaaaacaagtggcgtggttgtgaggactatagttcctggaggattagcagatcgagatggaagactccagacaggggaccacatcttgaagattggtggcacaaacgtgcagggaatgaccagtgagcaagttgcacaagttctaaggaactgtgggaattcagtcaggatgctcgttgctagagatccagctggtgacatttcagtcaccccccctgcccctgcagccttacctgttgccctgcctactgtagccagcaagggccctggttctgacagttctctttttgaaacttataatgttgagcttgtgagaaaagatgggcagagtcttggaattagaattgttggctatgttggaacatctcatacaggggaagcttcagggatttatgtgaaaagtataatacctggcagtgctgcgtaccacaatggccacattcaagtgaatgacaaaatagttgctgtcgatggcgtgaacattcagggttttgccaaccatgatgttgttgaagtattacgaaatgcagggcaggtggtacacctaaccctagttcgaaggaagacatcctcatctacttctccacttgaaccaccttcagacagaggaactgttgtagaaccactgaaaccaccagctctctttctaactggagcagtggaaactgaaactaatgtggatggtgaagatgaggaaattaaagaaagaattgatactttaaaaaatgacaacatacaagccttagaaaaattggaaaaagtcccagactctccagaaaatgagctgaaatccagatgggaaaacctgttgggtcctgattatgaagtaatggttgctactttggacacacagattgcagatgatgctgagttacagaaatattcaaagctgctgcctattcacactctgaggcttggtgtggaagtggattcctttgatgggcaccattatatttcttcaattgtttctggtggtcctgttgatacattgggtctcctacagccagaagatgagctgcttgaggtcaatggcatgcagctttatggaaaatctcgccgagaagcagtctcctttcttaaagaagtgccacccccttttactttggtttgctgtcggaggttgtttgatgatgaagcttctgtagatgaaccaaggcgcactgaaacctctcttcctgagacagaggttgaccacaatatggatgtcaatactgaagaagatgatgatggggaattagcactgtggtcccctgaagtcaagattgttgaactagtaaaagattgtaaaggtttgggattcagcattttggattaccaggaccctttagatcctacaagatcagtgattgtgatccgctccctggtagcagatggtgtagcagaaagaagtgggggactattacctggagaccgcctggtctcagtcaatgaatactgtttggacaacacctcacttgctgaagctgtggaaatattgaaagctgtgccaccaggcctagtacaccttggcatctgtaagcctttggtggaagataatgaagaagaaagttgttatattttacattcaagcagtaatgaagacaagactgaattttcaggaacaattcatgatataaattcatctttaatactcgaagcacccaagggatttagagatgaaccatattttaaagaagaacttgtggatgaaccatttctagatctgggaaagtctttccattcccaacaaaaagagatagagcaaagcaaggaggcctgggagatgcatgaatttctgactcctagattgcaggaaatggatgaagaaagagaaatgcttgttgatgaagaatatgagttatatcaagatccctcaccatccatggagttgtatcccttgtcgcacattcaagaggccactcctgtgccctctgtgaatgaacttcactttggtacacagtggttgcatgataatgaaccatccgagtctcaagaggcaagaaccgggaggactgtctattcccaggaggcacagccgtatggctattgccctgaaaatgtgatgaaagaaaattttgtcatggagtccctaccatctgtaccatcaactgaaggaaacagtcaacaaggcagatttgacgacctggaaaatcttaattcattagcaaaaactagtctggatttaggcatgatcccgaatgatgtccaaggtcctagcttgctcattgaccttcctgttgtggctcaaaggagggagcaagaagatttgcctttatatcaacaccaagcgacacgagttatttccaaggcctcagcatacacaggaatgttgtcttctagatatgccactgatacatgtgagttacctgagagagaagaaggcgaaggagaagaaactccaaattttagccactggggtccaccgagaattgttgagatttttagagaacccaatgtgtctcttgggatcagtattgttggtggacaaactgttataaaacgtctaaagaatggagaggagcttaaaggtatattcatcaaacaagttttagaagacagtccagcagggaagacgaacgcacttaaaactggagataaaatacttgaggtgtctggagtagatttgcagaatgcctcacacagcgaagcagttgaggccattaagaatgcaggaaaccctgtggtgttcattgttcagagtttgtcatccactccacgagtcattcctaacgtacataacaaggccaacaaaatcaccggtaaccagaaccaggacacccaagaaaagaaagaaaagaggcaaggaactgctccaccgccaatgaaacttcctcctccttataaagctctgactgatgacagtgatgaaaatgaagaagaagatgcctttaccgaccaaaaaatcagacaaagatatgcagatctgcctggagaactgcacattattgaacttgaaaaagataagaatggacttggactcagccttgctggtaataaagaccgatcacgcatgagcatatttgtggtgggaattaacccggaaggacctgctgccgcagatggacgaatgcgtattggagatgaactcttagagataaacaatcagattctgtatggaagaagtcaccaaaatgcatctgccattattaagactgccccatcaaaggtcaagctggttttcatcagaaacgaggatgcagtcaatcagatggccgttactccctttccagtgccatcaagttctccatcttctattgaggatcagagcggcaccgaacctattagtagtgaggaagatggcagcgtcgaagttggtattaaacaattgcctgaaagtgaaagcttcaaactggctgtcagccagatgaaacagcaaaaatatccaacaaaagtctccttcagttcacaagagataccattagcaccagcttcatcataccattcaacagatgcagacttcacaggctatggtggtttccaggctcctctgtcagtggaccccgcaacgtgtcccattgtccctggacaggaaatgattatagaaatatccaagggacgttcagggcttggtctcagcattgtgggaggaaaagacacacccttggttaatggggttgacctgaggaactccagccacgaagaagccatcacagccctgaggcagaccccccagaaggtgcggctggtggtgtatagagatgaggcacactaccgggatgaggagaacttggagattttccctgtggatctgcagaagaaagctggccggggcctgggcctgagcatcgttgggaaacggtaaagacgtgctgtgggagttgggatctgcctttttcatccagagctctgatgcctgtgaacactgaaagagaaagcctaatgtaaagtagtgatgggatttctaaaaataagatatttatgaaaatttgacaacatgggtcatatttctgagcaaggtcttaccagaaaaattgtcatatcaagatagaactccaagtccaatcaatccagactgatatatttctgtacagagtaagaacaactagcaaggttctttcacttggaattactaagatcggagttttgcagaggttgattaaagcaaccatacccaagaaatagctagcatcaagaatgagatttatccaatgttgggtcaagaacattgcttcgacatggaaattaacatggaacattgcttttcgtgatactgttaatttcatactatgttgaaactagttgagtagacatagttaagagataaacataattcttcacgatagtagttttctattaagaaaaatgtcctgctgggcacagtggcatgtacctgttgtctcagctatgtgggaagatcacttgaggccaggagttcaaggctatagtgtgctatgatcatgcctgtgaatagccactgcacttgagcctcttgggaaacataacaagaccccatctgtaaatt

SEQ ID NO: 1132 - DNA, 1160 bp, Homo sapiens
ccggggagtaggaaggagccggggctgtagccggagtggagcggctgccagccgaggagcaggcgcggccgcggcgccatattgcggccctcagcggccgcgaccgagtcatggctgagacctacgacttcctcttcaaattcctggtgattggcagtgcaggaactggcaaatcatgtctccttcatcagttcattgagaataagttcaaacaggactccaaccacacaatcggcgtggagtttggatcccgggtggtcaacgtgggtgggaagactgtgaagctacagatttgggacacggctggccaggagcggtttcggtcagtgacgcggagttattaccgaggggcggctggagccctgctggtgtacgacatcaccagccgggagacatacaactcactggctgcctggctgacggatgcccgcaccctggccagccccaacatcgtggtcatcctctgtggcaacaagaaggacctggaccctgagcgggaggtcactttcctggaggcctcccgctttgcccaggagaatgagctgatgttcctggagaccagcgctctcacaggcgagaacgtggaggaggcgttcctcaagtgtgcccgcactatcctcaacaagattgactcaggcgagctagacccggagaggatgggctctggcattcagtacggggatgcgtccctccgccagcttcggcagcctcggagtgcccaggccgtggcccctcagccgtgtggctgctgagctctgtggagccagctcacctgttctccaggaccagccctgctggggcccaggcccaggctctgagaggccgtgtcctaacctgccctggccccggagaagctacgttgccacctgtcccccttccctggcctggtggggcctggctttggggcaagactgagccacgggggaagggggaatcccgtacctgctgctgcttcctctgtcttggctaacgtctgtccccctgaacccctaaccataccccaagagctcccaaagcctgagaccagggtcatttgtccccaactccccatctggccctgctgttgctagtacctgttatttattacctggaggcctgtccagcacccaccctacccccataaagcattgtttacacctgaaaaaaaaaaaaaaaaaaaa

SEQ ID NO: 1133 - DNA, 4156 bp, Homo sapiens
gagaatgtgagaaaagggggaaaatgcccaggaggaagcaggagcagcccaagcgccttccctcacatgttagtaggcaggaagaggcggagggggagctcagtgaaggagaacactggtatggaaactcttcagaggctccgtcagaagcatcctatggggaagtccaggagaactataagttgtctctggaggaccggatccaggagcagtccacgtccccggacacctccttgggaagcacgactcccagcagccacacgttggagctggtggcactggacagtgaggtcctgcgagactcactgcagtgtcaagatcacctttccccgggagtgtcttctttgtgtgacgatgacccaggctccaacaagcccctgagcagcaatttgaggcggctgctggaggctggttccctcaaactcgatgctgcagccacggctaatggcagagtggagtcccccgtaaacgttggctcgaacctctccttttccccgccttcccaccacgcccggcagctcagtgttctggccaggaagttggccgagaagcaggaacagaatgaccaatacactccaagtaaccgttttatatggaatcaaggtaagtggttgccaaactcaaccaccacctgcagcttgtctccggattcagccatcctaaaactgaaagctgcagccaatgccgttctgcaggacaaatctctcaccaggactgaggagaccatgcgatttgagtccctttcctccccttttagctcccagtctgccagttctaccttggccgctttgtccaagaaggtcagtgaaagaagtttgactcctggtcaggagcaccctccaccggccagctccttcctttccctggcttctatgacctcctcagcggcccttctgaaggaggtggccgcaagggctgcgggcagtcttctggctgagaaatcatcgctgctgcctgaggaccctctaccgcccccgccttcagagaagaaaccagaaaaagtcactccgccacctccaccgccacctccaccacctccaccaccaccaccacaatccctggaattattattactcccagttcctaagggaagagtttctaaaccctccaattcagcctcagaagaggaaagtggaaagcctttccagtgtccaatatgtggtttggttattaaaaggaagagttactggaagcggcacatggtgattcacacaggtttaaaaagtcatcagtgtccgctctgtccattccggtgtgctcgcaaggacaatctcaaatcccacatgaaggttcatcagcaccaggatcggggagagacctttcagtgccagctgtgcccttttacttcctcacgccacttcagcctgaaactccacatgcgttgccatcagcacttcctgaggacagaagccaaggtgaaggaggagatcccagacccagatgtcaagggatctccccacctcagtgacagtgcctgcctggggcagcaaagggaaggaggagggacagagctagtggggaccatgatgacgtctaacactccagagaggactagccagggaggggctggcgtctcgcctttgctggtgaaggaggaacccaaggaagataacggcctgcccacctcctttactttgaatgctgccgacaggcccgccaaccacacaaagctgaaagacccctccgagtatgtggccaacagtgcgtcagcattgttcagccaggacatctctgttaagatggcgtctgattttctcatgaagctgtcagctgcaaatcagaaggagcccatgaatcttaattttaaagtgaaagaggagcctaaggaaggggagtccctaagcacgactttgcctcggtccagctatgtgttcagcccggaatctgaagtgtcagccccaggcgtctctgaggacgcactaaagccccaggaagggaagggaagtgtgctaaggcgggatgtgtcagtcaaagcagcctctgaacttctcatgaaactctcagcggaaagctacaaggaaacacagatggtgaagattaaagaggaacccatggaggttgacatccaggactcccatgtctcgatatcacccagccggaatgttggctacagcactttaatcgggcgagagaaaaccgaacccttacagaagatgccagagggcagagtacccccagagagaaacctcttcagtcaggatatctctgtgaaaatggcttccgagctcctctttcaactgtcagaaaaagtgagcaaagagcacaatcatacaaaagaaaacaccatccggaccacgaccagccctttcttttcagaagacacatttagacaatcaccattcacctccaattcaaaagaactgctgcccagtgactccgtgctgcacggaagaatatcagctccagaaacagaaaagatagtcctagaggcaggaaatggattaccatcctggaaattcaatgaccagctttttccctgtgacgtgtgtgggaaagtgtttggccgacagcagacattgtcccgacacctctcgctgcacacagaggaaagaaaatacaaatgccacttgtgcccctatgctgctaagtgccgtgcaaatctgaaccagcacttgaccgtccattccgtgaagctggtgagtacagacaccgaggacattgtcagcgccgtcacctctgaaggcagtgatgggaagaaacatccttattattacagttgtcacgtgtgtggatttgggaccgagctcaatgtccagtttgtcagccacatgtcactccacgtggacaaggagcagtggatgttttcgatctgctgcactgcctgcgacttcgtcaccatggaggaagcagagataaagactcacattggcaccaagcacacaggggaagacaggaagacccccagcgaatcaaatagcccctcttcatcctccctctcagctctgagtgattcagccaacagcaaagatgattcagatggctcccagaaaaacaagggcgggaacaatctgctggtcatctctgtcatgcctgggagccagccctcactgaacagtgaggaaaagccagagaaagggttcgaatgtgttttttgcaactttgtctgcaagacgaagaacatgtttgagcgtcatctgcagatacacctcatcacccggatgtttgagtgtgatgtgtgccacaagttcatgaagacccccgaacagctgctggagcataagaaatgccacactgtccccaccggtgggctcaagtaaggaaactcaggacagtggtgagtttcagactcctctaggtgcccattctgcatttattccaccaaccgccccgctgccatggagtgccacctcaagacccactacaagatggagtacaagtgccggatctgccagacggtgaaggccaaccagctggagctggagacgcacacccgggagcaccgcctgggcaaccactacaagtgcgaccagtgcggctacctgtccaagaccgccaacaagctcatcgagcacgtgcgcgtccacaccggggagcggcccttccactgtgaccagtgcagctacagctgcaagcgcaaggacaatctcaacctgcacaagaagctgaagcacgccccacgccagaccttcagctgcgaagagtgcctgttcaagaccacacaccctttcgtcttcagccgccacgtcaagaagcaccagagtggggactgccccgaggaggacaagaagggcctgtgtccagcccccaaggaaccggccggcccgggggccccgctcctggtggtcgggagctcccggaatctcctgtctcccctgtcagttatgtctgcctcccaggctctgcagaccgtggccctgtcggcagcccacggcagcagctcagagcccaacctggcactcaaggctttggccttcaacggctcccctttgcgctttgacaagtaccggaactcagattttgcccatctcattcccttgacaatgttataccccaagaaccacttggatctcacattccaccctccccgacctcagactgcgcctcccagcatcccctcacccaaacactccttcctggcctatctcggactgagagaaagagcagagactgtctgagggcagccatgttctgtaccaaaaacagagagacaaaagac

SEQ ID NO: 1134 - DNA, 2320 bp, Homo sapiens
agtgtcagagccgcccccagccgggcgggcgcctcagccatggccctgcgcaaggaactgctcaagtccatctggtacgcctttaccgcgctggacgtggagaagagtggcaaagtctccaagtcccagctcaaggtgctgtcccacaacctgtacacggtcctgcacatcccccatgaccccgtggccctggaggaacacttccgagatgatgatgacggccctgtgtccagccagggatacatgccctacctcaacaagtacatcctggacaaggtggaggagggggcttttgttaaagagcactttgatgagctgtgctggacgctgacggccaagaagaactatcgggcagatagcaacgggaacagtatgctctccaatcaggatgccttccgcctctggtgcctcttcaacttcctgtctgaggacaagtaccctctgatcatggttcctgatgaggtggaatacctgctgaaaaaggtactcagcagcatgagcttggaggtgagcttgggtgagctggaggagcttctggcccaggaggcccaggtggcccagaccaccggggggctcagcgtctggcagttcctggagctcttcaattcgggccgctgcctgcggggcgtgggccgggacaccctcagcatggccatccacgaggtctaccaggagctcatccaagatgtcctgaagcagggctacctgtggaagcgagggcacctgagaaggaactgggccgaacgctggttccagctgcagcccagctgcctctgctactttgggagtgaagagtgcaaagagaaaaggggcattatcccgctggatgcacactgctgcgtggaggtgctgccagaccgcgacggaaagcgctgcatgttctgtgtgaagacagccacccgcacgtatgagatgagcgcctcagacacgcgccagcgccaggagtggacagctgccatccagatggcgatccggctgcaggccgaggggaagacgtccctacacaaggacctgaagcagaaacggcgcgagcagcgggagcagcgggagcggcgccgggcggccaaggaagaggagctgctgcggctgcagcagctgcaggaggagaaggagcggaagctgcaggagctggagctgctgcaggaggcgcagcggcaggccgagcggctgctgcaggaggaggaggaacggcgccgcagccagcaccgcgagctgcagcaggcgctcgagggccaactgcgcgaggcggagcaggcccgggcctccatgcaggctgagatggagctgaaggaggaggaggctgcccggcagcggcagcgcatcaaggagctggaggagatgcagcagcggttgcaggaggccctgcaactagaggtgaaagctcggcgagatgaagaatctgtgcgaatcgctcagaccagactgctggaagaggaggaagagaagctgaagcagttgatgcagctgaaggaggagcaggagcgctacatcgaacgggcgcagcaggagaaggaagagctgcagcaggagatggcacagcagagccgctccctgcagcaggcccagcagcagctggaggaggtgcggcagaaccggcagagggctgacgaggatgtggaggctgcccagagaaaactgcgccaggccagcaccaacgtgaaacactggaatgtccagatgaaccggctgatgcatccaattgagcctggagataagcgtccggtcaccagcagctccttctcaggcttccagccccctctgcttgcccaccgtgactcctccctaaagcgcctgacccgctggggatcccagggcaacaggaccccctcgcccaacagcaatgagcagcagaagtccctcaatggtggggatgaggctcctgccccggcttccacccctcaggaagataaactggatccagcaccagaaaattagcctctcttagccccttgttcttcccaatgtcatatccaccaggacctggccacagctggcctgtgggtgatcccagctcttactaggagagggagctgaggtcctggtgccaggggcccaggccctccaaccataaacagtccaggatggaacctggttcacccttcataccagctccaagccccagaccatgggagctgtctgggatgttgatccttgagaacttggccctgtgctttagacccaaggacccgattcctgggctaggaaagagagaacaagcaagccggggctacctgcccccaggtggccaccaagttgtggaagcacatttctaaataaaaactgctcttagaatgaaaaaaaaaaaaaaaaaaaaaaaaaa

SEQ ID NO: 1135 - DNA, 1340 bp, Homo sapiens
ggcacaagggggcgctttagggactggacttgcagtgtaaacagagacgctgcaaattgcttgtggacggtgtaggccgctgcaggccaccatgaaccggcttccggatgactacgacccctacgcggttgaagagcctagcgacgaggagccggctttgagcagctctgaggatgaagtggatgtgcttttacatggaactcctgaccaaaaacgaaaactcatcagagaatgtcttaccggagaaagtgaatcatctagtgaagatgaatttgaaaaggagatggaagctgaattaaattctaccatgaaaacaatggaggacaagttatcctctctgggaactggatcttcctcaggaaatggaaaagttgcaacagctccgacaaggtactacgatgatatatattttgattctgattccgaggatgaagacagagcagtacaggtgaccaagaaaaaaaagaagaaacaacacaagattccaacaaatgacgaattactgtatgatcctgaaaaagataacagagatcaggcctgggttgatgcacagagaaggggttaccatggtttgggaccacagagatcacgtcaacaacagcctgttccaaatagtgatgctggtcttgaattgtcctgcctgcatgaccacactcttgccttgattgccaaaggcatgaatcatacaaaaactcaatatagagcaatgtttgtaatgaattgttctattaacaaagaggaggttctaagatataaagcctcagagaacaaggaagaaaaggcgggtccataagaagatgaggtctaaccgggaagatgctgccgagaaggcagagacagatgtggaagaaatctatcacccagtcatgtgcactgaatgttccactgaagtggcagtctacgacaaggatgaagtctttcattttttcaatgttttagcaagccattcctaaacagcccaactggcatttaattacccaatactgtatataaggcaaatatggacagttactttcctcttgcctgttcatatccttcagtgacattgaggaagcagtgtttctctttttaaaggagaatagttgtcaaccttcattcatctcttacatctctcaccctctccttttttttttctttgattttcccccttattgatgggactgatattcattctgtttttgatgaacatttggaaactgtcgggctttttattaaagctctgtagaattaaaatgttctggaattataagcaatctttgtttctgagtgttatttttattttggatatagctttgatgtaattaaactggaaactctttcctgaattgtctgtaaaaaaa

SEQ ID NO: 1136 - DNA, 6134 bp, Homo sapiens
gctggctgggaagatggcggcgggaacctgggccgccgccgccgccgccgccgccgccgcggagcgaaccaggggtgtccggggtgcgcggtccagggccggggccgggccatgagcgcgccgtcctcgagtccccgagccgcggagcccgcccgcgcccctcgggccgccccgcgtccctcgccatggcgcggctcgcggactacttcgtgctggtggcgttcgggccgcacccgcgcgggagtggggaaggccagggccagattctgcagcgcttcccagagaaggactgggaggacaacccattcccccagggcatcgagctgttttgccagcccagcgggtggcagctgtgtcccgagaggaatccaccgaccttctttgttgctgtcctcaccgacatcaactccgagcgccactactgcgcctgcttgaccttctgggagccagcggagccttcacaggaaacgacgcgcgtggaggatgccacagagagggaggaagagggggatgagggaggccagacccacctgtctcccacagcacctgccccatctgcccagctgtttgcaccgaagacgctggtactggtgtcgcgactcgaccacacggaggtgttcaggaacagccttggcctcatctatgccatccacgtggagggcctgaatgtgtgcctggagaacgtgattgggaacctgctgacgtgcactgtgcccctggctgggggctcgcagaggacgatctctttgggggctggtgaccggcaggtcatccagactccactggccgactcgctgcccgtcagccgctgcagcgtggccctgctcttccgccagctaggcatcaccaacgtgctgtctttgttctgtgccgccctcacggagcacaaggttctcttcctgtcccggagctaccagcggctcgccgatgcctgtaggggcctcctggcactgctgtttcctctcagatacagcttcacctatgtgcccatcctgccggctcagctgctggaggtcctcagcacacccacgcccttcatcattggggtcaacgcggccttccaggcagagacccaggagctgctcgatgtgattgttgctgatctggatggagggacggtcaccattcctgagtgtgtgcacattccacccttgccagagccactgcagagtcagacgcacagtgtgctgagcatggtcctggacccggagctggagttggctgacctcgccttccctccgcccacgacatccacctcctccctgaagatgcaggacaaggagctgcgcgcggtcttcctgcggctgttcgctcagctgctgcagggctatcgctggtgcctgcacgtcgtgcgcatccacccggagcctgtcatccgcttccataaggcagccttcctgggccagcgtgggctggtagaggacgatttcctgatgaaggtgctggagggcatggcctttgctggctttgtgtcagagcgtggggtcccataccgccctacggacctgttcgatgagctggtggcccacgaggtggcaaggatgcgggcggatgagaaccacccccagcgtgtcctgcgtcacgtccaggaactggcagagcagctctacaagaacgagaacccgtacccagccgtggcgatgcacaaggtacagaggcccggtgagagcagccacctgcgacgggtgccccgacccttcccccggctggatgagggcaccgtgcagtggatcgtggaccaggctgcagccaagatgcagggtgcacccccagctgtgaaggccgagaggaggaccaccgtgccctcagggccccccatgactgccatactggagcggtgcagtgggctgcatgtcaacagcgcccggcggctggaggttgtgcgcaactgcatctcctacgtgtttgaggggaaaatgcttgaggccaagaagctgctcccagccgtgttgagggccctgaaggggcgagctgcccgccgctgcctcgcccaggagctgcacctgcatgtgcagcagaaccgtgcggtcctggaccaccagcagtttgactttgtcgtccgtatgatgaactgctgcctgcaggactgcacttctctggacgagcatggcattgcggcggctctgctgcctctggtcacagccttctgccggaagctgagcccgggggtgacgcagtttgcatacagctgtgtgcaggagcacgtggtgtggagcacgccacagttctgggaggccatgttctatggggatgtgcagactcacatccgggccctctacctggagcccacggaggacctggcccccgcccaggaggttggggaggcaccttcccaggaggacgagcgctctgccctagacgtggcttctgagcagcggcgcttgtggccaactctgagtcgtgagaagcagcaggagctggtgcagaaggaggagagcacggtgttcagccaggccatccactatgccaaccgcatgagctacctcctcctgcccctggacagcagcaagagccgcctacttcgggagcgtgccgggctgggcgacctggagagcgccagcaacagcctggtcaccaacagcatggctggcagtgtggccgagagctatgacacggagagcggcttcgaggatgcagagacctgcgacgtagctggggctgtggtccgcttcatcaaccgctttgtggacaaggtctgcacggagagtggggtcaccagcgaccacctcaaggggctgcatgtcatggtgccagacattgtccagatgcacatcgagaccctggaggccgtgcagcgggagagccggaggctgccgcccatccagaagcccaagctgctgcggccgcgcctgctgccgggtgaggagtgtgtgctggacggcctgcgcgtctacctgctgccggatgggcgtgaggagggcgcggggggcagtgctgggggaccagcattgctcccagctgagggcgccgtcttcctcaccacgtaccgggtcatcttcacggggatgcccacggaccccctggttggggagcaggtggtggtccgctccttcccggtggctgcgctgaccaaggagaagcgcatcagcgtccagacccctgtggaccagctcctgcaggacgggctccagctgcgctcctgcacattccagctgctgaaaatggcctttgacgaggaggtggggtctgacagcgccgagctcttccgtaagcagctgcataagctgcggtacccgccggacatcagggccacctttgcgttcaccttgggctctgcccacacacctggccggccaccgcgagtcaccaaggacaagggtccttccctcagaaccctgtcccggaacctggtcaagaacgccaagaagaccatcgggcggcagcatgtcactcgcaagaagtacaacccccccagctgggagcaccggggccagccgccccctgaggaccaggaggacgagatctcagtgtcggaggagctggagcccagcacgctgaccccgtcctcagccctgaagccctccgaccgcatgaccatgagcagcctggtggaaagggcttgctgtcgcgactaccagcgcctcggtctgggcaccctgagcagcagcctgagccgggccaagtctgagcccttccgcatttctccggtcaaccgcatgtatgccatctgccgcagctacccagggctgctgatcgtgccccagagtgtccaggacaacgccctgcagcgcgtgtcccgctgctaccgccagaaccgcttccccgtggtctgctggcgcagcgggcggtccaaggcggtgctgctgcgctctggaggcctgcatggcaaaggtgtcgtcggcctcttcaaggcccagaacgcaccttctccaggccagtcccaggcggactcgagtagcctggagcaggagaagtacctgcaggctgtggtcagctccatgccccgctacgccgacgcgtcgggacgcaacacgcttagcggcttctcctcagcccacatgggcagtcacggtaagtggggcagtgtccggaccagtggacgcagcagtggccttggcaccgatgtgggctcccggctagctggcagagacgcgctggccccaccccaggccaacgggggccctcccgacccgggcttcctgcgtccgcagcgagcagccctctatatccttggggacaaagcccagctcaagggtgtgcggtcagaccccctgcagcagtgggagctggtgcccattgaggtattcgaggcacggcaggtgaaggctagcttcaagaagctgctgaaagcatgtgtcccaggctgccccgctgctgagcccagcccagcctccttcctgcgctcactggaggactcagagtggctgatccagatccacaagctgctgcaggtgtctgtgctggtggtggagctcctggattcaggctcctccgtgctggtgggcctggaggatggctgggacatcaccacccaggtggtatccttggtgcagctgctctcagaccccttctaccgcacgctggagggctttcgcctgctggtggagaaggagtggctgtccttcggccatcgcttcagccaccgtggagctcacaccctggccgggcagagcagcggcttcacacccgtcttcctgcagttcctggactgcgtacaccaggtccacctgcagttccccatggagtttgagttcagccagttctacctcaagttcctcggctaccaccatgtgtcccgccgtttccggaccttcctgctcgactctgactatgagcgcattgagctggggctgctgtatgaggagaagggggaacgcaggggccaggtgccgtgcaggtctgtgtgggagtatgtggaccggctgagcaagaggacgcctgtgttccacaattacatgtatgcgcccgaggacgcagaggtcctgcggccctacagcaacgtgtccaacctgaaggtgtgggacttctacactgaggagacgctggccgagggccctccctatgactgggaactggcccaggggccccctgaacccccagaggaagaacggtctgatggaggcgctccccagagcaggcgccgcgtggtgtggccctgttacgacagctgcccgcgggcccagcctgacgccatctcacgcctgctggaggagctgcagaggctggagacagagttgggccaacccgctgagcgctggaaggacacctgggaccgggtgaaggctgcacagcgcctcgagggccggccagacggccgtggcacccctagctccctccttgtgtccaccgcaccccaccaccgtcgctcgctgggtgtgtacctgcaggaggggcccgtgggctccaccctgagcctcagcctggacagcgaccagagtagtggctcaaccacatccggctcccgtcaggctgcccgccgcagcaccagcaccctgtacagccagttccagacagcagagagtgagaacaggtcctacgagggcactctgtacaagaagggggccttcatgaagccttggaaggcccgctggttcgtgctggacaagaccaagcaccagctgcgctactacgaccaccgtgtggacacagagtgcaagggtgtcatcgacttggcggaggtggaggctgtggcacctggcacgcccactatgggtgcccctaagactgtggacgagaaggccttctttgacgtgaagacaacgcgtcgcgtttacaacttctgtgcccaggacgtgccctcggcccagcagtgggtggaccggatccagagctgcctgtcggacgcctgagcctcccagccctgcccggctgctctgcttccggtcgttaccgaccactaggggtgggcagggccgccccggccatgtttacagccccggccctcgacagtattgaggccccgagcccccagcacttgtgtgtacagcccccgtccccgccccgccccgcccggccggccctaacttattttggcgtcacagctgagcaccgtgccgggaggtggccaaggtacagcccgcaatgggcctgtaaatagtccggccccgtcagcgtgtgctggtccagccagcggctgcaggcgagtttctagaaccagagtctatataaagagagaactaacgccaaaaaaaaaa

SEQ ID NO: 1137 - DNA, 5621 bp, Homo sapiens
gccttttccctccggctcgggagcgtctcgcttgcgccccgggcccgcggcgcccgcgcggctgcgagcctcgggtggccgcgtgccggctccaggaagccggagagggcgcggcggccaggatggcgcggcacgggccgtgcggctagacgggagccgagggaaccgccggctcgcgccctccgttctttcccggagccggcttcacgcagggccgggaacggccgtgcctctgggatccgccttcgctgacgccgggcacctacctggacgcgagcgagcgagatgcccaaccccaaaaacagcaaaggcggccgcaaaaacaagcgcgccaacagcagcggcgacgagcaggaaaatggagccggggccctggcagcggcgggcgcggcgggagcggcggccgggggggccctggcggcggcggccggttgcggggcggcggcggcgggcgcgccgggcgccggaggcgcggcgggcgccggaggcgcggggactggcgccgcgaacgctgcggccgccgcgggggctgcggccgcgggcgatgccaaaaacgaagccccatgtgccactcccctgatctgcagcttcggtaggccggtggacctggagaaggacgactaccagaaggtggtgtgcaacaacgagcactgcccctgcagcacctggatgcacctgcagtgcttctacgagtgggagagcagcatcctcgtccagttcaactgcatcggccgcgcgcgcagctggaacgagaagcaatgccgccagaacatgtggacaaagaagggctacgacctggccttccgcttctgctcttgccgctgtggccagggccacttgaagaaggacacagactggtatcaggtgaagcggatgcaggacgagaaaaagaagaagtctggctccgagaagaacacagggaggcctcctggtgaggcggcggaggaggcaaaaaagtgcaggcccccaaataagccccagaaaggcccaagccacgacctcccccgccggcattccatggaccggcagaactcccaggagaaggcagtgggtgccgcagcctacggtgcccgttcccccggtggctccccgggccagtccccacccacgggctactccatcctctctcctgcccacttcagcggcccccgctcctccagatacctcggggagttcttaaagaacgccatccatctggagcctcacaagaaggccatggctgggggccatgtgttcagaaatgcccactttgattacagccctgcggggttggcagttcacagggggggacacttcgacacccccgtgcagttccttcggcggctggacctctccgaactcctcactcacatccccaggcataagctgaacactttccacgtgcgcatggaagacgatgcccaagtgggccagggggaagacttgcggaagttcattctggccgcgctcagtgccagccacagaaacgtggtaaactgtgccctgtgccaccgggcgctcccggtgttcgaacagttcccactggtggatggaactttgttcctaagcccgtcgagacatgatgagatcgaatatgatgttccttgtcaccttcaagggagactcatgcatctgtatgccgtgtgcgtggactgcctggaaggggttcacaagatcatctgcatcaagtgtaagtcacggtgggatggcagctggcaccagctgggcactatgtacacctacgacatcctggctgcctctccatgttgtcaggcccgcctgaactgtaagcactgtgggaagccggtgatcgacgtgaggatcgggatgcagtacttctccgaatatagcaacgtccagcagtgtccacactgtgggaacctggactaccacttcgtgaagccattttcctccttcaaagttctcgaagcttattgatgaaagctttgctttagtaatagctattttattgatattattactttattacatatcttttatagggaaacattctgtgacattaatttcctttctaatttaaaggagagttactttgttgtatgtgtgccactaaaataggggctgcccttgccctgtcttgattcccgagtgttaatctgtggttttgaccagagcccagatgggtaatcctgtgcatttgggttggggttcactcttaccaagaatctttgatgcagctttaagatggtggggaggatggggtgaatttaggaaaggaatttgtggttataaactaagagcttgataggagttggaaggaaactcttactaaaatgttaactttctaaaaaccttcttttagatcttccttgggcctttggaaaaatatgtgacaagtgaatgtaagtctgtgcctggagagctaatagtgcattagtctatctcagcctagtgttctgcagcacacatgggcaggcagtttactcacactgacaggtgacctgaaagtggcacaagtgctgtttctatcactattgtaatttgccagttcatttttcatgctgaaagtaatatccaaattgtaagacatatgaaagatattagtgttgcaaatatgtttaggtaaactgacctataacagaatatgtgaaatgaatttggaaataatgcaagaaggcagaactcaatcatttaaattgtgtctttgaagttggtaatatagcttttaaggagaacccatgaataacctgatttgggcagtgatgatttattacaggttgcactgttgaagtgtcatttggtgtcaggttcttctcacaggtaaatctttcagccacagaatctaactggtgagcttcagaaccaataattgccacatttattgtcctcaaaattgcttatggccatgtataaccaattaattctgagtttccaaaatcaaagatttgaccttaagagggaagggaaaaaagtgtgaaaggatgatgaagaaaataattttactatttcttttaaaagtatgttttggaaaatcaatgattttaatgcatagcagtatgtttgaaaaatagaccattctaaaaagcccatgataccttactgttgatgaaaaaggatgatcatatatatagaacttgattagtcagagcattgggcattccaaaatacagcctttggttcagtagattttaatgctttaaatagactgacgtcgcatacccttatagaattggaatatgatttctcaaaaattaatttgataatttcatgtatgatgtgcatatatgctaaaagaatgcagaaaatcattttatgaatagccaaatttggggttgatgtgaacattttatgttactcatttggtttatacttttttttttttttttttaactgtgtggtttttcttttcagaagtatttaggcaatattgcacgtgagtttcagttctttttttcttttttttgagatggagtctcactcttgtcacccaggctggagtgcagtagtgcgatctcagctcactgcaacctctgcctcctggattcaagcgattctcctgtcccagcctcccaggtagctgggactataggcacgtgccaccacacccggctaattttttgtatttttagtagagacagcgtttcaccatgttagctaggatggtctagatctcctgaccttgtgatctgcctgcctcggcctcccaaagtgctgggattacaggcgtgagtcactgtgcctggccaagtttcagttctatatgaagtatttgatgttttgtttgaaacaatacagcattaaagaaccaatgttattcactaatatcattcatctttcagtttggatgatttggtttgctgcatctaggttggtgtttgatcatctgaaaaaacatttcagtgggaagaaatgcataaaatgcctataagaagtagaaagtcattgaactgacagtgtttgatgcaactaaaagaggattgtaagacatagctttctgcaaacttgtctttaatgcacaaagctgtagtggtgaattaactatctccttattgattctctcctgtacccagatgcaaaaagtgctaagtttctcttgtcctcgtaataccatttggattttatttctgaatttaaatagtaaaatatttatgatgctgatctttaacccacctaaaattttatagtgaaacctgctttatattgttgttctgaagcttacaattgacctatacattgcattcagcaagctcctgaatttagaactgccgtcagtgtagtgtatgctgtgttccatgttgcctttttagatggctttctaccccctgaacaataaataggatgaggttttactgtaattgggtaaagtttactcttggacattatttcgatgctaaagtaaggattctgtggatgttacttaaagagaaaagcataagagcatgaagcatatctgggaatatcttttgcctttaagacgattcattcttgtctagagggaaaatctggctgatttgggaataaaatataatcgaatattcaacaccatgaagataaatcttattttggaaatctactgaccttaataccccaagcttgccctgaatactttgattggaattggaatatatcaaaaaaggttagtatttttgttgtagttaggatactaaaaggatattagttacccaagagatccaatttgtttttctgatgaatagtgttcagtaaaatgaagcagtcttaagagtgactaataatttcaaagtgatttttcgtctattcttaatattttttaattatttatttttaagagttttataccttgagcagatacaatgatctgctttagtgagaggacaatttctgattgattgttttctcttcaggccatctcacctcttcattctcttgttacatttgaagcagttgatataatgggtttatactttaaaagatagacatggtgccatgaagttggggagttgggtgaattatcccattctagttacagaggagctttccttaaatgccctttaacttctaggttttgttcaagaagttcattttctgagtaaaaggtattttcatatatgttgggggaaaattaactcatctaaaaagaatcttattaggtatttgaactctaaaactaacagataagacagatatgtaccttattagagcaccagaactaatttgctaagtcttttgtttagtcctgcaagactgatgcttaatacacagtctgttctcctgtgtctaggtcaggaactccagtttgcttttctgttttgtgtcctggtagcagctgttgagtaactttcattggaggttgggaaggaagtgaggagaaagtgttcttgtttagtgttttatttcctataataggatgctgcctaacccagttcatctctatgtcctgttcactgaatattccgggtaattgaaagaaaatataatggatgggctccattaaaaccagctcaaaaataaattcttgtcagtaaagatttcttgtcaagatgtcttggattgcacttttgttgaggaaagacagtgtaaatagttaaagaatgttgataaaattgaaacatttggttgtggaattgtgtgtggttttagagggtttctgtttgtgaaatgtatgtattaaaaataataaaattccagaaactaacattgta

SEQ ID NO: 1138 - DNA, 728 bp, Homo sapiens
cctcgccccgcctacgcgggaacccaaccgcggcgaccggacgtgcactcctccagtagcggctgcacgtcgtgcaatggcccgctatgaggaggtgagcgtgtccggcttcgaggagttccaccgggccgtggaacagcacaatggcaagaccattttcgcctactttacgggttctaaggacgccggggggaaaagctggtgccccgactgcgtgcaggctgaaccagtcgtacgagaggggctgaagcacattagtgaaggatgtgtgttcatctactgccaagtaggagaaaagccttattggaaagatccaaataatgacttcagaaaaaacttgaaagtaacagcagtgcctacactacttaagtatggaacacctcaaaaactggtagaatctgagtgtcttcaggccaacctggtggaaatgttgttctctgaagattaagattttaggatggcaatcatgtcttgatgtcctgatttgttctagtatcaataaactgtatacttgctttgaattcatgttagcaataaatgatgttaaaaaaactggcatgtgtctaaacaatagagtgctattaaaatgcccatgaacctttagtttgcctgtaatacatggatatttttaagatataaagaagtcttcagaaatagcagtaaaggctcaaaggaacgtgattcttgaaggtgacggtaatacctaaaaactcctaaaggtgcagagc

SEQ ID NO: 1139 - DNA, 7689 bp, Homo sapiens
tcccacagtgcctggcccagaagccttgctaaatatttgaacaggattgcccaatacttttctgctgtgagaatgtaagatggatccagaagagcaggagctcttaaatgattacagatacagaagctactcttcagtgattgaaaaggctttgagaaattttgagtcctcgagtgaatgggcggatctcatatcttcacttggcaaactcaacaaggctcttcagagtaacctgaggtactccttgttgccaagacggctcctcatcagcaaaagattagctcagtgtttgcaccctgccctgcccagtggtgtccacttaaaagctctggaaacctacgagattatctttaaaatcgtggggaccaaatggctggccaaggacttgtttctgtacagctgcgggttatttcctctcctggcacacgcggcggtgtcggtgaggccggtgctgctcaccctgtacgagaagtacttcctcccactgcagaagctgctcctgcccagtctgcaggccttcatcgtgggcctgctgcccggccttgaagagggctccgagatctccgacagaacggatgctctgctcctgagactgtcgctggtggttggcaaagaggtgttttacaccgccctctgggggagcgtcctggccagcccgtccatccgcctccctgcctcagtcttcgtggtgggccacatcaacagggatgcccccggccgggagcagaagtacatgctggggaccaatcaccaactcacggtgaagtctttgcgtgcctccctgttggactcaaatgttcttgtgcaaagaaataatctggaaatcgttctgtttttcttcccattttatacctgtctggattccaatgagagagccatccccctcctcagatctgacatcgtgcgcattctctcagccgccacccagaccctactgagaagggacatgtccctgaacagaagactgtatgcatggttactaggctcagacataaaaggaaataccgttgtgccagaatctgaaatctcaaattcttatgaagaccagtcgtcttatttttttgaaaaatactccaaggatcttttagttgagggtttggctgagatattgcatcagaagttcatagatgctgacgtggaggaacgccatcatgcatacctgaagccttttcgcgtcctcatcagtctgcttgacaagccagaaatagggcctcaagtggttgggaatttgtttctcgaagtcatcagggccttttattcttactgcagagatgcccttggctctgatcttaaacttagctacacccagagtggaaattcgctgataagtgcaatcaaggaaaacagaaatgcctctgagattgtcaaaacggtaaatttgctgataacttctctaagcacagactttctctgggattatatgacaaggtgttttgaggaatgctttagaccagtgaagcagcgttacagcgtgaggaacagcgtcagccctccccccacggtctcggagctctgcgccctcctggtcttcctgctggatgtcattcctttggaactttactctgaggtgcaaacccagtatctccctcaggtgctcggctgcctggtgcagcctcttgctgaggacatggaggccttaagtttacctgaactcacgcatgccttgaagacgtgtttcaaggtgctcagcaaagtccagatgcctccttcctacctcgacacggagtccaccagcggaacctcgagtccagtaaaaggtgaaaacggcaaaataattttggaaacaaaggcagtgattcccggtgacgaagatgcttcgtttccccctctgaagtctgaggacagtgggatcgggctcagtgcctcgtcaccggagctctctgagcacttgagggttcctcgagtttctctggaaagggacgacgtttggaagaagggcgggagcatgcagaggacgtttctttgcatccaagagctaatcgccaactttgccagcaagaacatttttggagtacagctgacagcgtcaggagaagaaagcaagtccgaggagcctgcagggaagagggacagggatgggacgcagagcctggcagccaatgattccagcaggaagaactcttgggagcccaagcccatcactgtgcctcagttcaagcagatgctgtcagacttgttcacagcacgagggtctccattcaagacaaaaagttcagagtcaccatcgtcttcgcccagcagccctgccaggaaaaacgggggagaatgggatgttgagaaggtggtcattgacctggggggttccagggaggaacgcagggaggcctttgccgccgcctgccacctgctgctggattgtgccactttccctgtctacctgtccgaggaagagaccgagcagctctgtgcaacgctcttccagctgccaggagccggtgattccagttttccatcttggctgaagtccctcatgactatttgctgctgtgtgactgactgctacctccagaacgtggccatttccactctgctggaagtgataaaccattcccagtccctggcgcttgtcattgaagacaagatgaaacgctataagagctctggacacaaccctttttttggcaagctgcagatggtgacggttcctcccattgctccagggatattgaaagtcattgcagagaaaacagatttctatcagagggtggctcgcgtgctttggaatcagctgaacaaagagacccgggagcatcacgtcacctgcgtagaattgttctaccggctgcactgcctggcccctacggccaacatctgcgaggacatcatctgccatgccctcctggaccctgacaagggaacaaggctggaagctctgtttagattttccgtgatctggcatctgacaagagagatccaaggcagtcgagtaacatctcacaatcgctcctttgataggtccttgtttgtcgtgctggacagcctggcctgcacggatggtgccatcggtgcggcagcccagggctggctggtgcgtgcgctctccctcggggacgtggctcgcatcctcgaacccgtgctcctgctgctgctgcagccaaaaacccagagaacctccatccactgcctcaagcaggagaactcggccgatgacttgcaccgttggtttaacaggaagaaaacctctttcagagaggcatgcgcagtgcccgagcctcaggagagcggctctgaagagcacctgcctctgagccagttcaccacagtggaccgtgaagccatttgggccgaagtggagaaggagcccgagaagtacccgctgcgaggcgagctgagcgaggaagagctgccctactacgtggagcttccagacaggacggcccacggcgccccggacagcagcgagcacaccgagtctgcagatacaagctcctgccacacggacagcgagaacacgtcctccttctcctccccttcccacgacctgcaggagctgagcaacgaagagaactgctgtgcacccatccccatggggggcagggcgtaccccaagcgctcggccctgctggcggccttccagtcagaaagcttcaaggctggggccaagttaagcctggtgcgggtggactcggacaagacgcaggcttctgagtcgttctccagcgacgaggaggcggacttggagctccaggccctcaccacatccaggctgctaaagcagcagcgggaaaggcaggaggccgtcgaggccttgttcaagcacatcctgctctacctgcagccctacgactctcggcgggtcctctatgccttctcggtgctggaggctgtgctcaaaaccaaccctaaggaattcatcgaggctgtgtccaggactagcatggataccagctccaccgcgcacctcaacctcatctccaacctcctcgctcgccaccaggaggccctcattggccagagtttctacggaaagctccagacccaggtccccaacgtgtgcccccactctctgctcctggagctgctcacctacctctgcctgagcttcctgcgctcctactacccttgctatttgaaggtctcgcaccgagacattctcggcaaccgggacgtgcaggtcaaaagtgtcgaggttttgatcaggataatgatgcagctggtctcagtggccaagtcttcggaagggaagaacgtggagttcatccacagcttgctgcagaggtgcaaagttcaggagtttgtcctgctctccctgtcggcgtccatgtacacgagccagaagcgctacgggctggccaccgcccaccacggcagggccctgccagaggacagcctctttgaggagagtctcattaacttgggtcaggaccagatctggagtgagcacccgctgcagattgagctgctgaagctgctgcaggtgctgattgtcttggaacaccacctgggtcgggcccatgaggaggcggaaaaccagcccgacctgtcccgggagtggcagagagccctgaacttccagcaggccatcagcgccctgcagtacgtgcagccccaccccctcacctcccagggtcttctggtctctgcggtggtgaggggtctgcagcccgcctacggttacggcatgcatccggcctgggtgagcttggtcacgcattccttgccctacttcggaaagtccctgggctggacggtgacaccctttgttgtccagatttgcaaaaacttggatgacttggtcaagcagtatgaaagcgaatctgtgaagctctctgtcagcacaacctccaagagggaaaacatttctccagattatccactcacccttctagaaggtctaacgaccattagtcatttttgtcttttggaacaagccaaccaaaacaaaaagaccatggctgcaggtgatcctgccaacttgaggaatgccagaaatgccattttggaagagctgcctcgaactgttaacaccatggcccttctctggaatgttctcagaaaggaggagactcaaaagagacctgtcgatctcctaggggccacgaagggatcctcttccgtttactttaaaaccaccaaaaccataagacaaaaaattttagacttcttaaaccccttgacggcccatcttggggttcagttgacagcggctgttgcggcagtgtggagcagaaagaaagcccagcgtcacagtaagatgaagattatcccaacggcaagtgcatcccagctaacccttgtcgacttggtgtgtgcactcagcaccctgcagactgacacgctgctgcacctggtgaaggaggtggtgaagaggccaccccaagtcaaagggggtgatgagaaatcgcccctagtggacattcctgtgttgcagttttgctatgcttttctccaaaggctcccagtaccagccttgcaagagaacttttcttcactgttgggagtattgaaagagtctgtacagttgaatctagccccacctgggtattttctgcttctcagcatgctgaatgactttgtaacaagaactcccaacctggaaaacaagaaggaccaaaaagacctgcaggaaatcactcagaaaatcctagaagctgtggggaacattgccggctcttccttggagcaaaccagctggctaagcagaaacctggaagtgaaggcccaacctcaggcctctctagaagaatctgatgctgaggaggacctgtatgatgctgctgcagcttcagcaatggtgtcttcatccgccccgtcggtgtacagcgtgcaagccctctctctcctggcagaggtactggcttccctcctggacatggtttatcgaagtgatgagaaggagaaagctgtgccgttaatctcccgtctgctttactatgtttttccatacttacgcaaccacagtgcctacaatgctcccagcttccgggctggcgctcagctgctgagctccctgagtggctatgcctacacaaagcgagcctggaggaaggaggtcctggagctgtttctcgaccccgctttctttcagatggatacttcctgtgttcattggaagtccattattgaccatcttttgactcatgagaaaacaatgtttaaggatttaatgaacatgcagagcagttctttgaaactattctcaagttttgaacagaaagccatgctgttaaagcgccaggcttttgctgtcttcagtggagaacttgatcaataccacctttaccttccactgatacaagaacgcctgacagacaatctcagagttggacagacatccatagttgctgctcagatgtttctttttttcagagttttgctgctaagaatatctcctcaacatttgacttcattgtggccaataatggtctctgaattgattcagacattcacacagcttgaagaagatctaaaagatgaagatgagtcattgagaagcaccaacaaagtaaacagaacgaaagtttcagtcccggatgcaaatggaccctcagtgggggagataccccagagtgaactcatcttgtatttatcagcttgcaaattcttggacacagcgctttcttttccacctgacaagatgccattatttcaaatttataggtgggcatttattccagaagtggacacagagggccctgccttcctgtcggatgtagaggagaatcaccaagaatgcaaaccccacactgtcaggattctagaacttctaaaattaaagtttggggaaatcagtagctctgatgagatcaccatgaagagtgaattcccgcttctgcgccaacattctgtttccagcatcaggcagttgatgccattcttcatgactctaaatggtgcatttaagacccagagacagctgcctgctgatagcccaggaactccattcttggactttcctgtcacagatagcccaaggatcttaaaacaactggaagaatgcatcgaatatgattttctggaacatccagaatgttaaccatgtgagagagaatatgtttaatccatgtattggtactttactgaaaaccaggttatattctaaagaagaaagaaggcaggatagtgcttttgaacaagcctatttccattttgaaagtagatttcaggctaggtgcggtggctcacacctgtaatctcagcactttgggaggccaaggcaggcagatcacttgaggtcaggagttcgagaccagcctgaccaacatggtgagaccctgtctctactaaaaatacaaaaattagctgggtgtggtggcggcgcctgtaatcccagctacttgggaggctaaggcatgagaattgcttgaacccaggaggtggaggctgcagtgagccgagatcacgacactgcactccagctgtgtgacagaatgagaccatctccaaaaaaaaaaaaaagtagatttcagataatttactgttcagcaacaggacacacctccctaaatgccttgtaatatatttgaatctgattctgcatttcttcctcaatttatgtaatgaaaataaaattaatatatcatctaacagtagcacaaaatttgtaatatgaagtaaagtatgaagataatgaagaagttgttttctttgttgaagcagttatatgggtctttctcagtatatttctcttttctctaaaagtttaaacttattaaaagaatgttatttttaacctttcaaaaaaaaaaa

SEQ ID NO: 1140 - DNA, 1293 bp, Homo sapiens
tcagacaagcactggacgtggcggccattttgttttggacaccgagcaggagctggcggccgctgcagacgaaaggcaggaaagggcaggccgggtgagcagacggatcggccgactagacagccaaccagcaacaacgaactgagctcgcatactaccgcttacgcatctaaccaaccgcccatctagctaacccgagcccctccaccgtcaactcaggttcggccggtccccggcccgcctgccggagccgtggtggcagccccgggaggagcactggcgtctgtttccttcgattctcgggattcgaagatggctgcacagtcagcgccgaaagttgtgctaaaaagcaccaccaagatgtctctaaatgagcgctttactaatatgctgaagaacaaacagccgacgccagtgaatattcgggcttcgatgcagcaacaacagcagctagccagtgccagaaacagaagactggcccagcagatggagaatagaccctctgtccaggcagcattaaaacttaagcagagcttaaagcagcgcctgggtaagagtaacatccaggcacggttaggccgacccataggggccctggccaggggagcaatcggaggacgaggcctacccataatccagagaggcttgcccagaggaggactacgtgggggacgtgccaccagaaccctacttaggggcgggatgtcactccgaggtcaaaacctgctccgaggtggacgagccgtagctccccgaatgggcttaagaagaggtggtgttcgaggtcgtggaggtcctgggagagggggcctagggcgtggagctatgggtcgtggcggaatcggtggtagaggtcggggtatgataggtcggggaagagggggctttggaggccgaggccgaggccgtggacgagggagaggtgcccttgctcgccctgtattgaccaaggagcagctggacaaccaattggatgcatatatgtcgaaaacaaaaggacacctggatgctgagttggatgcctacatggcgcagacagatcccgaaaccaatgattgaagcctgcccatcctcccatgagagactcttgttagtcaacacatctgtaaataaccttgagataacagatgagaagaaatctgattgatgctggatggacctatcacaataggctgtggacttacttgccaccagcttgtgcatttagtgtgttccttttactttttgatactgtgttgtatgaaacccttttgtcctttgatttggttttttgtttttgtttttttagggggg

SEQ ID NO: 1141 - DNA, 7456 bp, Homo sapiens
cgcgcgcagctggtcggcccgcggcggtgctgcgcggatccggcgtcggggcccggcatggcgggggccggggccaagccgggccggacccggacctaaatgcctctgttcttctccgcgctgttggtcttgctgctagttgcgcttagcgccctctttctaggccggtggcttgtggtccggttggccaccaagtggtgtcagcggaagctgcaggcggagctaaagattggctccttccgctttttttggatccagaatgtcagtcttaagtttcagcaacaccagcaaacagtggaaattgataacctgtggatttccagcaaactccttagccatgatcttccacactatgtggcattgtgctttggagaagtgcgtatcagaacggacctacagaaagtttctgacctgtctgccccattctcccagagcgctggggtggatcaaaaggaactgtccttcagcccatccttattgaagatcttctgccaactattctccattcatgtagatgctataaacatcatggttctcaaggtggatacctctgagtccttatggcatattcagatcagtagaagcagatttcttttggatagtgatgggaaaaggctaatctgtgaggtgagcttatgtaagatcaacagcaaagttctaaagagtggtcagctggaggacacctgcctagtggagctttcactggccctggacctgtgtctaaaggtgggcattagcagtcggcatctcactgctatcactgtggatgtgtggacactccatgctgaactgcatgagggcctcttccagagccaactgctgtgccagggcccaagcctagcatctaagcctgttccctgttcagaggtgacagaaaacttagttgagccaactctgcctggcctattccttctccagcagctgccagaccaggtcaaggttaagatggagaacacaagcgtggtattgtccatgaatagtcaaaagaggcacctgacttggactctgaagctgctgcagttcctgtaccaccgtgatgaggatcagctgccccttcgaagcttcacagcaaactctgatatggcacagatgagcactgaactgctgctggaagatgggttgttgttgtcccagagtcgccaacgcattgtctgcctcaactccctcaaggctagtgtgcaggtgaccaccattgacctctcagcctccctagttctgaacacttgcatcattcactaccggcaccaggaattctctcactggctgcacctgctagcactggaaacccaagggtctagttcacctgttctaaagcaaaggaaaaaaagaaccttcccccaaatcctggctcccatcatctttagcacctccatctccaatgtcaacatttccattcaacttggagatacaccaccttttgccttgggattcaattctatctctctggattaccagcacctcaggccacaaagcatccatcagcggggcgtcctaactgtggaccacctctgctggcgtgtgggcagtgactcccacattcagcgggcgccacacccacccaatatgcatgtttggggtgaggcacttgttctggactccttcacactacagggtagctataaccagcctctgggcctgtccagcacccagtcagataccctttttcttgattgtaccattcgaggacttcaggtggaagcatcagatacctgtgcccaatgtctgtctcgtatcttatccctgatgggtccacaatctgggaagtcagctgtctctaggcactcttcatttggggaatctgtgtcattactgtggaaggtggacttgaaggtcgaagacatgaacttgtttaccctttctgccttggttggtgcttcagaggtacgactggacaccctaactatcctgggcagtgcagagacgtccactgtggggattcaaggacttgtgttagcgctggtgaaatcagtcacggagaagatgcaaccctgttgcaaggcccctgacatccctaccccagtgctcagcctttccatgctctccatcacctatcacagcagcatccgctctctggaggttcagtgtggtgcagggctgaccttactttggagccccccagatcacatgtacctgtaccagcatgtcctggccactctacagtgccgagacctactaagagccactgtgtttcctgagactgtaccatcccttgcactagagacttcaggaactacttctgagctagaaggccgtgcccctgagccattacccccaaagcggctgctaaacctaaccctggaggtgagcacagccaagctcacagcttttgtagctgaggacaagttcattaccctggctgcagagagtgtgtcactgagccggcatggaggttccctgcaggcatactgtccagagctggctgctggctttgatggcaatagtatcttcaacttcaaggaggtggaggtgcagctgctacctgagctggaagagatgatcctccaccggaaccccttccctgcgctgcagaccctccggaaccgtgtttggctcctctctttcggctcagtctcggtggagtttccttatcagtatgacttttctcgaactctagatgaggctgtgggagttcagaagtggctgaagggactacatcaagggactcgtgcttgggcctctccaagccctgtcccactcccacctgatctactcttaaaggttgagcacttctcatgggttttcttggatgatgtttttgaggtgaaacttcatgataactacgagctgatgaaggatgaaagtaaggagagtgccaaaagactacagctactggatgctaaagtggccgcccttcggaagcagcatggggagttgttgcctgcccgcaaaattgaggagctctatgcctctttggaacgcaaaaacattgaaatctacatccagcgttcccgtcgtctctatggcaacacacccatgcgccgggcactgcttacttggagcttagcagggctagaactggtagctctggcagatgcctccttccatggtcctgagcatgtggtagaacaggttcaagagcttgatccaggcagcccttttccccctgagggattagatcttgtcattcagtggtgtcgaatgctcaagtgcaatgtcaagagctttctggttcggatcagggactatccacggtacctgtttgagatccgtgactggcggctaatgggtcgacttgtgggcaccgagcagagtggtcagccttgctcccgtcggcgtcagatcttgcacttggggcttccgtggggtaacgtggcagtggagaggaacatgcccccactcaaattctaccatgactttcactcggaaatattccagtacacagtggtgtggggcccatgctgggatccagcctggacactaattggccagtgtgtggacctcttgaccaagccctcagctgaccccagcccacctttgccctggtgggacaagagccgtcttctgttccatggagactggcacatggacattgaacaggcgaacctgcaccagctggccactgaggatccatacaacacaactgaaaatatgcactgggagtggagccacctgtcttttcattggaaacctggtcagtttgtgttcaagggtgacttggatatcaacgtgagaacagcctctaagtatgacgactgctgcttccttcacctgcctgacctctgcatgacactggacctgcagtggctgtgccatgggaacccccatgatcaccatagtgtcactctgcgggccccagagttcctgcctgaggtgcccttgggccagcttcatgactcctaccgggcctttcgctcggagaacctcaatctctccatcaagatggatctgactcggcacagtggaacaatatcccagccccgaattctgctatatagtagtaccctgcgctggatgcaaaacttctgggcaacttggacaagtgtcacaaggcctatctgcaggggaaagctcttcaataacctgaaacccagcaagaagaaacttggtcagcactacaagcaactttcctatacagccctctttccccagctgcaggtacattattgggcctcatttgcccagcaacggggcatccagattgagtgcagtcagggccatgtcttcactcgggggactcagcggcttatacctcaagcaggcacagtgatgcggcgccttatctctgattggagtgttacccagatggtgagtgacctaagtcaggtgaccgttcacctgatggcctcacccactgaagagaatgctgatcactgtcttgatcccttggtaacaaagacccacctgctgagcttgtcctccctcacctaccaacggcatagcaatcgcacagctgaggaggagctctctgctcgtgatggggatcctacctttcatacacatcagctgcacttagtagatttacggatttcctggacaactaccaatcgagacattgcctttgggttatatgatgggtacaaaaaggcagctgtactcaaacgtaatctttctactgaggccctgaaggggttaaagattgatccacagatgccagccaaaaagccaaagcggggtgtcccaactagtgcctcagccccacctcgtgttaacactcccagcttcagtggacaacctgataaggggtcatcaggaggtgcttacatgttgcagaagctaattgaagagacagataggtttgtagtgttcacagaagaggaatcaggcatgagtgaccagttgtgtggcattgctgcctgccagacggatgacatatacaaccgaaactgccttattgaattggtcaactgtcagatggttcttcgtggagcagagacagaaggctgtgtcattgtgtcagctgccaaagcccaactgctgcagtgccagcaccatccagcctggtatggtgatacattgaagcaaaagacatcctggacttgcctcttggatggcatgcagtactttgccaccactgaaagcagccccacagagcaggatggccgacagctctggttagaggtgaagaatatcgaggagcaccggcagcgtagtctggactctgtgcaggagctgatggagagtgggcaggcagtgggcggcatggttaccacaaccacagattggaaccagccagctgaggcacagcaagcccagcaagtccagcggatcatttcgcgttgcaactgccgaatgtactatattagttacagccatgacattgatcctgaactagcaactcagattaagccacctgaagttcttgagaaccaggaaaaggaagatctcctaaagaagcaggaaggggctgtggataccttcacccttatccaccatgagctggaaatttccaccaacccagctcagtatgccatgatcctggacattgtcaacaacctgctgctccatgtagaacctaagcggaaggaacatagtgagaagaagcaacgggtcaggttccagcttgagatctctagcaatccagaggagcaacgcagcagcatactgcatttgcaggaggctgtgcggcagcatgtggcccaaatacgacagctggagaagcagatgtattctatcatgaagtctttgcaggatgacagcaagaatgagaatctgcttgacctgaaccagaagcttcagttgcagctaaaccaggagaaggccaacctgcagctggaaagtgaagaactgaatatcctcatcaggtgttttaaggatttccaactgcagcgggctaacaagatggagctgcgaaagcagcaagaagatgtgagtgtggtccgtcgcactgagttttactttgctcaggcacggtggcgcctgacagaggaagatggacagctgggaattgctgaattagaactgcagaggttcctctacagcaaggtgaataagtctgatgacacagcagaacatcttctggagttgggctggtttaccatgaacaacctcctccccaatgctgtctataaggtagtactgcggccccagagctcctgccagtctgggcgacagctagctctccgcctcttcagcaaagttcggccccctgttgggggtatctctgttaaggagcattttgaggtaaatgtggtgcctctcaccatccagctgacacaccagttcttccacagaatgatgggctttttctttcctggccgaagtgtggaagatgatgaagttggtgatgaagaggataagtccaaactggtgactactggaataccagtggtgaagcctcggcagctgattgcaacagatgatgcagtaccactgggccctgggaagggtgtggcacagggtttgactcggagttctggggtcagaaggtcatttcgcaaatcgccagagcaccctgtggatgacattgacaagatgaaagagcgagctgccatgaacaactccttcatctacataaagattccacaggttccactgtgtgtcagctacaagggtgagaagaacagtgtggactggggtgaccttaacctggtgctgccctgtctggagtaccacaacaacacatggacatggctagactttgccatggctgtcaaaagggacagccgcaaagccctggttgcccaggtaatcaaagagaagctaaggctgaagtctgcaacaggctctgaggtccggggaaagctagaaactaaatcggacctgaacatgcaacagcaggaagaggaggagaaagcccggctcctcattggtttaagtgtgggcgacaagaaccctggcaagaagtccatctttggcaggcgcaaatgatttggcgattcgagtggctgcagtacaggatctgactctggctcaggctccagggacttgtggggtgggaggggcttcccgttatccacgaggatttgtgggtgtcagagcccataggcatcactcttcagcacctggtctgttcgctgcagggcatggtggacagtaatgctgagttctgtctcacactgatcaggctcagggccagagaggcaacaagagagcaagacccagggaatgggcccagggcaggaccctattcccttggggtcaagtgaaagggtagggggatagtcctgatcaagtgtgataaatttttatagacatatataaatatatatatattatatatatatttctaagtgtaactgtccttcctctgtgccaggaaacgggagggggctgatcctctgatcctcactccactgtcatgtttgaaagaggtattggtgttctggagtgggggtcaacccctccccagtctctgtgctaagttcacttgggaggatggcagtaggagccagggctggccatgggtcccctacccttccccgtaggatataccctggagaatggcaaaatgatttaaagagaaaaaaaaagatattttaaatttgatgctcaaaaaaaaaaaaaaaaaaaaaaaaaa

SEQ ID NO: 1142 - DNA, 2671 bp, Homo sapiens
gggtgccgcgcctgtagcactcccggaactggaactaggtgccagacggtccggaggcgggggccacgtcagcggggccacccagggctcgcggggtcccggtgggtgccatgcggaggggcgcgcttctggcgggcgccttggccgcgtacgccgcgtacctggtgctgggcgcgctgttggtggcgcggctggaggggccgcacgaagccaggctccgagccgagctggagacgctgcgggcgcagctgcttcagcgcagcccgtgtgtggctgcccccgccctggacgccttcgtggagcgagtgctggcggccggacggctggggcgggtcgtgcttgctaacgcttcggggtccgccaacgcctcggaccccgcctgggacttcgcctctgctctcttcttcgccagcacgctgatcaccaccgtgggctatgggtacacaacgccactgactgatgcgggcaaggccttctccatcgcctttgcgctcctgggcgtgccgaccaccatgctgctgctgaccgcctcagcccagcgcctgtcactgctgctgactcacgtgcccctgtcttggctgagcatgcgttggggctgggacccccggcgggcggcctgctggcacttggtggccctgttgggggtcgtagtgaccgtctgctttctggtgccggctgtgatctttgcccacctcgaggaggcctggagcttcttggatgccttctacttctgctttatctctctgtccaccatcggcctgggcgactacgtgcccggggaggcccctggccagccctaccgggccctctacaaggtgctggtcacagtctacctcttcctgggcctggtggccatggtgctggtgctgcagaccttccgccacgtgtccgacctccacggcctcacggagctcatcctgctgccccctccgtgccctgccagtttcaatgcggatgaggacgatcgggtggacatcctgggcccccagccggagtcgcaccagcaactctctgccagctcccacaccgactacgcttccatccccaggtagctggggcagcctctgccaggcttgggtgtgcctggcctgggactgaggggtccaggcgaccagagctggctgtacaggaatgtccacgagcacagcaggtgatcttgaggccttgccgtccaccgtctctcctttgtttcccagcatctggctgggatgtgaagggcagcactccctgtccccatgtcccgggctccactgggcaccaacataaccttgttctctgtcctttctctcatcctctttacactgtgtctctctggctctctggcattctcgctgcctctgtctttccctcttgctgtctctgtttctcattctctttcatgttccgtctgtgtctctcaattaaccactcgtcaactgctgattctactgggctgtgggctcagacctcatttcaggcaccagattggtcgctacaccctggacaagtgactgcccgtctctgagccttgatttcctcagctgccaaatgggaagaatagaagaatttgcccctaaacccctcctgtgtgctggccctgtgctagacagtgctggagacatagttgggggtggagaactgcccttatggagcttgcagtccagtgaggtggacagacctgtccccagacagtgatggcccaaaatggtcaggactttaatggaggaggtgaggtgttgaaagcacaggcagagtggtcagggctgaagtcggagaagcatagggactaggcccaatccagcctggaaagtcagggaggacttcctagaggaagggacatcgaactaagacctgaactatgagaaataggcaggaagaagttgtacctgactcatttttctcaggtgtctccagggagcaggacccatggagggacccctggtgtaggcctgggcgatagactcttcctcagcagcctggcaggcaggaaacagacataggaccccagcccagatctgaatggcatgggaggtgctgcccttaaccatgacaccattgtaagagctgtccacatttgtatgttgtgccctggaatcagcctggttgagctcaaatcccaacttagccacgtctggcctgtgtccttgggcagtcacactacctctctgattttgtttccttatctgtaaaatggtgatcatcataatacaacttcaaaaggatttcaggctgagtgtggtggctcacgcctatacacccagcactttggaaggctgaggaaggaggatcgcttgaggccaggagtttgagactagcctaggcaacacagtgaggccttatctcaacaacaaccacaaaatctaaaaattagctgggtgtggtggtgcatgcctgtgatcctggctacttcagaggctgaggtggaaggatcacttgaggccaggagtttgaggctgcagtgagttatgatggcactgctgcactccagcctgcgggacagagtgagaccctgtctgaaagaaagagagaaagaaagaaagaaagagagagaaagaaagaaagaaagaaagggaaagatggaaggaaggaaggaaaaagaaagagaaagagagagagagagaaagaaaaagaaagaaaagtaagaaagaaaaaagaaaaagaaagaaaagtaagaaagaaaaaaaaaaaaaaa

SEQ ID NO: 1143 - DNA, 4299 bp, Homo sapiens
acgtaccagggctcattgcgtgacggttacacttccggcgggctacgtgcgcgcggcgagcgccgggcgtacttttgcgtggttgctccaccccctcagccttgccttcgccgccgttggggctggaagttcccgccaggtccgtgccgggcgagagagatgctgcccggcccgcctcggctttgaggcgagagaagtgtcccagacccatttcgccttgctgacggcgtcgagccctggccagacatgtccacagggttctccttcgggtccgggactctgggctccaccaccgtggccgccggcgggaccagcacaggcggcgttttctccttcggaacgggagcgtctagcaacccttctgtggggctcaattttggaaatcttggaagtacttcaactccagcaactacatctgctccttcaagtggttttggaaccgggctctttggatctaaacctgccactgggttcactctaggaggaacaaatacaggaacgccagccactacatctgcagctacaacaggcttcagtttaggattcaataaacctgcagcatctgccacaccatttgctctacctattacctctacctcagctagcggtctgactctttcgtctgctctgacatcaactccagcagcatccacaggatttactctaaataatttgggtgggacaacagccacaactacaactgcatcaacaggcctctctttagggggagccttagctggtttgggaggttcacttttccagagtacaaacacaggaacatcaggacttggacagaatgctttagggttgactttgggaactacagcagctacttcaactgcaggcaatgaaggccttggtggtatagatttcagtagctcctcagataaaaagagtgataaaacgggaacaagaccagaggatagtaaagctctgaaggatgaaaatctacctcctgtcatctgccaggatgttgaaaatctccagaaatttgtgaaggagcagaaacaagttcaagaagaaattagtagaatgtcttcaaaagcaatgcttaaggtacaagaagatattaaagctctgaagcagctcctgtcgttggctgccaatggaatacagagaaacactctcaacattgacaaattgaaaatagaaactgctcaggagttgaagaatgctgaaatagctttaagaacccagaagacaccacctggacttcaacatgaatatgcagctcctgctgactacttcagaatcttggttcagcaatttgaggtacagcttcagcagtacaggcagcagattgaagaactagaaaaccatcttgccactcaagcaaataattcacatataacccctcaagatttgtcaatggctatgcagaaaatttatcaaacatttgtagctttagcggcacaacttcagtctattcatgaaaatgtaaaggttctgaaagaacagtaccttggctacaggaaaatgttcttgggagatgctgttgatgtgtttgaaacaaggcgagcagaagccaagaagtggcagaacacacccagagttactactggacccactcctttcagcaccatgccaaacgcagcagccgttgccatggctgcaacacttacacagcagcaacagcctgctacagggccacagccatctctgggagttagttttggaacgccattcggctcaggtattggcactggcttgcaatcaagtggcttaggttcttcaaaccttggaggatttggaactagctctggttttggatgcagcaccacaggggcctccacatttggatttggaacaacaaataaaccctcaggaagtcttagtgcaggctttggcagctcaagtacatctgggtttaacttcagcaatcctggcatcacggcatcagctggtttgacttttggggtgtccaatcctgcctctgcaggttttggaacaggaggacaactccttcagttgaagaaacctccagctggaaacaaaagaggaaaaagataaacatgggttgatgtgttgagagaatccatagcagcaccgttcattctatgagtctatttttctaatgatgcagtaattaaattgcatcccaggagatttataaagttttgatatttttccctactctggaatttgaactttcttcatgtttgccatactgaacatcttttttcttgtggaatttaaagtccagctgtgttttctttttaatttgattctcagtgtaagaaatgttctgattacatcactgattggtaatggttagaaaccattaacctaaaacttactatttaacctagtgtttttgttgatgaggtttacattatgtgaatacatgcacatttgtttcttatacaggtggtgtgaactctagggcctatactagaatcaatttgttccttgttaaaggccttttgaattatactgcagggcatcttgtgaatatgtatgtaaatatatacagaataatacacacagttgtgtgtgcatataaaatacatatttacgccaggcgtggtggctcacgcctgtaatcccagcactttgggaggccgaggcaggcggatcacctgaggtcaggagtttgagaccagcctgacatggtgaaaccccatctctacgaaaaatacaaaaattagctgggcatagtggcgggtacctataatcccagctactcgggaggctgaggcacgagaatcacttgaagccgggaggtgggggttgcagtgagccgagatcacaccactgcactccagcctgggcaacaagagcaaaactccgtctcaaaaaagatgaaaataaaataaaatatatatttacaggcctacaacttttgcctcagactgttccccttttctaagggtattcaagttttcaccttttaagcttcatatcctcagtgcttgtagaatgatgagcttagaggtaccaggtcattgcagttgtttgcttaaagacttattgaaatggttactggcgtaaatacttggccaactcaactttattgcccctgatcttttccatttttgtttccaccttaacctatagcagctcctccaaatgaggaatgctgtaagtaagactcatcaaacagattttaaccattttattatcctgtgtgtccttacattgcttctgtgagatgtttttttcttatctgagatgaactttcaggagcctatttgaactccagactggtgttctggggcaaagagctattagccaaactgattctatgcaggtgaaggatgcactaaagttctcactttagtgagaacttttctagctattccaatacagagttctttcttatagggctattgatattgacaccaaatggagtggcttctcagcctcttaatgtcttaagtaagtgcttaatttggaatagagaaaccagtatattttaaaaaagaaaaatattctttgtagcaactgtaaattctcccattataacagtgaacagagctccaggtaataacgcataggcatgtcaggttgcatctgtatatttgactacattagtattagtgacatcaggtggatataaaagaaaacccttggaaagagaactgccttagccatgatttcgttagtagacctatttatgattcaattgcaattttcagataggatgtgaacatggaatttcattgaaaatagtttaattttttatataaaaggttttgtatataatgtgtgtcagtgactattttcaaaatcattttcatcaagacaccttttttctaaaataggcattgcatacacatatgcacacgtatgtgcatgtgccacacattttttgtataatgttgggtttgattataaaagtgttgtcaaatgttttatttatctgcatatagcagtggttggcttttttgaattgaaatttttgcgcattgatgcattgaaataaggaaaattatttatctctgagcactaaacttatttttgcatatttctgtaatattgcagtccccagatccagaacatgggaagttagggaaaatgtgtgattttgtgttttgaattactgtcagaattacatacacaattacaacaaactttttttaaaagacatttcattgtactgcaaaaatctgaatatttatatttcttgtttttttctttatatgttttgcattttaatatgttgagccactggaaatttgtaacagattaatttgttataggagtttaaatgtgttgtcattgtctccattgtctttgtccagagcctattattatggaaacaataaaatttattgtgtcagttgctttgattcttta

SEQ ID NO: 1144 - DNA, 1822 bp, Homo sapiens
acgtaccagggctcattgcgtgacggttacacttccggcgggctacgtgcgcgcggcgagcgccgggcgtacttttgcgtggttgctccaccccctcagccttgccttcgccgccgttggggctggaagttcccgccaggtccgtgccgggcgagagagatgctgcccggcccgcctcggctttgaggcgagagaagtgtcccagacccatttcgccttgctgacggcgtcgagccctggccagacatgtccacagggttctccttcgggtccgggactctgggctccaccaccgtggccgccggcgggaccagcacaggcggcgttttctccttcggaacgggagcgtctagcaacccttctgtggggctcaattttggaaatcttggaagtacttcaactccagcaactacatctgctccttcaagtggttttggaaccgggctctttggatctaaacctgccactgggttcactctaggaggaacaaatacaggaatagcaacaactataactacaggattaactctgggaacgccagccactacatctgcagctacaacaggcttcagtttaggattcaataaacctgcagcatctgccacaccatttgctctacctattacctctacctcagctagcggtctgactctttcgtctgctctgacatcaactccagcagcatccacaggatttactctaaataatttgggtgggacaacagccacaactacaactgcatcaacaggcctctctttagggggagccttagctggtttgggaggttcacttttccagagtacaaacacaggaacatcaggacttggacagaatgctttagggttgactttgggaactacagcagctacttcaactgcaggcaatgaaggccttggtggtatagatttcagtagctcctcagataaaaagagtgataaaacgggaacaagaccagaggatagtaaagctctgaaggatgaaaatctacctcctgtcatctgccaggatgttgaaaatctccagaaatttgtgaaggagcagaaacaagttcaagaagaaattagtagaatgtcttcaaaagcaatgcttaaggtacaagaagatattaaagctctgaagcagctcctgtcgttggctgccaatggaatacagagaaacactctcaacattgacaaattgaaaatagaaactgctcaggagttgaagaatgctgaaatagctttaagaacccagaagacaccacctggacttcaacatgaatatgcagctcctgctgactacttcagaatcttggttcagcaatttgaggtacagcttcagcagtacaggcagcagattgaagaactagaaaaccatcttgccactcaagcaaataattcacatataacccctcaagatttgtcaatggctatgcagaaaatttatcaaacatttgtagctttagcggcacaacttcagtctattcatgaaaatgtaaaggttctgaaagaacagtaccttggctacaggaaaatgttcttgggagatgctgttgatgtgtttgaaacaaggcgagcagaagccaagaagtggcagaacacacccagagttactactggacccactcctttcagcaccatgccaaacgcagcagccgttgccatggctgcaacacttacacagcagcaacagcctgctacaggtgataagtggtgtaatgtagcagagcttaagaatagaactcaattatcactttttgtgaacaagttggaattgtcatgttactgtgtaattgatttgctttacaatgaacaataaatttaataaaataaaaaaaaaaaaa

SEQ ID NO: 1145 - DNA, 4335 bp, Homo sapiens
acgtaccagggctcattgcgtgacggttacacttccggcgggctacgtgcgcgcggcgagcgccgggcgtacttttgcgtggttgctccaccccctcagccttgccttcgccgccgttggggctggaagttcccgccaggtccgtgccgggcgagagagatgctgcccggcccgcctcggctttgaggcgagagaagtgtcccagacccatttcgccttgctgacggcgtcgagccctggccagacatgtccacagggttctccttcgggtccgggactctgggctccaccaccgtggccgccggcgggaccagcacaggcggcgttttctccttcggaacgggagcgtctagcaacccttctgtggggctcaattttggaaatcttggaagtacttcaactccagcaactacatctgctccttcaagtggttttggaaccgggctctttggatctaaacctgccactgggttcactctaggaggaacaaatacaggaatagcaacaactataactacaggattaactctgggaacgccagccactacatctgcagctacaacaggcttcagtttaggattcaataaacctgcagcatctgccacaccatttgctctacctattacctctacctcagctagcggtctgactctttcgtctgctctgacatcaactccagcagcatccacaggatttactctaaataatttgggtgggacaacagccacaactacaactgcatcaacaggcctctctttagggggagccttagctggtttgggaggttcacttttccagagtacaaacacaggaacatcaggacttggacagaatgctttagggttgactttgggaactacagcagctacttcaactgcaggcaatgaaggccttggtggtatagatttcagtagctcctcagataaaaagagtgataaaacgggaacaagaccagaggatagtaaagctctgaaggatgaaaatctacctcctgtcatctgccaggatgttgaaaatctccagaaatttgtgaaggagcagaaacaagttcaagaagaaattagtagaatgtcttcaaaagcaatgcttaaggtacaagaagatattaaagctctgaagcagctcctgtcgttggctgccaatggaatacagagaaacactctcaacattgacaaattgaaaatagaaactgctcaggagttgaagaatgctgaaatagctttaagaacccagaagacaccacctggacttcaacatgaatatgcagctcctgctgactacttcagaatcttggttcagcaatttgaggtacagcttcagcagtacaggcagcagattgaagaactagaaaaccatcttgccactcaagcaaataattcacatataacccctcaagatttgtcaatggctatgcagaaaatttatcaaacatttgtagctttagcggcacaacttcagtctattcatgaaaatgtaaaggttctgaaagaacagtaccttggctacaggaaaatgttcttgggagatgctgttgatgtgtttgaaacaaggcgagcagaagccaagaagtggcagaacacacccagagttactactggacccactcctttcagcaccatgccaaacgcagcagccgttgccatggctgcaacacttacacagcagcaacagcctgctacagggccacagccatctctgggagttagttttggaacgccattcggctcaggtattggcactggcttgcaatcaagtggcttaggttcttcaaaccttggaggatttggaactagctctggttttggatgcagcaccacaggggcctccacatttggatttggaacaacaaataaaccctcaggaagtcttagtgcaggctttggcagctcaagtacatctgggtttaacttcagcaatcctggcatcacggcatcagctggtttgacttttggggtgtccaatcctgcctctgcaggttttggaacaggaggacaactccttcagttgaagaaacctccagctggaaacaaaagaggaaaaagataaacatgggttgatgtgttgagagaatccatagcagcaccgttcattctatgagtctatttttctaatgatgcagtaattaaattgcatcccaggagatttataaagttttgatatttttccctactctggaatttgaactttcttcatgtttgccatactgaacatcttttttcttgtggaatttaaagtccagctgtgttttctttttaatttgattctcagtgtaagaaatgttctgattacatcactgattggtaatggttagaaaccattaacctaaaacttactatttaacctagtgtttttgttgatgaggtttacattatgtgaatacatgcacatttgtttcttatacaggtggtgtgaactctagggcctatactagaatcaatttgttccttgttaaaggccttttgaattatactgcagggcatcttgtgaatatgtatgtaaatatatacagaataatacacacagttgtgtgtgcatataaaatacatatttacgccaggcgtggtggctcacgcctgtaatcccagcactttgggaggccgaggcaggcggatcacctgaggtcaggagtttgagaccagcctgacatggtgaaaccccatctctacgaaaaatacaaaaattagctgggcatagtggcgggtacctataatcccagctactcgggaggctgaggcacgagaatcacttgaagccgggaggtgggggttgcagtgagccgagatcacaccactgcactccagcctgggcaacaagagcaaaactccgtctcaaaaaagatgaaaataaaataaaatatatatttacaggcctacaacttttgcctcagactgttccccttttctaagggtattcaagttttcaccttttaagcttcatatcctcagtgcttgtagaatgatgagcttagaggtaccaggtcattgcagttgtttgcttaaagacttattgaaatggttactggcgtaaatacttggccaactcaactttattgcccctgatcttttccatttttgtttccaccttaacctatagcagctcctccaaatgaggaatgctgtaagtaagactcatcaaacagattttaaccattttattatcctgtgtgtccttacattgcttctgtgagatgtttttttcttatctgagatgaactttcaggagcctatttgaactccagactggtgttctggggcaaagagctattagccaaactgattctatgcaggtgaaggatgcactaaagttctcactttagtgagaacttttctagctattccaatacagagttctttcttatagggctattgatattgacaccaaatggagtggcttctcagcctcttaatgtcttaagtaagtgcttaatttggaatagagaaaccagtatattttaaaaaagaaaaatattctttgtagcaactgtaaattctcccattataacagtgaacagagctccaggtaataacgcataggcatgtcaggttgcatctgtatatttgactacattagtattagtgacatcaggtggatataaaagaaaacccttggaaagagaactgccttagccatgatttcgttagtagacctatttatgattcaattgcaattttcagataggatgtgaacatggaatttcattgaaaatagtttaattttttatataaaaggttttgtatataatgtgtgtcagtgactattttcaaaatcattttcatcaagacaccttttttctaaaataggcattgcatacacatatgcacacgtatgtgcatgtgccacacattttttgtataatgttgggtttgattataaaagtgttgtcaaatgttttatttatctgcatatagcagtggttggcttttttgaattgaaatttttgcgcattgatgcattgaaataaggaaaattatttatctctgagcactaaacttatttttgcatatttctgtaatattgcagtccccagatccagaacatgggaagttagggaaaatgtgtgattttgtgttttgaattactgtcagaattacatacacaattacaacaaactttttttaaaagacatttcattgtactgcaaaaatctgaatatttatatttcttgtttttttctttatatgttttgcattttaatatgttgagccactggaaatttgtaacagattaatttgttataggagtttaaatgtgttgtcattgtctccattgtctttgtccagagcctattattatggaaacaataaaatttattgtgtcagttgctttgattcttta

SEQ ID NO: 1146 - DNA, 434 bp, Homo sapiens
gcaagagagcgggaagccgagctgggcgagaagtaggggagggcggtgctccgccgcggtggcggttgctatcgcttcgcagaacctactcaggcagccagctgagaagagttgagggaaagtgctgctgctgggtctgcagacgcgatggataacgtgcagccgaaaataaaacatcgccccttctgcttcagtgtgaaaggccacgtgaagatgctgcggctggtgtttgcacttgtgacagcagtatgctgtcttgccgacggggcccttatttaccggaagcttctgttcaatcccagcggtccttaccagaaaaagcctgtgcatgaaaaaaaagaagttttgtaattttatattactttttagtttgatactaagtattaaacatatttctgtattcttccaaaaaaaaaaaaaaaaaaaaaaaaaaa

SEQ ID NO: 1147 - DNA, 689 bp, Homo sapiens
gcaagagagcgggaagccgagctgggcgagaagtaggggagggcggtgctccgccgcggtggcggttgctatcgcttcgcagaacctactcaggcagccagctgagaagagttgagggaaagtgctgctgctgggtctgcagacgcgatggataacgtgcagccgaaaataaaacatcgccccttctgcttcagtgtgaaaggccacgtgaagatgctgcggctggcactaactgtgacatctatgaccttttttatcatcgcacaagcccctgaaccatatattgttatcactggatttgaagtcaccgttatcttatttttcatacttttatatgtactcagacttgatcgattaatgaagtggttattttggcctttgcttgatattatcaactcactggtaacaacagtattcatgctcatcgtatctgtgttggcactgataccagaaaccacaacattgacagttggtggaggggtgtttgcacttgtgacagcagtatgctgtcttgccgacggggcccttatttaccggaagcttctgttcaatcccagcggtccttaccagaaaaagcctgtgcatgaaaaaaaagaagttttgtaattttatattactttttagtttgatactaagtattaaacatatttctgtattcttccaaaaaaaaaaaaaaaaaaaaaaaaaaa

SEQ ID NO: 1148 - DNA, 530 bp, Homo sapiens
gcaagagagcgggaagccgagctgggcgagaagtaggggagggcggtgctccgccgcggtggcggttgctatcgcttcgcagaacctactcaggcagccagctgagaagagttgagggaaagtgctgctgctgggtctgcagacgcgatggataacgtgcagccgaaaataaaacatcgccccttctgcttcagtgtgaaaggccacgtgaagatgctgcggctggatattatcaactcactggtaacaacagtattcatgctcatcgtatctgtgttggcactgataccagaaaccacaacattgacagttggtggaggggtgtttgcacttgtgacagcagtatgctgtcttgccgacggggcccttatttaccggaagcttctgttcaatcccagcggtccttaccagaaaaagcctgtgcatgaaaaaaaagaagttttgtaattttatattactttttagtttgatactaagtattaaacatatttctgtattcttccaaaaaaaaaaaaaaaaaaaaaaaaaaa

SEQ ID NO: 1149 - DNA, 593 bp, Homo sapiens
gcaagagagcgggaagccgagctgggcgagaagtaggggagggcggtgctccgccgcggtggcggttgctatcgcttcgcagaacctactcaggcagccagctgagaagagttgagggaaagtgctgctgctgggtctgcagacgcgatggataacgtgcagccgaaaataaaacatcgccccttctgcttcagtgtgaaaggccacgtgaagatgctgcggctggcactaactgtgacatctatgaccttttttatcatcgcacaagcccctgaaccatatattgttatcactggatttgaagtcaccgttatcttatttttcatacttttatatgtactcagacttgatcgattaatgaagtggttattttggcctttgcttgtgtttgcacttgtgacagcagtatgctgtcttgccgacggggcccttatttaccggaagcttctgttcaatcccagcggtccttaccagaaaaagcctgtgcatgaaaaaaaagaagttttgtaattttatattactttttagtttgatactaagtattaaacatatttctgtattcttccaaaaaaaaaaaaaaaaaaaaaaaaaaa

SEQ ID NO: 1150 - DNA, 1561 bp, Homo sapiens
cggccctgcgccccagcccggccgcggcacctccgcctcgccgccgctaggtcggccggctccgcccggctgccgcctaggatgaatatcatggacttcaacgtgaagaagctggcggccgacgcaggcaccttcctcagtcgcgccgtgcagttcacagaagaaaagcttggccaggctgagaagacagaattggatgctcacttagagaacctccttagcaaagctgaatgtaccaaaatatggacagaaaaaataatgaaacaaactgaagtgttattgcagccaaatccaaatgccaggatagaagaatttgtttatgagaaactggatagaaaagctccaagtcgtataaacaacccagaacttttgggacaatatatgattgatgcagggactgagtttggcccaggaacagcttatggtaatgcccttattaaatgtggagaaacccaaaaaagaattggaacagcagacagagaactgattcaaacgtcagccttaaattttcttactcctttaagaaactttatagaaggagattacaaaacaattgctaaagaaaggaaactattgcaaaataagagactggatttggatgctgcaaaaacgagactaaaaaaggcaaaagctgcagaaactagaaattcatctgaacaggaattaagaataactcaaagtgaatttgatcgtcaagcagagattaccagacttctgctagagggaatcagcagtacacatgcccatcaccttcgctgtctgaatgactttgtagaagcccagatgacttactatgcacagtgttaccagtatatgttggacctccagaaacaactgggaagttttccatccaattatcttagtaacaacaatcagacttctgtgacacctgtaccatcagttttaccaaatgcgattggttcttctgccatggcttcaacaagtggcctagtaatcacctctccttccaacctcagtgaccttaaggagtgtagtggcagcagaaaggccagggttctctatgattatgatgcagcaaacagtactgaattatcacttctggcagatgaggtgatcactgtgttcagtgttgttggaatggattcagactggctaatgggggaaaggggaaaccagaagggcaaggtgccaattacctacttagaactgctcaattaagtaggtggactatggaaaggttgcccatcatgactttgtatttatatacaattaactctaaataaagcaggttaagtatcttccatgttaatgtgttaagagactgaaaataccagccatcagaaactggcctttctgccaataaagttgcatggtaaatatttcattacagaatttatgttagagctttcatgccaagaatgttttcttacaaaattctctttttattgaggtttcactaataagcagcttctacttttgagcctcaacttaaagcagaactgttttctactggatttttcattaacagcaagctttttcttttatgtaaaataaatctattgtgaattgaaaaaaaaataaaaagagaattttgtaagaa

SEQ ID NO: 1151 - DNA, 4331 bp, Homo sapiens
atgtcgctgctgcagtctgcgctcgacttcttggcgggtccaggctccctgggcggtgcttccggccgcgaccagagtgacttcgtggggcagacggtggaactgggcgagctgcggctgcgggtgcggcgggtcctggccgaaggagggtttgcatttgtgtatgaagctcaagatgtggggagtggcagagagtatgcattaaagaggctattatccaatgaagaggaaaagaacagagccatcattcaagaagtttgcttcatgaaaaagctttccggccacccgaacattgtccagttttgttctgcagcgtctataggaaaagaggagtcagacacggggcaggctgagttcctcttgctcacagagctctgtaaagggcagctggtggaatttttgaagaaaatggaatctcgaggccccctttcgtgcgacacggttctgaagatcttctaccagacgtgccgcgccgtgcagcacatgcaccggcagaagccgcccatcatccacagggacctcaaggttgagaacttgttgcttagtaaccaagggaccattaagctgtgtgactttggcagtgccacgaccatctcgcactaccctgactacagctggagcgcccagaggcgagccctggtggaggaagagatcacgaggaatacaacaccaatgtatagaacaccagaaatcatagacttgtattccaacttcccgatcggcgagaagcaggatatctgggccctgggctgcatcttgtacctgctgtgcttccggcagcacccttttgaggatggagcgaaacttcgaatagtcaatgggaagtactcgatccccccgcacgacacgcagtacacggtcttccacagcctcatccgcgccatgctgcaggtgaacccggaggagcggctgtccatcgccgaggtggtgcaccagctgcaggagatcgcggccgcccgcaacgtgaaccccaagtctcccatcacagagctcctggagcagaatggaggctacgggagcgccacactgtcccgagggccaccccctcccgtgggccccgctggcagtggctacagtggaggcctggcgctggcggagtacgaccagccgtatggcggcttcctggacattctgcggggtgggacagagcggctcttcaccaacctcaaggacacctcctccaaggtcatccagtccgtcgctaattatgcaaagggtgacctggacatatcttacatcacatccagaattgcagtgatgtcattcccagcagaaggtgtggagtcagcgctcaaaaacaacatcgaagatgtgcggttgttcctggactccaagcacccagggcactatgccgtctacaacctgtccccgaggacctaccggccctccaggttccacaaccgggtctccgagtgtggctgggcagcacggcgggccccacacctgcacaccctgtacaacatctgcaggaacatgcacgcctggctgcggcaggaccacaagaacgtctgcgtcgtgcactgcatggacgggagagccgcgtctgctgtggccgtctgctccttcctgtgcttctgccgtctcttcagcaccgcggaggccgccgtgtacatgttcagcatgaagcgctgcccaccaggcatctggccatcccacaaaaggtacatcgagtacatgtgtgacatggtggcggaggagcccatcacaccccacagcaagcccatcctggtgagggccgtggtcatgacacccgtgccgctgttcagcaagcagaggagcggctgcaggcccttctgcgaggtctacgtgggggacgagcgtgtggccagcacctcccaggagtacgacaagatgcgggactttaagattgaagatggcaaagcggtgattcccctgggcgtcacggtgcaaggagacgtgctcatcgtcatctatcacgcccggtccactctgggcggccggctgcaggccaagatggcatccatgaagatgttccagattcagttccacacggggtttgtgcctcggaacgccaccactgtgaaatttgccaagtatgacctggacgcgtgtgacattcaagaaaaatacccggatttatttcaagtgaacctggaagtggaggtggagcccagggacaggccgagccgggaagccccaccatgggagaactcgagcatgagggggctgaaccccaaaatcctgttttccagccgggaggagcagcaagacattctgtctaagtttgggaagccggagcttccccggcagcctggctccacggctcagtatgatgctggggcagggtccccggaagccgaacccacagactctgactcaccgccaagcagcagcgcggacgccagtcgcttcctgcacacgctggactggcaggaagagaaggaggcagagactggtgcagaaaatgcctcttccaaggagagcgagtctgccctgatggaggacagagacgagagtgaggtgtcagatgaagggggatccccgatctccagcgagggccaggaacccagggccgacccagagccccccggcctggcagcagggctggtgcagcaggacttggtttttgaggtggagacaccggctgtgctgccagagcctgtgccacaggaagacggggtcgacctcctgggcctgcactccgaggtgggcgcagggccagctgtacccccgcaggcctgcaaggccccctccagcaacaccgacctgctcagctgcctccttgggccccctgaggccgcctcccaggggcccccggaggatctgctcagcgaggacccgctgctcctggcaagcccggcccctcccctgagcgtgcagagcaccccaagaggagggccccctgccgctgctgacccctttggcccgcttctgccgtcttcaggcaacaactcccagccctgctccaatcctgatctcttcggcgaatttctcaattcggactctgtgaccgtcccaccatccttcccgtctgcccacagcgctccgcccccatcctgcagcgccgacttcctgcacctgggggatctgccaggagagcccagcaagatgacagcctcgtccagcaacccagacctgctgggaggatgggctgcctggaccgagactgcagcgtcggcagtggcccccacgccagccacagaaggccccctcttctctcctggaggtcagccggccccttgtggctctcaggccagctggaccaagtctcagaacccggacccatttgctgaccttggcgacctcagctccggcctccaaggctcaccagctggatttcctcctgggggcttcattcccaaaacggccaccacggccaaaggcagcagctcctggcagacaagtcggccgccagcccagggcgcctcatggccccctcaggccaagccgccccccaaagcctgcacacagccaaggcctaactatgcctcgaacttcagtgtgatcggggcgcgggaggagcggggggtccgcgcacccagctttgctcaaaagccaaaagtctctgagaacgactttgaagatctgttgtccaatcaaggcttctcctccaggtctgacaagaaagggccaaagaccattgcagagatgaggaagcaggacctggctaaagacacggacccactcaagctgaagctcctggactggattgagggcaaggagcggaacatccgggccctgctgtccacgctgcacacagtgctgtgggacggggagagccgctggacgcccgtgggcatggccgacctggtggctccggagcaagtgaagaagcactatcgccgcgcggtgctggccgtgcaccccgacaaggctgcggggcagccgtacgagcagcacgccaagatgatcttcatggagctgaatgacgcctggtcggagtttgagaaccagggctcccggcccctcttctgaggccgcagtggtggtggctgcgcacacagctccacaggttgggagccgtcgtgggacctgggtccccaccgtgaggaccccgtgggcgacagcaggtgtggccagggtggggctccgagccccgggtcaccgcccgcccagcgttccaggcacatgaagagaaagcattccaaagcctctgattgttgtttcctttttctcctcccgaaggaacagctgattcatgctcctcccgcaattgtcacgtctgtgatttatttggtgtttcgggcgtggcctctggagccccggcacgtggtgggccacgctgctggcgctcatgggccctggtgtttgcaccgcactttgtaatcagtcccgtggttgtctgtacagaattaaactattttccgatg

SEQ ID NO: 1152 - DNA, 2008 bp, Homo sapiens
gcccctgcccggctcccggcggccccagctgtcaccggcccccccaggatgcaatggcgcagcccccccggctgagccgctctggtgcctcctcactttgggacccagcttctcctgctcccacctctggccccaggcctcggctttgggagggtcaagatgtgctggccagatggactgatgggctgctatacttgggtaccatcaaaaaggtggacagtgctagggaggtgtgtctggtccagtttgaggatgattcgcagtttctggttctatggaaagacattagccctgctgccctccctggagaggaactcctctgttgtgtctgtcgctctgagactgtggtccctgggaaccggctggtcagctgtgagaagtgtcgccatgcttatcaccaggactgccatgttcccagggctccagcccctggagagggagagggcacatcctgggtatgccgccagtgtgtctttgcgatcgccaccaagaggggaggtgccctgaagaagggcccctatgcccgggccatgctgggtatgaagctttctctgccatatggactgaaggggctggactgggatgctggacatctgagcaaccgacagcagagttactgttactgtggtggccctggggagtggaacctgaaaatgctgcagtgccggagctgcctgcagtggttccatgaggcctgcacccagtgtctgagcaagcccctcctctatggggacaggttctatgaatttgaatgctgtgtgtgtcgcgggggccctgagaaagtccggagactacagcttcgctgggtggatgtggcccatcttgtcctgtatcacctcagtgtttgctgtaagaagaaatactttgattttgatcgtgagatcctccccttcacttctgagaattgggacagtttgctcctgggggagctttcagacacccccaaaggagaacgttcttccaagctcctctctgctcttaacagccacaaggaccgtttcatttcagggagagagattaagaagaggaaatgtttgtttggtctccatgctcggatgcctccccctgtggagccccctactggagatggagcactcaccagggcagggccctgggggaggggtctcacgtcccctggggaagcgccggaggccggagccagagcccctgaggaggaggcagaaggggaaagtggaggagctggggccaccctcagcagtgcgcaatcagcccgagccccaggagcagagggagcgggctcatctgcagagggcactgcagcagccccatccggatgtttgcttccttccacccttctgccagcaccgcagggacctctggggacagtggacccccagacaggtcacccctggaacttcacattggtttccccacagacatccctaaaagtgccccccactcgatgactgcctcatcttcctcagtttcatccccatccccaggtcttcctagacgctcagcacccccttctcccctgtgccgtagtttgtctcctgggactgggggaggagtccgaggtggggttggttacctgtcccgaggggaccctgtccgggtccttgctcggagagtacggcctgatggctctgtgcagtacctggttgagtggggaggagggggcatcttctgaacagcctgcctctgcccagctccccattcacacacaccggcactttcataccctgacctctgacctcacctacagctgggatgtacctggagagatagggggtagttctccctactgcccaggctggaatccaagagtggggagtggggaagaggccctcttctctaccctccttcatgattcctgacccctcccatccttcccatttcctttgatgttattttgttacagctttttaaatattttttaaaattatttaacccctgggggcagagactgaggagggaggatgataagggatcccggactctgtatgattgaaataaagagaaataaacaaaaaaaaaaaaaaaaaaa

SEQ ID NO: 1153 - DNA, 2260 bp, Homo sapiens
ctcctcctgccgctgccgctgctttggctgctgcgtcatacgccccagagccgccgggacggaggggctgggcctggggaccccccggcctccgcctgcacgcccccccacgcccggacgtgccctctccgcgcgggggactcgcctaggtctcctacgtctgcccctgcccggctcccggcggccccagctgtcaccggcccccccaggatgcaatggcgcagcccccccggctgagccgctctggtgcctcctcactttgggacccagcttctcctgctcccacctctggccccaggcctcggctttgggagggtcaagatgtgctggccagatggactgatgggctgctatacttgggtaccatcaaaaaggtggacagtgctagggaggtgtgtctggtccagtttgaggatgattcgcagtttctggttctatggaaagacattagccctgctgccctccctggagaggaactcctctgttgtgtctgtcgctctgagactgtggtccctgggaaccggctggtcagctgtgagaagtgtcgccatgcttatcaccaggactgccatgttcccagggctccagcccctggagagggagagggcacatcctgggtatgccgccagtgtgtctttgcgatcgccaccaagaggggaggtgccctgaagaagggcccctatgcccgggccatgctgggtatgaagctttctctgccatatggactgaaggggctggactgggatgctggacatctgagcaaccgacagcagagttactgttactgtggtggccctggggagtggaacctgaaaatgctgcagtgccggagctgcctgcagtggttccatgaggcctgcacccagtgtctgagcaagcccctcctctatggggacaggttctatgaatttgaatgctgtgtgtgtcgcgggggccctgagaaagtccggagactacagcttcgctgggtggatgtggcccatcttgtcctgtatcacctcagtgtttgctgtaagaagaaatactttgattttgatcgtgagatcctccccttcacttctgagaattgggacagtttgctcctgggggagctttcagacacccccaaaggagaacgttcttccaagctcctctctgctcttaacagccacaaggaccgtttcatttcagggagagagattaagaagaggaaatgtttgtttggtctccatgctcggatgcctccccctgtggagccccctactggagatggagcactcaccagcttcccttcagggcagggccctgggggaggggtctcacgtcccctggggaagcgccggaggccggagccagagcccctgaggaggaggcagaaggggaaagtggaggagctggggccaccctcagcagtgcgcaatcagcccgagccccaggagcagagggagcgggctcatctgcagagggcactgcaggcctcagtgtctccaccatcccccagccctaaccagagttaccagggcagcagcggctacaacttccggcccacagatgcccgctgcctgcccagcagccccatccggatgtttgcttccttccacccttctgccagcaccgcagggacctctggggacagtggacccccagacaggtcacccctggaacttcacattggtttccccacagacatccctaaaagtgccccccactcgatgactgcctcatcttcctcagtttcatccccatccccaggtcttcctagacgctcagcacccccttctcccctgtgccgtagtttgtctcctgggactgggggaggagtccgaggtggggttggttacctgtcccgaggggaccctgtccgggtccttgctcggagagtacggcctgatggctctgtgcagtacctggttgagtggggaggagggggcatcttctgaacagcctgcctctgcccagctccccattcacacacaccggcactttcataccctgacctctgacctcacctacagctgggatgtacctggagagatagggggtagttctccctactgcccaggctggaatccaagagtggggagtggggaagaggccctcttctctaccctccttcatgattcctgacccctcccatccttcccatttcctttgatgttattttgttacagctttttaaatattttttaaaattatttaacccctgggggcagagactgaggagggaggatgataagggatcccggactctgtatgattgaaataaagagaaataaacaaa

SEQ ID NO: 1154 - DNA, 1216 bp, Homo sapiens
gaatctcctttagccccgcccgcctccgtagctgcctgaagtagtgcagggtcagcccgcaagttgcaggtcatggcgctggctgctcgactgtggcgccttctgcctttccgacgtggagccgccccggggtctcgtctccctgcgggaccttcgggcagccgcggcattgcggcccctgctcgattccgcggcttcgaggtaatgggaaacccaggaactttcaacagaggccttttactctcagctttgtcgtatttgggttttgaaacttaccaggttatctctcaggctgctgtggttcatgccacagccaaagttgaagaaatacttgaacaagcagactacctgtatgaaagcggagaaacagaaaaactttatcagttgctaacccaatacaaggaaagtgaagatgcagagttactgtggcgtttggcacgggcatcacgtgatgtagctcagcttagcagaacctcagaagaggagaaaaagctattggtgtatgaagccctagagtatgcaaaaagagcactagaaaaaaatgaatcaagttttgcatctcataagtggtatgcaatctgccttagtgatgttggagattatgaaggcatcaaggctaaaattgcaaatgcatatatcatcaaggagcattttgagaaagcaattgaactgaaccctaaagatgctacttcaattcaccttatgggtatttggtgctatacatttgccgaaatgccttggtatcaaagaagaattgctaaaatgctgtttgcaactcctcctagttccacctatgagaaggccttaggctactttcacagggcagaacaagtggatccaaacttctacagcaaaaacttacttcttttaggaaagacatacttgaaactacacaacaaaaagcttgctgctttctggctaatgaaagccaaggactatccagcacacacagaggaggataaacagatacagacagaagctgctcagttgcttacaagtttcagtgagaagaattgagaacttttcagagaagatttatgaaatagctaataaacattgccttttcttttaattctaaacttaatatatgaactataactgttctacggctttttaaatgttgtgaccatttaaccgtgtaaatataaaatattctaggcttcttcacaaataatagggtaaaataaataatcgccataagagtggtagaaataaa

SEQ ID NO: 1155 - DNA, 1920 bp, Homo sapiens
gtgacgttatttcattacacggcttctcggcattccacaggtttccctccgcctcctgagggcctttcctaacccacagagtggattcctggctccagaaaatgggcttggagcgggggccacgttgaggaaggcgaagggcattgtgggggcgttatgtaaaagtaggaccccaaccgacagatcctagtgctcgcgccacctgggcgcgcggagctttgctcgtttactattgaaaaagttccagcgcgggaaactgaacccggagctttgcgcacgcccgagccctcaagtaatgtgggttgtggtttttgttgttgttgtcgccacgcatgcgtcttcgtgccgtgtggctatttgattgtgtcaactcttctgattagaatggcgccattttgcggtacggaagctacacagcaacacgtataggagactctccccgagatcttctagggagtgacccatctatttttgtttgggaagaggaaactccgaaatgggatcgcggaagacttaaagggccaggctgatttttttttcctactggtctctgaggctgtggttgctacagggtcaccacgagcttggcttacttgtctcatccttcccttgcctggtatcattttctcagttctcccaaaagccatgtcccggcccttgctcatcaccttcaccccagccactgaccccagcgacctctggaaggatgggcagcagcagccacagcccgagaagccagagtccaccctggatggggctgcagcccgagctttctatgaggccctgattggggatgagagcagcgctcctgactcccagagatctcagactgaacctgccagagaaagaaagagaaagaaaagaagaataatgaaggcaccagcagcagaagcagtggcagaaggagcatcaggaagacatggacaagggagatcccttgaggctgaggataagatgactcaccggatactgagggcagcccaggagggggacctgccagaacttaggagactgctggaaccgcatgaggcaggaggagctggggggaatatcaacgcccgggatgccttctggtggaccccactgatgtgtgctgctcgagcgggccagggggcagctgtgagctatctcctgggccgtggggctgcctgggtgggggtctgtgagctgagtggcagggatgcggctcagctcgctgaagaagctggcttccctgaggtagcccgcatggtcagggagagccatggagagacaaggagcccggaaaaccggtctcctactccctccctccagtactgcgagaactgtgacacccacttccaagattccaaccaccgcacatccactgctcacctgctgtcactgtcgcagggtcctcagcctcccaaccttccacttggggtgcccatctccagcccgggcttcaaactgctgctgagggggggctgggagccaggaatggggctgggaccccggggtgagggccgtgccaatcccatccccactgtcctcaagagggaccaggaaggactaggctacagatcagcaccccagccccgagtgacacatttcccagcttgggatacccgagctgtggctgggagggagagaccccctcgggtggccacactgagctggagggaggagagaaggagggaggagaaagacagggcttgggagcgggatctaaggacttacatgaacctcgagttctgactttggtaaagtctgaccctagtctgctgctgaagtctgaacttgggcctctgacctgggccctttgacttccccttcctgggatctgctcagatgcagatcctgaagtttttggtcaataggctctgtcttcgtgagagacgggctgagagtcagaaataaatcaaccatttgtggtttaaaaaaaaaaaaaaaaaaaaaaaa

SEQ ID NO: 1156 - DNA, 3419 bp, Homo sapiens
ttccctccggtgaatcatcgctcgcagcggcggcgcccgcagtggccgcagcagcgcgccgggccctggccgcgccccagccgagcgcagcgcggagtcgccccgacctttctctgcgcagtacggccgccgggaccgcagcatggcgggcatcgcggccaagctggcgaaggaccgggaggcggccgaggggctgggctcccacgagagggccatcaagtacctcaaccaggactacgaggcgctgcggaacgagtgcctggaggccgggacgctcttccaggacccgtccttcccggccatcccctcggccctgggcttcaaggagttggggccctactccagcaaaacccggggcatgagatggaagcgccccacggagatctgcgctgacccccagtttatcattggaggagccacccgcacagacatctgccaaggagccctaggtgactgctggctgctggcagccattgcctccctcaccttgaatgaagaaatcctggctcgagtcgtccccctaaaccagagcttccaggaaaactatgcagggatctttcacttccagttctggcaatacggcgagtgggtggaggtggtggtggatgacaggctgcccaccaaggacggggagctgctctttgtgcattcagccgaagggagcgagttctggagcgccctgctggagaaggcatacgccaagatcaacggatgctatgaagctctatcagggggtgccaccactgagggcttcgaagacttcaccggaggcattgctgagtggtatgagttgaagaagccccctcccaacctgttcaagatcatccagaaagctctgcaaaaaggctctctccttggctgctccatcgacatcaccagcgccgcggactcggaggccatcacgtttcagaagctggtgaaggggcacgcgtactcggtcaccggagccgaggaggttgaaagtaacggaagcctacagaaactgatccgcatccgaaatccctggggagaagtggagtggacagggcggtggaatgacaactgcccaagctggaacactatagacccagaggagagggaaaggctgaccagacggcatgaagatggagaattctggatgtctttcagtgacttcctgaggcactattcccgcctggagatctgtaacctgaccccagacactctcaccagcgatacctacaagaagtggaaactcaccaaaatggatgggaactggaggcggggctccaccgcgggaggttgcaggaactacccgaacacattctggatgaaccctcagtacctgatcaagctggaggaggaggatgaggacgaggaggatggggagagcggctgcaccttcctggtggggctcattcagaagcaccgacggcggcagaggaagatgggcgaggacatgcacaccatcggctttggcatctatgaggttccagaggagttaagtgggcagaccaacatccacctcagcaaaaacttcttcctgacgaatcgcgccagggagcgctcagacaccttcatcaacctccgggaggtgctcaaccgcttcaagctgccgccaggagagtacattctcgtgccttccaccttcgaacccaacaaggatggggatttctgcatccgggtcttttctgaaaagaaagctgactaccaagctgtcgatgatgaaatcgaggccaatcttgaagagttcgacatcagcgaggatgacattgatgatggagtcaggagactgtttgcccagttggcaggagaggatgcggagatctctgcctttgagctgcagaccatcctgagaagggttctagcaaagcgccaagatatcaagtcagatggcttcagcatcgagacatgcaaaattatggttgacatgctagattcggacgggagtggcaagctggggctgaaggagttctacattctctggacgaagattcaaaaataccaaaaaatttaccgagaaatcgacgttgacaggtctggtaccatgaattcctatgaaatgcggaaggcattagaagaagcaggtttcaagatgccctgtcaactccaccaagtcatcgttgctcggtttgcagatgaccagctcatcatcgattttgataattttgttcggtgtttggttcggctggaaacgctattcaagatatttaagcagctggatcccgagaatactggaacaatagagctcgaccttatctcttggctctgtttctcagtactttgaagttataactaatctgcctgaagacttctcatgatggaaaatcagccaaggactaagcttccatagaaatacactttgtatctggacctcaaaattatgggaacatttacttaaacggatgatcatagctgaaaataatgatactgtcaatttgagatagcagaagtttcacacatcaaagtaaaagatttgcatatcattatactaaatgcaaatgagtcgcttaacccttgacaaggtcaaagaaagctttaaatctgtaaatagtatacactttttacttttacacactttcctgttcatagcaatattaaatcaggaaaaaaaaatgcagggaggtatttaacagctgagcaaaaacattgagtcgctctcaaaggacacgaggcccttggcagggaatatttaaagcaacttcaagtttaaaatgcagctgttgattctaccaaacaacagtccaagattaccatttcccatgagccaactgggaaacatggtatatcatgaagtaatcttgtcaaggcatctggagagtccaggagaggagactcacctctgtcgcttgggttaaacaagagacaggttttgtagaatattgattggtaatagtaaatcgttctccttacaatcaagttcttgaccctattcggccttatacatctggtcttacaaagaccaaagggatcctgcgcttgatcaactgaaccagtatgccaaaaccaggcatccaatttgtaaaccaattatgataaaggacaaaataagctgtttgccacctcaaaactttatgaacttcaccaccactagtgtctgtccatggagttagaggggacatcacttagaagttcttatagaaaggacacaagtttgtttcctggctttaccttgggaaaatgctagcaacattatagaaattttgccttgttgccttatcttcttccaaatgtactgttaaataaaaataaagggttaccccatgcaatcacaccatgccatgttttccttcctggagggcagccccacaggacggtttatgagcacacaattatagcttgtttctactttaacagggtatgctgcctctgtaaattcatgtattcaaaggaaaagacaccttgcctataattaaaatgtggaactataaaattttttaaaatccaaaaaaaaaaaaaaa

SEQ ID NO: 1157 - DNA, 2802 bp, Homo sapiens
gtgtggctggccatggcgctgttctacgtcgcgcggtacccgggccccgatgcggcagctgcggcggggccggagggcgcggaggccggggcgcacggcagggcccgcgcgctgctcgagcggctgcagagccaggcccgcgaacggcagcagcagcgggagcccgcgcagaccgaggcggctgcatcgaccgagccggcgaccaggaggcgacggcggccccggcggcggcggcgggtgaacgacgcggagccggggagcccggaggcgccgcagggaaagcgacggaaggcggacggcgaggacgcgggcgcagaaagcaacgaggaggcgccaggggagcccagcgcagggagcagcgaggaggcgcaaggggggcccagcgcagggagcagcgaggaggcgccgggggtgcgcagcaccagcgccagcgccgaggcggccccagatggaccggccctggaggaggcggccggacccctggtccccggcctggtgctgggggggttcgggaagaggaaggcgccgaaggtcaagcctttcctgccaaggtggctggctgagcctaactgtgtcagaaggaatgtcaccgaagacctggttcctatcgaggacatccctgacgtccatcctgacctgcagaagcagctgcgggcacacggcatctcgtcctactttccagtccaggcagctgtgattcctgccctcctggagagcgcagcctgtgggtttctggtgggcagaggtggctaccggcttagcgacctctgtgtttctgccccaacaggcagtgggaagacactggccttcgtcatccctgtggtgcaggccctgctttcgagagtggtctgccacatccgtgccctggttgtgctgcccaccaaggagctggcccggcaggtgagcaaagttttcaacatctacacagatgccacacctctgagagtctccctggttacgggacagaagtctctggccaaggagcaggagagcctcgtccagaaaacagctgatgggtaccgctgcttggctgacatcgtggtagccacccccggccgcctggtggaccacatcgaccagaccccaggattcagcctccagcagctccgcttcctgattatcgacgaggctgaccggatgattgacagcatgcatcagtcctggctgccgcgggtggtggcggccgccttccagagcgaggaccccgcggacccctgtgccctgctcaagcgaaggcaggcccaggctgtgacagccgccagcacctgctgtccccagatgcccctgcagaagctgctcttctcagctactctgacccagaaccctgaaaagctgcagcagctgggcctccaccagccccggcttttctccacagggctagcacacaggggcctggaagatacagatggggacggggattcggggaagtatgcctttcctgttgggctcacgcaccactacgtgccctgcagcctcagctctaagccgctggtcgtcctgcacctggtcctggagatgggcttctcgagggttctctgcttcactaactcccgagagaactcccacaggctcttcctgctggtgcaagcttttgggggtgtggacgtggctgagttctcctcgcgctacgggcctggccagaggaggatgatcctgaagcagtttgaacaggggaagatccagctgctcatcagcacggacgccaccgcgcgaggcatcgacgtgcagggtgtggagctggtggtgaactacgacgccccccagtacctgagaacctacgtgcaccgggttgggaggacagctcgcgctgggaaaactggacaggccttcacactgctcctgaaagtgcaggagaggagattcctccgaatgctaactgaagctggggcacctgagttgcagcggcacgagctctccagcaagctgctgcagccgctggttcctcggtacgaggaggccctgtccaagctggaggagtctgtcaaggaagagcgcaagcagagggcggcctaggctggggctcagagggccggagggactgaacgctcaccaccctgaccctccttccagagcagtgctgatcactggatcctgtatgtgaggaaaggaatcccccagtggacacagccttcctccccaagcacgtggtctctgcgccaggcagccagggcgtcagagctcaagcacctgccccgactggagacttcagggcttgtcactttcagagtgtggaggtcaggatggctgcgggcaatgaagccttagtaaaacggtgaaaagtactcccagacggacgcgggcacccgtcatgcttttgctgagagttgggggcattaaccttgagctaatgttaaaaatcaagctcttggccaggcatggtggctcatgcctgtaattccagcactttgggaggccaaggcgggtggatcacctgaggtcacgagttcgagaccagcctgaccaacatggagaaaccctgtctctactaaaaatacaaaattagccaggcgtggtggtgcatgcctgtaatccagctacttgggaggctgaggcaggaaaatggcttgaacccgggaggtggaggttgcagtgagctgagattgcgccactgcactccagcctgggcaacaagagcaaaactccgtctcaaaaaaaaaaattgccgggcgcggtggcaaatgcctgtaatcccagcactttgggaggccgaggcaggtggatcacaaggtcaggagatagagaccatcattgctaacatggtgaaaccccgtctctactaaaaatgcaaaaaaaaaaaaaaaa

SEQ ID NO: 1158 - DNA, 2136 bp, Homo sapiens
gcagagcggcggcttctctcgcgaggacggacgccattatcgcatctccccgacaaacaccacgagaattccgcagcccacacggtgaccaaaagccagccccactgtgagttgaactctttcgtgttgaccggccactctccgtgctctggatgatgtcggaacacgacctggccgatgtggttcagattgcagtggaagacctgagccctgaccacccagttgttttggagaatcatgtagtgacagatgaagacgaacctgctttgaaacgccagcgactagaaatcaattgccaggatccatctataaagtcattcctgtattccatcaaccagacaatctgcttgcggttggatagcattgaagccaaattgcaagccctggaggctacttgtaaatccttagaagaaaagctggatctggtcacgaacaagcagcacagccccatccaggtccccatggtggccggctcccctctcggggcaacccagacgtgcaacaaagtgcgatgcgctgtgcctgggcgtcggcagaacaccattgtggtgaaggtgccgggccaagaagacagccaccacgaggacggggagagcggctcggaggccagcgactctgtgtccagctgtgggcaggcgggcagtcagagcatcgggagcaacgtcacgctcatcaccctgaactcggaagaggactaccccaatggcacctggctgggcgacgagaacaaccccgagatgcgggtacgctgcgccatcatcccctccgacatgctgcacatcagcaccaactgccgcacggccgagaagatggcgctaacgctgctggactacctcttccaccgcgaggtgcaggctgtgtccaacctctcggggcagggcaagcacgggaagaagcagctggacccgctcaccatctacggcatccggtgtcaccttttctataaatttggcatcacagaatccgactggtaccgaatcaagcagagcatcgactccaagtgccgcacggcgtggcggcgcaagcagcggggccagagcctggcggtcaagagcttctcgcggagaacgcccaactcgtcctcctactgcccttcagagccgatgatgagcaccccacctcctgccagcgagctcccgcagccacagccgcagccgcaggccctgcactacgcgctggccaacgcacagcaggtgcagatccaccagatcggagaagacggacaggtgcaagtaatcccacagggacacctccacatcgcccaggtgccgcagggggagcaagtccagatcacgcaggacagcgagggcaacctccagatccatcacgtggggcaggacggtcaggtgctgcagggtgcacagctgatcgccgtggcctcctcggaccccgcggcggcgggcgtggatgggtcgccactccagggcagcgacatccaggttcagtacgtgcagctggcgccagtgagtgaccacacggccggggcacagacggccgaagccctgcagcccacgctacagccggagatgcagctcgagcacggggccatccagattcagtgagcggtgcccatggcaccaggagcccctcgccggctccgcctacggcccggcccccacgcgccctgctctcacggcctcggcacaggcagcggctgcacgtgttctgctgaagtgcgtctgaaggccgctgcctccgcggggaacagcatcctatgaactgaaagagcagccgccgccgcccccagccggagacccctttcgtttgagtcctgctgttggtgtcggagcacgaggggaggcacggtgcggagagcgtcgcatatgcgcgggaaatcaagaactatgatatttttctgtttaaacagctttttttaatttgctatggtgtttataacaaaaaagaaaatttgaaaaaaaaaatcccaggggagtagcaggagccctttgctgtgtgctctgtccagtgtcatgagacgggagccctttgctgtgtgctctgtccagtgtcatgaggcaggtgtttgcaaagccagctctcggttccgatggggtattgctgacctacttttctaggggaaatgctcttaaacactgtaattatgcatttctaatgaaataaaatgtatttatgacc

SEQ ID NO: 1159 - DNA, 2127 bp, Homo sapiens
gcagagcggcggcttctctcgcgaggacggacgccattatcgcatctccccgacaaacaccacgagaattccgcagcccacacggtgaccaaaagccagccccactgtgagttgaactctttcgtgttgaccggccactctccgtgctctggatgatgtcggaacacgacctggccgatgtggttcagattgcagtggaagacctgagccctgaccacccagttgttttggagaatcatgtagtgacagatgaagacgaacctgctttgaaacgccagcgactagaaatcaattgccaggatccatctataaagtcattcctgtattccatcaaccagacaatctgcttgcggttggatagcattgaagccaaattgcaagccctggaggctacttgtaaatccttagaagaaaagctggatctggtcacgaacaagcagcacagccccatccaggtccccatggtggccggctcccctctcggggcaacccagacgtgcaacaaagtgcgatgcgctgtgcctgggcgtcggcagaacaccattgtggtgaaggtgccgggccaagaagacagccaccacgaggacggggagagcggctcggaggccagcgactctgtgtccagctgtgggcaggcgggcagtcagagcatcgggagcaacgtcacgctcatcaccctgaactcggaagaggactaccccaatggcacctggctgggcgacgagaacaaccccgagatgcgggtacgctgcgccatcatcccctccgacatgctgcacatcagcaccaactgccgcacggccgagaagatggcgctaacgctgctggactacctcttccaccgcgaggtgcaggctgtgtccaacctctcggggcagggcaagcacgggaagaagcagctggacccgctcaccatctacggcatccggtgtcaccttttctataaatttggcatcacagaatccgactggtaccgaatcaagcagagcatcgactccaagtgccgcacggcgtggcggcgcaagcagcggggccagagcctggcggtcaagagcttctcgcggagaacgcccaactcgtcctcctactgcccttcagagccgatgatgagcaccccacctcctgccagcgagctcccgcagccacagccgcagccgcaggccctgcactacgcgctggccaacgcacagcaggtgcagatccaccagatcggagaagacggacaggtgcaagtaggacacctccacatcgcccaggtgccgcagggggagcaagtccagatcacgcaggacagcgagggcaacctccagatccatcacgtggggcaggacggtcaggtgctgcagggtgcacagctgatcgccgtggcctcctcggaccccgcggcggcgggcgtggatgggtcgccactccagggcagcgacatccaggttcagtacgtgcagctggcgccagtgagtgaccacacggccggggcacagacggccgaagccctgcagcccacgctacagccggagatgcagctcgagcacggggccatccagattcagtgagcggtgcccatggcaccaggagcccctcgccggctccgcctacggcccggcccccacgcgccctgctctcacggcctcggcacaggcagcggctgcacgtgttctgctgaagtgcgtctgaaggccgctgcctccgcggggaacagcatcctatgaactgaaagagcagccgccgccgcccccagccggagacccctttcgtttgagtcctgctgttggtgtcggagcacgaggggaggcacggtgcggagagcgtcgcatatgcgcgggaaatcaagaactatgatatttttctgtttaaacagctttttttaatttgctatggtgtttataacaaaaaagaaaatttgaaaaaaaaaatcccaggggagtagcaggagccctttgctgtgtgctctgtccagtgtcatgagacgggagccctttgctgtgtgctctgtccagtgtcatgaggcaggtgtttgcaaagccagctctcggttccgatggggtattgctgacctacttttctaggggaaatgctcttaaacactgtaattatgcatttctaatgaaataaaatgtatttatgacc

SEQ ID NO: 1160 - DNA, 2211 bp, Homo sapiens
cctgcccgcgcaccgcgctcagcgcccaccgccgggcttcccgcgccggacccagtacctcggctccccggggccggaccgaggccgcaagcagcgccgcggggtgtggggcggacccaggagatgaaatgacaacgtcaaccctccagaaagccattgatctggtgacgaaagccacagaggaggacaaagccaagaactacgaggaggcgctgcggctgtaccagcatgcggtggagtacttcctccacgctatcaagtatgaggcccacagcgacaaggccaaggagagcattcgagccaagtgcgtgcagtacctagaccgggccgagaagctgaaggattatttacgaagcaaagagaaacacggcaagaagccagtcaaagagaaccagagtgagggcaagggcagtgacagtgacagtgaaggggataatccggagaaaaagaaactgcaagaacagctgatgggtgccgtcgtgatggagaagcccaacatacggtggaacgacgtggccgggctggagggggccaaggaggccctcaaagaagctgtcattttgccaatcaaattcccacacttgttcacaggcaagcgcaccccctggcgggggattctgctgttcggaccccctggcacagggaaatcctacctggccaaagccgtggcaacagaggccaacaactccaccttcttctctgtgtcctcctcagatctgatgtccaagtggctgggggagagtgaaaagctggtcaagaacctgtttgagctggccaggcagcacaagccctccatcatcttcatcgatgaggtggattccctctgcgggtcccgaaatgaaaatgagagtgaggccgcccggaggatcaaaacggagttcttggtccagatgcagggggtggggaataacaatgatgggactctggttcttggagccacaaacatcccatgggtgttggattcggccatcaggaggaggtttgaaaaacgaatttatatccccttgccggaggaagctgcccgcgcccagatgttccggttgcatctcgggagcactccccacaacctcacggatgcaaacatccacgagctggcccggaagacggaaggctactcgggcgcggacatcagcatcatcgtgcgggactctctcatgcagcccgtgaggaaggtgcagtcggccacacacttcaaaaaggtctgtggcccctctcgcaccaaccccagcatgatgattgatgacctcctgactccatgctcaccaggggacccaggagccatggagatgacttggatggatgtccctggggacaaactcttagagcctgtggtttgcatgtcggacatgctgcggtctctggccaccacccggcccacggtgaatgcagacgacctcctgaaagtgaagaaattctcagaggactttgggcaagagagttaaaagctgcttcacttgggcaatggtgaaggtgggaggttgattggggcaaatccaggcactccccatgtcaacagccagacagggctccagggcttgtcccagtcaatacagagttccctctgctgtctggccgtctgccagggagccagaaggaagggccttgcagccacagagacactccactgccctggggcacacagtggacactgctcttcctacttcctcctctcctggatgctcatcagctccttctgcctcccccccttttttttccatcttttgttcccctaaattaatgctgcttggattttcatcttatttataaagataaaatcacctggaagtgtcaaggagtggggcggggtggcgggggagaagcagccgtgctgccaggtcacccagacctccagacagccggctagccccactgcccgttccttttacgcccaagttttgctccttgagagcagattggctgatgcccctgcaaccccagcccaagctctgcctcaaagaccgagtgacataagccattcccaccctcctaggttcacatccagggctgtgtcttccttgggggaggagatggtgtcgtttagatcagggtaaggcagtcaggcgggtgttcaccactgccttttcttcctctgagcgtgagaacactgaacccagccactgcccctgggtccctgtcctggaaatggtctaataaatccttttcccttcttgagctaaaaaaaaaaaaaaaaaaaaaaaaaaaaaaaaaaaa

SEQ ID NO: 1161 - DNA, 1802 bp, Homo sapiens
agccttcaagtcggcccaaacacggtttctgcctcaaggattatttatataaccattgcttattggctgctggcaaacactcgctcttctcgttggctgaaactgtcgggagaagttctgcgaaggctgctccttgcggcgttgggactgagggtcacaggcacctgtatttccgtttccggttcgcctccggagccatggcggcggcactgaagtgtctactgacattaggaagatggtgccccggccttggagtggctccccaggcccgggcgctcgccgccttagtacccggagtgacccaggtagataacaagtccggtttcctgcagaagaggcctcatcgccagcaccctggcatcctaaagctgccgcacgtgcggctgccacaggcactggctaacggtgcccagttattgctacttgggagcgctgggcccactatggagaatcaggtgcaaacactgaccagttatctctggagcagacatttgcctgtagagccagaggagttgcaaagacgggctaggcatcttgagaaaaaattcctggaaaacccagacttatctcagacagaggagaaacttcgtggagcagtgctacacgcactacgtaaaactacctaccattggcaagaactgagctacactgagggactgagcctggtgtatatggcagcaagactggatggtggctttgcagcagtctccagagcattccatgagatccgggctcgaaatccagcatttcagccacaaactttgatggactttggctcaggtactggttctgtcacctgggctgctcacagtatttggggccagagcctacgtgaatatatgtgtgtggacagatcagctgccatgttggttttggcagaaaaactactgaaaggtggttcagaatctggggagccttatattccaggtgtctttttcagacagtttctacctgtatcacccaaggtgcagtttgatgtagtagtgtcagctttttccttaagtgaactgcccagcaaggctgaccgcactgaggtagttcaaaccttatggcgtaagacaggtcatttcctggtactggtggagaatggaacaaaagctgggcacagccttctcatggatgccagggatctggtccttaagggaaaagagaagtcacctttggaccctcgacctggttttgtctttgccccgtgtccccatgaactcccttgtccccagttgaccaacctggcctgtagcttctcacaggcgtaccatcccatccccttcagctggaacaagaaaccaaaggaagaaaagttctctatggtgatccttgctcgggggtctccagaggaggctcatcgctggccccgtatcactcagcctgtccttaaacggcctcgccatgtgcattgtcacttgtgctgtccagatgggcacatgcagcatgctgtgctcacagcccgccggcacggcaggtatggggggtgtgaccaaaatcagtgggatgtggcaggaagctgcagcccacgccagcatctgtttccacagggatttgtatcgttgtgcccgtgtcagctcctggggagatcttttacctgtgcttactccgtctgcgtttcctccatctacggctcaggatccctctgagagttgatgaggatgtgtaacaagtattttcttctatcgtgcctgccagggctgaagctgcctggtatccaggaggggaatgctggtatccccatatgtctgtgtttgtttgagatttttaataataaataataaatttttgaagaatggaaaaaaaaaaaaaaaaaa

SEQ ID NO: 1162 - DNA, 1834 bp, Homo sapiens
agccttcaagtcggcccaaacacggtttctgcctcaaggattatttatataaccattgcttattggctgctggcaaacactcgctcttctcgttggctgaaactgtcgggagaagttctgcgaaggctgctccttgcggcgttgggactgagggtcacaggcacctgtatttccgtttccggttcgcctccggagccatggcggcggcactgaagtgtctactgacattaggaagatggtgccccggccttggagtggctccccaggcccgggcgctcgccgccttagtacccggagtgacccaggtagataacaagtccggtttcctgcagaagaggcctcatcgccagcaccctggcatcctaaagctgccgcacgtgcggctgccacaggcactggctaacggtgcccagttattgctacttgggagcgctgggcccactatggagaatcaggtgcaaacactgaccagttatctctggagcagacatttgcctgtagagccagaggagttgcaaagacgggctaggcatcttgagaaaaaattcctggaaaacccaggtcctgacttccagtccttgttctcaccacagacttatctcagacagaggagaaacttcgtggagcagtgctacacgcactacgtaaaactacctaccattggcaagaactgagctacactgagggactgagcctggtgtatatggcagcaagactggatggtggctttgcagcagtctccagagcattccatgagatccgggctcgaaatccagcatttcagccacaaactttgatggactttggctcaggtactggttctgtcacctgggctgctcacagtatttggggccagagcctacgtgaatatatgtgtgtggacagatcagctgccatgttggttttggcagaaaaactactgaaaggtggttcagaatctggggagccttatattccaggtgtctttttcagacagtttctacctgtatcacccaaggtgcagtttgatgtagtagtgtcagctttttccttaagtgaactgcccagcaaggctgaccgcactgaggtagttcaaaccttatggcgtaagacaggtcatttcctggtactggtggagaatggaacaaaagctgggcacagccttctcatggatgccagggatctggtccttaagggaaaagagaagtcacctttggaccctcgacctggttttgtctttgccccgtgtccccatgaactcccttgtccccagttgaccaacctggcctgtagcttctcacaggcgtaccatcccatccccttcagctggaacaagaaaccaaaggaagaaaagttctctatggtgatccttgctcgggggtctccagaggaggctcatcgctggccccgtatcactcagcctgtccttaaacggcctcgccatgtgcattgtcacttgtgctgtccagatgggcacatgcagcatgctgtgctcacagcccgccggcacggcaggtatggggggtgtgaccaaaatcagtgggatgtggcaggaagctgcagcccacgccagcatctgtttccacagggatttgtatcgttgtgcccgtgtcagctcctggggagatcttttacctgtgcttactccgtctgcgtttcctccatctacggctcaggatccctctgagagttgatgaggatgtgtaacaagtattttcttctatcgtgcctgccagggctgaagctgcctggtatccaggaggggaatgctggtatccccatatgtctgtgtttgtttgagatttttaataataaataataaatttttgaagaatggaaaaaaaaaaaaaaaaaa

SEQ ID NO: 1163 - DNA, 1729 bp, Homo sapiens
agccttcaagtcggcccaaacacggtttctgcctcaaggattatttatataaccattgcttattggctgctggcaaacactcgctcttctcgttggctgaaactgtcgggagaagttctgcgaaggctgctccttgcggcgttgggactgagggtcacaggcacctgtatttccgtttccggttcgcctccggagccatggcggcggcactgaagtgtctactgacattaggaagatggtgccccggccttggagtggctccccaggcccgggcgctcgccgccttagtacccggagtgacccaggtagataacaagtccggtttcctgcagaagaggcctcatcgccagcaccctggcatcctaaagctgccgcacgtgcggctgccacaggcactggctaacggtgcccagttattgctacttgggagcgctgggcccactatggagaatcaggtgcaaacactgaccagttatctctggagcagacatttgcctgtagagccagaggagttgcaaagacgggctaggcatcttgagaaaaaattcctggaaaacccagacttatctcagacagaggagaaacttcgtggagcagtgctacacgcactacgtaaaactacctaccattggcaagaactgagctacactgagggactgagcctggtgtatatggcagcaagactggatggtggctttgcagcagtctccagagcattccatgagatccgggctcgaaatccagcatttcagccacaaactttgatggactttggctcaggtactggttctgtcacctgggctgctcacagtatttggggccagagcctacgtgaatatatgtgtgtggacagatcagctgccatgttggttttggcagaaaaactactgaaaggtggttcagaatctggggagccttatattccaggtgtctttttcagacagtttctacctgtatcacccaaggtgcagtttgatgtagtagtgtcagctttttccttaagtgaactgcccagcaaggctgaccgcactgaggtagttcaaaccttatggcgtaagacaggtcatttcctggtactggtggagaatggaacaaaagctgggcacagccttctcatggatgccagggatctggtccttaagggaaaagagaagtcacctttggaccctcgacctggttttgtctttgccccgtgtccccatgaactcccttgtccccagttgaccaacctggcctgtagcttctcacaggcgtaccatcccatccccttcagctggaacaagaaaccaaaggaagaaaagttctctatggtgatccttgctcgggggtctccagaggaggctcatcgctggccccgtatcactcagcctgtccttaaacggcctcgccatgtgcattgtcacttgtgctgtccagatgggcacatgcagcatgctgtgctcacagcccgccggcacggcagggatttgtatcgttgtgcccgtgtcagctcctggggagatcttttacctgtgcttactccgtctgcgtttcctccatctacggctcaggatccctctgagagttgatgaggatgtgtaacaagtattttcttctatcgtgcctgccagggctgaagctgcctggtatccaggaggggaatgctggtatccccatatgtctgtgtttgtttgagatttttaataataaataataaatttttgaagaatggaaaaaaaaaaaaaaaaaa

SEQ ID NO: 1164 - DNA, 4206 bp, Homo sapiens
ataatacctaccttgcaggaccacgacaggattaagtgaggaaaaacccccatgagagtgttttgccattgtcaagtgagcctgagggaggctgaggggggatcaggctgtatcatgcccccgaggacaaactttccagtttaccctgctccctctctctgtccctaggctgccccaggccctgtgcagacacaccaggccctcagccgcagcccatggacctgcgggtgggccagcggcccccagtggagcccccaccagagcccacattgctggccctgcagcgtccccagcgcctgcaccaccacctcttcctagcaggcctgcagcagcagcgctcggtggagcccatgaggctctccatggacacgccgatgcccgagttgcaggtgggaccccaggaacaagagctgcggcagcttctccacaaggacaagagcaagcgaagtgctgtagccagcagcgtggtcaagcagaagctagcggaggtgattctgaaaaaacagcaggcggccctagaaagaacagtccatcccaacagccccggcattccctacagaaccctggagcccctggagacggaaggagccacccgctccatgctcagcagctttttgcctcctgttcccagcctgcccagtgaccccccagagcacttccctctgcgcaagacagtctctgagcccaacctgaagctgcgctataagcccaagaagtccctggagcggaggaagaatccactgctccgaaaggagagtgcgccccccagcctccggcggcggcccgcagagaccctcggagactcctccccaagtagtagcagcacgcccgcatcagggtgcagctcccccaatgacagcgagcacggccccaatcccatcctgggctcggaggcgctcttgggccagcggctgcggctgcaggagacttctgtggccccgttcgccttgccgacagtgtccttgctgcccgcaatcactctggggctgcccgcccctgccagggctgacagtgaccgcaggacccatccgactctgggccctcgggggccaatcctggggagcccccacactcccctcttcctgccccatggcttggagcccgaggctgggggcaccttgccctctcgcctgcagcccattctcctcctggacccctcaggctctcatgccccgctgctgactgtgcccgggcttgggcccttgcccttccactttgcccagtccttaatgaccaccgagcggctctctgggtcaggcctccactggccactgagccggactcgctcagagcccctgccccccagtgccaccgctcccccaccgccgggccccatgcagccccgcctggagcagctcaaaactcacgtccaggtgatcaagaggtcagccaagccgagtgagaagccccggctgcggcagataccctcggctgaagacctggagacagatggcgggggaccgggccaggtggtggacgatggcctggagcacagggagctgggccatgggcagcctgaggccagaggccccgctcctctccagcagcaccctcaggtgttgctctgggaacagcagcgactggctgggcggctcccccggggcagcaccggggacactgtgctgcttcctctggcccagggtgggcaccggcctctgtcccgggctcagtcttccccagccgcacctgcctcactgtcagccccagagcctgccagccaggcccgagtcctctccagctcagagacccctgccaggaccctgcccttcaccacagggctgatctatgactcggtcatgctgaagcaccagtgctcctgcggtgacaacagcaggcacccggagcacgccggccgcatccagagcatctggtcccggctgcaggagcgggggctccggagccagtgtgagtgtctccgaggccggaaggcctccctggaagagctgcagtcggtccactctgagcggcacgtgctcctctacggcaccaacccgctcagccgcctcaaactggacaacgggaagctggcagggctcctggcacagcggatgtttgtgatgctgccctgtggtggggttggggtggacactgacaccatctggaatgagcttcattcctccaatgcagcccgctgggccgctggcagtgtcactgacctcgccttcaaagtggcttctcgtgagctaaagaatggtttcgctgtggtgcggcccccaggacaccatgcagatcattcaacagccatgggcttctgcttcttcaactcagtggccatcgcctgccggcagctgcaacagcagagcaaggccagcaagatcctcattgtagactgggacgtgcaccatggcaacggcacccagcaaaccttctaccaagaccccagtgtgctctacatctccctgcatcgccatgacgacggcaacttcttcccggggagtggggctgtggatgaggtaggggctggcagcggtgagggcttcaatgtcaatgtggcctgggctggaggtctggacccccccatgggggatcctgagtacctggctgctttcaggatagtcgtgatgcccatcgcccgagagttctctccagacctagtcctggtgtctgctggatttgatgctgctgagggtcacccggccccactgggtggctaccatgtttctgccaaatgttttggatacatgacgcagcaactgatgaacctggcaggaggcgcagtggtgctggccttggagggtggccatgacctcacagccatctgtgacgcctctgaggcctgtgtggctgctcttctgggtaacagggtggatcccctttcagaagaaggctggaaacagaaacccaacctcaatgccatccgctctctggaggccgtgatccgggtgcacagtaaatactggggctgcatgcagcgcctggcctcctgtccagactcctgggtgcctagagtgccaggggctgacaaagaagaagtggaggcagtgaccgcactggcgtccctctctgtgggcatcctggctgaagataggccctcggagcagctggtggaggaggaagaacctatgaatctctaaggctctggaaccatctgcccgcccaccatgcccttgggacctggttctcttctaacccctggcaatagcccccattcctgggtctttagagatcctgtgggcaagtagttggaaccagagaacagcctgcctgctttgacagttatcccagggagcgtgagaaaatccctgggtctagaatgggaactggagaggaccctgagaggagacgggctgggcggcgacccccacagggctctcgagaacagattctcccctccagtatgggccctggctgtggcccccattcctcaggactgcacagaggaggactggctccggctccgtcgggctcacccttaaccactattcctggctctgcaaaccccagactttgcacacagccccaggctccacacagaaatgtgaacttggcctcagacaggctggcccttcctaggctctaggggctaggggggagtggggagccaagaggtcccatattcctgagtgcaggggtagtccctctcacctgcttcctcagacgactctggaagcttccctctaccaccgggcactgagacgaagctccctgacagccgagactggcagccctccatctggtccgtaccctcgccagaggcccccctacatcaacctcctggcgatgccctggtggagcagatgggtgctctgggagtcctgtgcttcctgatccaatggtgccaaacccttcatctcccccagaagcgcagcatacccctgggacccctcggccactgcccactcggggagccttctctgtttctggggcctcccccaccatagctctgattcccaccccacataggaatagcctgactgagggggaaggggtgggagagaagatacagacatggaggaggggaggctgctctggcaaagtcttcaaggcttttgggggtccaggcctggggtcaagaaggaaaatgtgtgtgagcatgtgtgtgagtgaggcgtgtgtgtgagcgtgtgtgtgagtgaggcgtgtgtgtgtgtctttcctaggacccaccataccctgtgtatgtatgcatgtttttgtaaaaaggaagaaaatggaaaaaaatctgaacaataaatgttttatttgctttaaaaaaaaaaaaaaaaa

SEQ ID NO: 1165 - DNA, 4086 bp, Homo sapiens
ataatacctaccttgcaggaccacgacaggattaagtgaggaaaaacccccatgagagtgttttgccattgtcaagtgagcctgagggaggctgaggggggatcaggctgtatcatgcccccgaggacaaactttccagtttaccctgctccctctctctgtccctaggctgccccaggccctgtgcagacacaccaggccctcagccgcagcccatggacctgcgggtgggccagcggcccccagtggagcccccaccagagcccacattgctggccctgcagcgtccccagcgcctgcaccaccacctcttcctagcaggcctgcagcagcagcgctcggtggagcccatgaggctctccatggacacgccgatgcccgagttgcaggtgggaccccaggaacaagagctgcggcagcttctccacaaggacaagagcaagcgaagtgctgtagccagcagcgtggtcaagcagaagctagcggaggtgattctgaaaaaacagcaggcggccctagaaagaacagtccatcccaacagccccggcattccctacagaaccctggagcccctggagacggaaggagccacccgctccatgctcagcagctttttgcctcctgttcccagcctgcccagtgaccccccagagcacttccctctgcgcaagacagtctctgagcccaacctgaagctgcgctataagcccaagaagtccctggagcggaggaagaatccactgctccgaaaggagagtgcgccccccagcctccggcggcggcccgcagagaccctcggagactcctccccaagtagtagcagcacgcccgcatcagggtgcagctcccccaatgacagcgagcacggccccaatcccatcctgggcgacagtgaccgcaggacccatccgactctgggccctcgggggccaatcctggggagcccccacactcccctcttcctgccccatggcttggagcccgaggctgggggcaccttgccctctcgcctgcagcccattctcctcctggacccctcaggctctcatgccccgctgctgactgtgcccgggcttgggcccttgcccttccactttgcccagtccttaatgaccaccgagcggctctctgggtcaggcctccactggccactgagccggactcgctcagagcccctgccccccagtgccaccgctcccccaccgccgggccccatgcagccccgcctggagcagctcaaaactcacgtccaggtgatcaagaggtcagccaagccgagtgagaagccccggctgcggcagataccctcggctgaagacctggagacagatggcgggggaccgggccaggtggtggacgatggcctggagcacagggagctgggccatgggcagcctgaggccagaggccccgctcctctccagcagcaccctcaggtgttgctctgggaacagcagcgactggctgggcggctcccccggggcagcaccggggacactgtgctgcttcctctggcccagggtgggcaccggcctctgtcccgggctcagtcttccccagccgcacctgcctcactgtcagccccagagcctgccagccaggcccgagtcctctccagctcagagacccctgccaggaccctgcccttcaccacagggctgatctatgactcggtcatgctgaagcaccagtgctcctgcggtgacaacagcaggcacccggagcacgccggccgcatccagagcatctggtcccggctgcaggagcgggggctccggagccagtgtgagtgtctccgaggccggaaggcctccctggaagagctgcagtcggtccactctgagcggcacgtgctcctctacggcaccaacccgctcagccgcctcaaactggacaacgggaagctggcagggctcctggcacagcggatgtttgtgatgctgccctgtggtggggttggggtggacactgacaccatctggaatgagcttcattcctccaatgcagcccgctgggccgctggcagtgtcactgacctcgccttcaaagtggcttctcgtgagctaaagaatggtttcgctgtggtgcggcccccaggacaccatgcagatcattcaacagccatgggcttctgcttcttcaactcagtggccatcgcctgccggcagctgcaacagcagagcaaggccagcaagatcctcattgtagactgggacgtgcaccatggcaacggcacccagcaaaccttctaccaagaccccagtgtgctctacatctccctgcatcgccatgacgacggcaacttcttcccggggagtggggctgtggatgaggtaggggctggcagcggtgagggcttcaatgtcaatgtggcctgggctggaggtctggacccccccatgggggatcctgagtacctggctgctttcaggatagtcgtgatgcccatcgcccgagagttctctccagacctagtcctggtgtctgctggatttgatgctgctgagggtcacccggccccactgggtggctaccatgtttctgccaaatgttttggatacatgacgcagcaactgatgaacctggcaggaggcgcagtggtgctggccttggagggtggccatgacctcacagccatctgtgacgcctctgaggcctgtgtggctgctcttctgggtaacagggtggatcccctttcagaagaaggctggaaacagaaacccaacctcaatgccatccgctctctggaggccgtgatccgggtgcacagtaaatactggggctgcatgcagcgcctggcctcctgtccagactcctgggtgcctagagtgccaggggctgacaaagaagaagtggaggcagtgaccgcactggcgtccctctctgtgggcatcctggctgaagataggccctcggagcagctggtggaggaggaagaacctatgaatctctaaggctctggaaccatctgcccgcccaccatgcccttgggacctggttctcttctaacccctggcaatagcccccattcctgggtctttagagatcctgtgggcaagtagttggaaccagagaacagcctgcctgctttgacagttatcccagggagcgtgagaaaatccctgggtctagaatgggaactggagaggaccctgagaggagacgggctgggcggcgacccccacagggctctcgagaacagattctcccctccagtatgggccctggctgtggcccccattcctcaggactgcacagaggaggactggctccggctccgtcgggctcacccttaaccactattcctggctctgcaaaccccagactttgcacacagccccaggctccacacagaaatgtgaacttggcctcagacaggctggcccttcctaggctctaggggctaggggggagtggggagccaagaggtcccatattcctgagtgcaggggtagtccctctcacctgcttcctcagacgactctggaagcttccctctaccaccgggcactgagacgaagctccctgacagccgagactggcagccctccatctggtccgtaccctcgccagaggcccccctacatcaacctcctggcgatgccctggtggagcagatgggtgctctgggagtcctgtgcttcctgatccaatggtgccaaacccttcatctcccccagaagcgcagcatacccctgggacccctcggccactgcccactcggggagccttctctgtttctggggcctcccccaccatagctctgattcccaccccacataggaatagcctgactgagggggaaggggtgggagagaagatacagacatggaggaggggaggctgctctggcaaagtcttcaaggcttttgggggtccaggcctggggtcaagaaggaaaatgtgtgtgagcatgtgtgtgagtgaggcgtgtgtgtgagcgtgtgtgtgagtgaggcgtgtgtgtgtgtctttcctaggacccaccataccctgtgtatgtatgcatgtttttgtaaaaaggaagaaaatggaaaaaaatctgaacaataaatgttttatttgctttaaaaaaaaaaaaaaaaa

SEQ ID NO: 1166 - DNA, 7360 bp, Homo sapiens
gcggccgccgccaggcagcagaggcgactgcggacagccggcggggaccgggaaagaggaggcctggcgcctccggcagaggggcgaggaccgagcgcccaaggctgggagagacgccggcgctgagcttcccagcgccgcctcacctcgcttttcgaactccgcgacccgagcgcaaggcttaagcaggtaaagcagtcactgtgaagaaaataacattttaagaaacttttctgtcacaattgatagaggaaaagccagtagagaagtacatcttcttgtgtgtgtgtctcatcgtgccactttttgtaactcagcttagtaatgaagccaccattatgtcctcagtcagtgaagtaaatgtggatataaaagatttcctaatgagcattaatttggagcagtatctcttacatttccatgagtctggttttactactgtgaaggactgtgcagcaataaatgacagcctgctgcagaaaattggaatatcacctacaggtcaccgtaggaggatacttaaacagttacagataatcttgtcaaaaatgcaagatattccaatatatgcaaatgttcataaaactaagaagaatgatgacccttcaaaggattaccatgttccatcttctgatcagaatatctgcatagaactttccaattctggtagtgttcagacatctagcccaccgcagttggagactgttagaaaaaatcttgaagacagtgatgcaagtgtggaaagaagccagtatcctcaatcagatgataagctgtctcctcctaaacgcgacttccccactgcagaggaaccacacctgaatttgggttctttgaatgattctttatttggtagtgacaatattaaaatagaatcattgattacaaagaagactgtggatcacacagttgaagaacaacaaacagaaaaagttaaattgatcacagaaaatctcagtaagctccctaatgcagactctgaatgcctttcttttgttggctgttcaacatcaggaacaaattctggaaatggaacaaatggtttattagaaggatcaccaccatccccattctttaagtttcaaggagaaatgattgtaaatgacttgtatgttccatcatcaccaatcctagcacctgtgagaagtcgtagcaagttggtttcaagaccatctcgatcttttctgctaagacatcgacctgtaccagagattccagggtcaacaaaaggagtttctgggagctatttccgtgaaagaagaaatgttgctacctcaactgaaaaatctgtggcatggcaaaattcaaatgaggagaattcatcttccatctttccttatggagagacctttctcttccagagactagaaaattccaagaagcgatctataaagaatgaatttttgacccagggagaagcactcaaaggggaagcagctactgcaacaaactcttttatcatcaaatcaagcatatacgataacagaaaggagaaaataagcgaggacaaggtggaagatatttggatacctcgagaggacaaaaacaattttttgatagacactgcttctgaatcagaatactcaacagtagaagaatgctttcagagtttaagaagaaaaaattcaaaggcatctaaatctaggactcaaaaagccttgattttggactccgttaataggcacagttatccgttaagctcaacaagtggaaatgctgattcatcagccgtttcttcacaggcaatatctccctatgcctgcttttatggagcatctgcaaagaaggttaaatcaggatggctggataaactctctcctcaaggaaaacgcatgtttcaaaagagatgggtgaaatttgatggccttagcatttcttactacaataatgagaaggagatgtattcgaaaggaataattcccctttctgctatatcaacagtacgagttcaaggagacaacaaatttgaagttgttacaacacaaagaacttttgtttttagagtagaaaaagaagaggagagaaatgactggatcagcatactattaaatgcactgaaatcacaatcccttacctcgcagtctcaagctgttgttacacctgagaaatgtggatatcttgaattgagaggctataaggcaaaaatttttactgtgttaagtggaaacagtgtgtggctttgcaaaaacgaacaggattttaagagtggacttggtattaccataattcctatgaatgtagcaaatgtaaagcaagtggaccgaactgtgaaacaatcttttgaaataatcactccctacaggagtttcagctttacagccgagactgaaaaggagaaacaagactggattgaagctgtgcagcaatcaatagcagaaactctctctgattatgaagtagctgagaagatttggttcaatgaatccaacaggagctgtgcagattgtaaagccccagatcctgactgggcatccatcaatctctgtgttgtcatctgtaagaagtgtgcaggacagcatagatctttaggaccaaaagattccaaggttagaagtctaaaaatggatgctagcatttggagcaatgaactcatcgagctttttattgtcattggaaacaaaagagcaaatgacttttgggctggtaatcttcaaaaggatgaagaattacatatggactcaccagtagaaaagagaaaaaactttattactcagaaatataaagaaggaaaattcagaaaaactcttttggcatctctcaccaaagaagaattaaataaggctctatgtgctgctgtagtgaaaccggatgttctagaaacaatggctttgctgttcagtggagcagatgtcatgtgtgccaccggagaccccgtgcatagcaccccctatctgctagccaagaaagctgggcaaagtctgcaaatggaatttctctaccataacaaattctcagatttccctcaacatgatattcattccgagggtgtattaagtcaagagtcttcccagtccacattcctctgtgactttttatatcaagctccttctgctgcttctaaactctcttcagagaaaaaactgcttgaagagacaaataaaaaatggtgtgttttggaaggaggcttcttgagttactatgaaaatgataagtctaccacacctaatggcaccattaatatcaatgaagttatctgcctggctatacacaaagaggacttctatttaaatactgggcccatctttatctttgagatctacttaccctccgaacgtgtgtttttatttggagctgaaacatctcaagctcaaagaaaatggacagaggcaatagccaagcattttgttcccttatttgctgaaaacttaacagaagctgactatgatttgattggtcaactcttctacaaagactgccatgccctggatcagtggagaaaaggctggtttgctatggacaaatccagcttgcatttttgccttcaaatgcaagaagttcagggagatagaatgcacttaagaagactgcaagagctaacaatcagcacaatggttcaaaatggggaaaaactggatgttttactcttggtagaaaaagggagaacattatacatccatgggcataccaagttggatttcacagtctggcatactgcaattgaaaaagcagcaggtacagatggtaatgctttacaagatcagcagctcagcaaaaatgacgttcccattatagtgaacagctgtatagcatttgttacacagtatggtttaggatgcaaatatatctatcaaaagaatggtgatcctttgcatataagtgaactcctggagagtttcaaaaaggatgcaagaagctttaaattgagggctggaaaacatcagcttgaagatgtgacggctgtgttgaaaagttttctctctgacattgatgatgcactgcttactaaggagctctacccatattggatctctgctttagatacgcaagatgacaaggaaagaattaaaaaatatggagcatttatacgttctcttccaggggtcaaccgagcaacactagcagctatcattgaacacctgtatagggttcagaaatgctcagaaatcaatcacatgaatgcccataatttggccttggtcttttcatcctgtttgtttcaaacgaagggacaaactagtgaagaagtgaatgtaattgaggacctaattaataattatgtagaaatatttgaggttaaagaagatcaagtcaaacaaatggacatagaaaatagctttattaccaagtggaaagacacccaagtttcccaggctggagatttgttaattgaagtatatgtagaaaggaaggaacccgactgtagtattataattcggatatctcctgtgatggaagcagaagaattaactaatgatatattagcgataaaaaatattattcctacaaaaggtgatatttgggccacatttgaagtcattgaaaatgaagagctagagcgtcctcttcactacaaggaaaatgtactggagcaggtgcttcggtggagttcattagctgaacctggctctgcttacctggtggtgaagagattcttaaccgctgacacaattaaacactgcagtgaccggagtacactgggaagcatcaaagaaggaatcttgaaaatcaaagaagaaccatccaaaatactatctggaaataagtttcaagaccggtattttgttttacgagatgggtttctctttctttacaaggatgtgaagagtagtaaacatgacaagatgttttctctcagttccatgaagttttatcgtggagtgaaaaagaaaatgaagcctccaacaagctggggattgaccgcatattctgagaaacatcactggcacctgtgttgtgatagttcacgaactcagacggagtggatgaccagtatctttattgcccagcatgaatatgatatatggccaccagctggaaaggaacgaaaacgttcaataaccaaaaatcccaaaattggaggtttgcctctgattcctatacagcatgaggggaatgcaaccttggcccggaaaaatattgagagtgcaagagcagaacttgaaaggctgcggctcagtgaaaagtgtgataaagagtccgtggactctagcttaaaggagagagcttccatggtggcccactgcctggagcacaaggacgataaacttcgaaatcgaccccgaaaacatcggagtttcaactgcctggaggacacagagcctgaagccccacttgggcaaccaaaaggccataaaggcctaaagacattgaggaagactgaggacaggaatagcaaagctactttggactctgatcataagttaccatcaagggtaattgaagaacttaatgtggttctacaacggtcaagaacccttccaaaagaattacaggatgagcagattttgaagtaggaaataaaatgaattgctccccagattatttttttaatattgtatgcaatctttatgtgtaactccaaaactgaactataagataattcataagaatttgcctattgataggcaaatttgtctatgcttaggcatttaaggagcatttaaaaatatgtatatatgtgactgaatgtaagattaactttattttggtctgaacaaaccttgtaaagttccattgtattaacgtgtgtaagaagacattgggttacttaggtggtcagtccttttaaagtagttgtctgttaagtggtataatttatgagcagaaatctcaaactgtactgtattgtataaaatgctgtgtttaaatgaagcctaagaaactatctgtaacatattttgcactttgagaaaccttgtatattaaattaccatatgtttttaggtttacagaagttctaccttagggaaaagaaagggaagtaaattgaaaaaggggggagaatttattgtagtggctgcctaaaaaccactggagtttttaaaagaagcaaggagttaaatgtcctgcaaaacaaggaagtgagctaagattcattctagttcactaatgaccagaacttgtcaatgagaaaccacttgttaagaaaaagtccagtgtttatttctcaagagtaatattcggccaacagatgtaaataatagcactagccactcttattaatatttatagtgttagaaaaccagccacattacagattcactacgtttgagctcattgttggtggctgctaagaggaaacttacactgcattggagaggttgtgtacacaggacctggcctggatgctgattgcactgtcattgtatgcaagcattttgtcttttttcagaatttctgactatacttttggtacgaacaaaattcatcaccacagggtcctgttgttttgtttgatttttagatttttttaaattattattaaggttgtaatgtttttctccgagttgtcagaaataactggaagaatacaatatatggccattatggagccaggggctagttggtggtttactatacatttgggggctacctggtcacatttaatctaggtttttttttctttttttaagtaaaggtgtggtctcttccctgtacttatgaataaggacaaagccctatttttgtttccacataaagatcagctactgaattggtgaatttcctgacagacaatgctatctaaccatagttcatgttaggggaagcatttttccatcagtttctttaaaattggattgtctggtgagttttgatattaaacattatgtagctaagttttttttttttagcatttcttttttatttttcaatctatattcacaggcccatacttcagtcagtccaatcatagtacagtgatgtggtggtagatgctatgaatttcttcattgtaaaatacggatcatttgtattttggggtgataaaatagttcaccatgggtatgagatatttattctttaaatcaaagtaaattagaatttttaaaaagcacaaaactgcaggacagtttatgaaataggtggcactattagggaatcttcctttaaagcaagaaatcatgttatttagaaagaaaaactaatcttaaacatactatttctaataaatatttatatttttatgaaataaagaggtatgtggaaattaatatttggtgatgttggacagtggaaaagtatctagagtttttacctgccttatctgaattcttcttgaaacttgagcttaaactctaatagctgtttccctttctattctgaacaactgtctccatttttcaagtgtgagagataagggctaatgatgacatctcatttattttgagtaaacattaaaattgttttacaagtctacttg

SEQ ID NO: 1167 - DNA, 4816 bp, Homo sapiens
atcatagcaaccaaacaatgaattgagacctggaggtcttgggttgtaatttaaattcacataaaccaggccttttgtgcctattgcctaattcatggcataattattattagccgccttaggataaaaggaatacagactttatcccatacatgaaattatcagactttcactcattttaatagctagaatcttattttctttccttaagatgtatattttcttttaatgaccaggctctatgtgctgctgtagtgaaaccggatgttctagaaacaatggctttgctgttcagtggagcagatgtcatgtgtgccaccggagaccccgtgcatagcaccccctatctgctagccaagaaagctgggcaaagtctgcaaatggaatttctctaccataacaaattctcagatttccctcaacatgatattcattccgagggtgtattaagtcaagagtcttcccagtccacattcctctgtgactttttatatcaagctccttctgctgcttctaaactctcttcagagaaaaaactgcttgaagagacaaataaaaaatggtgtgttttggaaggaggcttcttgagttactatgaaaatgataagtctaccacacctaatggcaccattaatatcaatgaagttatctgcctggctatacacaaagaggacttctatttaaatactgggcccatctttatctttgagatctacttaccctccgaacgtgtgtttttatttggagctgaaacatctcaagctcaaagaaaatggacagaggcaatagccaagcattttgttcccttatttgctgaaaacttaacagaagctgactatgatttgattggtcaactcttctacaaagactgccatgccctggatcagtggagaaaaggctggtttgctatggacaaatccagcttgcatttttgccttcaaatgcaagaagttcagggagatagaatgcacttaagaagactgcaagagctaacaatcagcacaatggttcaaaatggggaaaaactggatgttttactcttggtagaaaaagggagaacattatacatccatgggcataccaagttggatttcacagtctggcatactgcaattgaaaaagcagcaggtacagatggtaatgctttacaagatcagcagctcagcaaaaatgacgttcccattatagtgaacagctgtatagcatttgttacacagtatggtttaggatgcaaatatatctatcaaaagaatggtgatcctttgcatataagtgaactcctggagagtttcaaaaaggatgcaagaagctttaaattgagggctggaaaacatcagcttgaagatgtgacggctgtgttgaaaagttttctctctgacattgatgatgcactgcttactaaggagctctacccatattggatctctgctttagatacgcaagatgacaaggaaagaattaaaaaatatggagcatttatacgttctcttccaggggtcaaccgagcaacactagcagctatcattgaacacctgtatagggttcagaaatgctcagaaatcaatcacatgaatgcccataatttggccttggtcttttcatcctgtttgtttcaaacgaagggacaaactagtgaagaagtgaatgtaattgaggacctaattaataattatgtagaaatatttgaggttaaagaagatcaagtcaaacaaatggacatagaaaatagctttattaccaagtggaaagacacccaagtttcccaggctggagatttgttaattgaagtatatgtagaaaggaaggaacccgactgtagtattataattcggatatctcctgtgatggaagcagaagaattaactaatgatatattagcgataaaaaatattattcctacaaaaggtgatatttgggccacatttgaagtcattgaaaatgaagagctagagcgtcctcttcactacaaggaaaatgtactggagcaggtgcttcggtggagttcattagctgaacctggctctgcttacctggtggtgaagagattcttaaccgctgacacaattaaacactgcagtgaccggagtacactgggaagcatcaaagaaggaatcttgaaaatcaaagaagaaccatccaaaatactatctggaaataagtttcaagaccggtattttgttttacgagatgggtttctctttctttacaaggatgtgaagagtagtaaacatgacaagatgttttctctcagttccatgaagttttatcgtggagtgaaaaagaaaatgaagcctccaacaagctggggattgaccgcatattctgagaaacatcactggcacctgtgttgtgatagttcacgaactcagacggagtggatgaccagtatctttattgcccagcatgaatatgatatatggccaccagctggaaaggaacgaaaacgttcaataaccaaaaatcccaaaattggaggtttgcctctgattcctatacagcatgaggggaatgcaaccttggcccggaaaaatattgagagtgcaagagcagaacttgaaaggctgcggctcagtgaaaagtgtgataaagagtccgtggactctagcttaaaggagagagcttccatggtggcccactgcctggagcacaaggacgataaacttcgaaatcgaccccgaaaacatcggagtttcaactgcctggaggacacagagcctgaagccccacttgggcaaccaaaaggccataaaggcctaaagacattgaggaagactgaggacaggaatagcaaagctactttggactctgatcataagttaccatcaagggtaattgaagaacttaatgtggttctacaacggtcaagaacccttccaaaagaattacaggatgagcagattttgaagtaggaaataaaatgaattgctccccagattatttttttaatattgtatgcaatctttatgtgtaactccaaaactgaactataagataattcataagaatttgcctattgataggcaaatttgtctatgcttaggcatttaaggagcatttaaaaatatgtatatatgtgactgaatgtaagattaactttattttggtctgaacaaaccttgtaaagttccattgtattaacgtgtgtaagaagacattgggttacttaggtggtcagtccttttaaagtagttgtctgttaagtggtataatttatgagcagaaatctcaaactgtactgtattgtataaaatgctgtgtttaaatgaagcctaagaaactatctgtaacatattttgcactttgagaaaccttgtatattaaattaccatatgtttttaggtttacagaagttctaccttagggaaaagaaagggaagtaaattgaaaaaggggggagaatttattgtagtggctgcctaaaaaccactggagtttttaaaagaagcaaggagttaaatgtcctgcaaaacaaggaagtgagctaagattcattctagttcactaatgaccagaacttgtcaatgagaaaccacttgttaagaaaaagtccagtgtttatttctcaagagtaatattcggccaacagatgtaaataatagcactagccactcttattaatatttatagtgttagaaaaccagccacattacagattcactacgtttgagctcattgttggtggctgctaagaggaaacttacactgcattggagaggttgtgtacacaggacctggcctggatgctgattgcactgtcattgtatgcaagcattttgtcttttttcagaatttctgactatacttttggtacgaacaaaattcatcaccacagggtcctgttgttttgtttgatttttagatttttttaaattattattaaggttgtaatgtttttctccgagttgtcagaaataactggaagaatacaatatatggccattatggagccaggggctagttggtggtttactatacatttgggggctacctggtcacatttaatctaggtttttttttctttttttaagtaaaggtgtggtctcttccctgtacttatgaataaggacaaagccctatttttgtttccacataaagatcagctactgaattggtgaatttcctgacagacaatgctatctaaccatagttcatgttaggggaagcatttttccatcagtttctttaaaattggattgtctggtgagttttgatattaaacattatgtagctaagttttttttttttagcatttcttttttatttttcaatctatattcacaggcccatacttcagtcagtccaatcatagtacagtgatgtggtggtagatgctatgaatttcttcattgtaaaatacggatcatttgtattttggggtgataaaatagttcaccatgggtatgagatatttattctttaaatcaaagtaaattagaatttttaaaaagcacaaaactgcaggacagtttatgaaataggtggcactattagggaatcttcctttaaagcaagaaatcatgttatttagaaagaaaaactaatcttaaacatactatttctaataaatatttatatttttatgaaataaagaggtatgtggaaattaatatttggtgatgttggacagtggaaaagtatctagagtttttacctgccttatctgaattcttcttgaaacttgagcttaaactctaatagctgtttccctttctattctgaacaactgtctccatttttcaagtgtgagagataagggctaatgatgacatctcatttattttgagtaaacattaaaattgttttacaagtctacttg

SEQ ID NO: 1168 - DNA, 1900 bp, Homo sapiens
ctcctcctccggcgtcgcgggctcctcggacatggccgcggcggtggcggtggcggccgcgtcccggcggcagtcgtgctacctgtgtgacctgccccgcatgccctgggccatgatctgggacttcaccgaacccgtctgccgcggctgcgtcaactacgagggcgccgaccgcgtcgagttcgtcatcgagacggcgcggcagctcaagcgggcgcacggctgcttcccggagggtcgctccccacccggcgccgcggcctcggccgccgccaagccgccgccgctctccgccaaggacatccttttgcagcagcagcagcagcttggccacggcggccccgaggcggccccgcgcgcgccgcaggccttggagcgctacccgttggcggccgcggccgagaggcccccgcgcctcggctctgacttcggcagcagccgcccggcagcgagcctggcccagccgccgacgccgcagccgccgcccgtgaacggcatcctggtgcccaacggcttctccaagctagaggaaccgcccgagctgaatcgccagagcccgaaaccacggcgcggccacacggtgccgcccaccctggtgccgctcatgaacggctcggccacgccgctgcccaccgcgctcggcctcggcggccgcgctgccgcctccttagccgcggtgtccggaaccgcggccgccagcctgggctccgcgcagcccaccgatctgggcgcccacaagcggccggcatccgtgtcgagcagcgctaccgtggagcacgagcagcgtgaggcggcagccaaggagaaacaaccgccgccgcctgcgcaccggggcccggccgacagcctgtccaccgcggccggggccgccgagctgagcgcggaaggtgcgggcaagagccgcgggtctggagagcaggactgggtcaacaggcccaagaccgtgcgcgacacgctgctggcgctgcaccagcacggccactcggggcccttcgagagcaagtttaagaaggagccggccctgactgcaggcaggttgttgggtttcgaggccaacggggccaacgggtctaaagcagttgcaagaacagcaaggaaaaggaagccctctccagaaccagaaggtgaagtcgggccccctaagatcaacggagaggcccagccgtggctgtccacatccacagaggggctcaagatccccatgactcctacatcctcttttgtgtctccgccaccacccactgcctcacctcattccaaccggaccacaccgcctgaagcggcccagaatggccagtcccccatggcagccctgatcttagtagcagacaatgcagggggcagtcatgcctcaaaagatgccaaccaggttcactccactaccaggaggaatagcaacagtccgccctctccgtcctctatgaaccaaagaaggctgggccccagagaggtggggggccagggagcaggcaacacaggaggactggagccagtgcaccctgccagcctcccggactcctctctggcaaccagtgccccgctgtgctgcaccctctgccacgagcggctggaggacacccattttgtgcagtgcccgtccgtcccttcgcacaagttctgcttcccttgctccagacaaagcatcaaacagcagggagctagtggagaggtctattgtcccagtggggaaaaatgccctcttgtgggctccaatgtcccctgggcctttatgcaaggggaaattgcaaccatccttgctggagatgtgaaagtgaaaaaagagagagactcgtgacttttccggtttcagaaaaacccaatgattacccttaattaaaactgcttgaattgtatatatatctccatatatatatatatccaagacaagggaaatgtagac

SEQ ID NO: 1169 - DNA, 586 bp, Homo sapiens
gtaacggtcctcagcgcaagggtcatttcgtcgctgggaagggacggccctcgcccgcggtgatggtggttagcaagatgaacaaagatgcgcagatgagagcagcgattaaccaaaagttgatagaaactggagaaagagaacgcctcaaagagttgctgagagctaaattaattgaatgtggctggaaggatcagttgaaggcacactgtaaagaggtaattaaagaaaaaggactagaacacgttactgttgatgacttggtggctgaaatcactccaaaaggcagagccctggtacctgacagtgtaaagaaggagctcctacaaagaataagaacattccttgctcagcatgccagcctttaagattgaattagattgtgttgttgtggttttatttctgaaagtaaaacttgccataaattagaaaacaatttcccaaaataaaatccttttttgtatgatggtatacagttttcagtaatgatgtatacattgtattgatttttttccctaaatgtgttattttaataaatatctcatgaatgagtttgaagtttgcttggaaaaaaaaaaaaaaaaaa

SEQ ID NO: 1170 - DNA, 1281 bp, Homo sapiens
gcatgtgcaaagcgctgtcgggggccgccctagctgccgtcgccgccgccggggctctatggtctctccctagagctttgccgttggaggcggctgctgcggtcttgtgagtttgaccagcgtcgagcggcagcaacatggaggaattcgactccgaagacttctctacgtcggaggaggacgaggactacgtgccgtcgggtggagagtatagtgaagatgatgtaaatgaattagtgaaggaagatgaagtggatggtgaagagcagacacagaaaacccaagggaaaaaaagaaaggcccagagcattccagccaggaagagaagacaaggtggcctctcattagaagaagaggaagaggaggatgccaattcagaatctgagggaagcagtagtgaggaggaagatgacgctgcagagcaggaaaaaggcattggatcagaggatgccaggaaaaagaaggaggacgaactctgggccagcttcctcaatgatgtgggaccaaaatcaaaagtgcccccaagtacacaagttaagaaaggagaggagactgaagagacaagttcaagtaaattgttggtaaaagcagaagagctagagaaacctaaagaaacagaaaaagttaaaatcaccaaggtgtttgattttgctggtgaagaagtaagggtaactaaggaagtggatgctacatctaaagaggccaaatccttcttcaagcagaatgagaaagaaaaaccacaggctaatgttccttcagctctgccatcactccctgccgggtcagggttaaaaagatcaagtggcatgagcagccttttggggaaaattggtgccaagaagcagaaaatgagcacccttgagaagtccaaactggactgggagagcttcaaggaggaagaggggattggtgaagaactggccatccataatcgagggaaagaggggtacattgaacggaaagccttccttgaccgagtggatcacaggcagtttgaaattgagcgagatctcaggctgagcaaaatgaaaccttgatgttacgggctaaatcaagagcagcttaatcctgtttacaatgtgagctttttgtgcgtctgtgaaatgttttacagtgtttctcatcatctgtttcccagcaaggtcttttttttttctacattgaagttctgtctatgtatcttaatcacaaatggtttcattcactttacttttaaaaatttgtccttaaatgaataaataaaataaaagttggtcctgtgagaggataatgaagatgaaa

SEQ ID NO: 1171 - DNA, 2676 bp, Homo sapiens
atattggaaaggcgccgccgccgcctccgccttggagctcggggtgtttcggggactgcggccacaggcaggaaggcgctcctctcctgccccgccgacgcccggccagcccgcttcgccctgacctgtttcctcatgactgcccccggccctgctgccgacggacgtcgccccggcgtccggatttaacacggaaacccggatcggaggccgcgcggggaggaggagggcgacccggtcggtcctgcgaccctctcggcccggctcggcgcctcggcgggagccatgacctcgctgacccagcgcagctccggcctggtgcagcggcgcaccgaggcctcccgcaacgccgccgacaaggagcgggcggcgggcggcggcgccggcagcagcgaggacgacgcgcagagccgccgcgacgagcaggacgacgacgacaagggcgactccaaggaaacgcggctgaccctgatggaggaagtgctcctgctgggcctcaaggaccgcgagggttacacatcattttggaatgactgtatatcatctggattacgtggctgtatgttaattgaattagcattgagaggaaggttacaactagaggcttgtggaatgagacgtaaaagtctattaacaagaaaggtaatctgtaagtcagatgctccaacaggggatgttcttcttgatgaagctctgaagcatgttaaggaaactcagcctccagaaacggtccagaactggattgaattacttagtggtgagacatggaatccattaaaattgcattatcagttaagaaatgtacgggaacgattagctaaaaacctggtggaaaagggtgtattgacaacagagaaacagaacttcctactttttgacatgacaacacatcccctcaccaataacaacattaagcagcgcctcatcaagaaagtacaggaagccgttcttgacaaatgggtgaatgaccctcaccgcatggacaggcgcttgctggccctcatttacctggctcatgcctcggacgtcctggagaatgcttttgctcctcttctggacgagcagtatgatttggctaccaagagagtgcggcagcttctcgacttagaccctgaagtggaatgtctgaaggccaacaccaatgaggttctgtgggcggtggtggcggcgttcaccaagtaactctgctcggggtgaaccattctcctttctctcaagtaaaccagtagtttttcttctgttgacttctggttttctgtaatttgtactttcccacactataattggcttctgttttacaaaatggtgggtggctttttcttttttgtacgtgtacaggattctgctggtacgagaggccttcctctttctgtttttaaaaaaagttttactgccatattggcattccattccctgttgccatcctcactgttacctgttttgggtttctggtctactttgactttcaaagtacctccagcctcctcatacgcacagcttttggatgacctcagcttgagtttctccatatgtgcatgtacatctagcattctgcctacagttcagacagaagtcacaaaaaggccttcaactcaccaaaggtaaatatctgtatctattaggacattttttacatagacttcagttgagatgtatacttagcaaaattatttttaaattgaaacagcacagtaaatacttaatataaaatgtcccttggattttgcttcccatgtaaatctattgtattattacacttgttataattttaactataaaggtccaattgtttcacagagccagtttgggatgggctgcattccatttatgctgtatatagtttgaattatatataaattaccccttcttctggccacccctgctcccatcttagtattttgcaagatctaatcagttgtacacctggtgcccctcgcttgcttcaatcatggttatttgatggcaaaatcgacctcttgtcgctgaaggagagagaaaagatgtgtgtctgattggtcctgggattttttgagctgtgccatttatggtactctttgcctatgcatccccttgttagattttttttaaattttatcttactgtttttataatttctattgggaagaggcttgtgaccagtaccaatcttgagtttctttttctgtccacaagtaaattaatatctgctctgaaatgtcatttatctactcacacattcttggggaaaaaaatcaaatgtcagtcctagcagatgttgcatgtaaattggtagcaagtaatgattacaacccagaggattaagaattttgtaacagaaagctctatgttttaattttttatatacaattaggataattagcattgtcagactataaacctttgctttttaaagtttatttttactatttctttatcactttattgtatcatcaccattggtttcataatgtaaatactatatgttgaacaaattaaatgtcaaaattttttattaccatagtccatgttaatagtggggctttcaggtgtttagagattttttttgttgttgttaacattcattgcaaaagtactagatggtgtataactctagagttgaattttaagggattccctaatatgtatactatctttttatctgaagtaataaataaacaatgatcttgaaagtgcctg

SEQ ID NO: 1172 - DNA, 4025 bp, Homo sapiens
gcatgatgggagagtgtgtggagtgggcggggggtctccgcggaggaggtggaggaggcggcggcggcggcggaagagggcggagggtagtgggatgggggtcccgcggcagcggtgaaactccgggtgggcgtccatggtgctgctgcgctgacagggctgtgagcagccggccttccgctctcaccagttccgcgtcggaatagacggtccttccccggggagtcagttcctccccgggcccctgagccatgcccatcgcagccgccccgaaggagccaggtgtaaattaattatttgaaagcaactgaacaatggagccagacatcattcgaatgtactcttcatccccaccaccattagacaatggagcagaggatgatgatgatgatgaatttggggaatttggtgggttttcagaagttagcccttctggtgtagggtttgttgatttcgatacaccagattatactcgtcccaaggaagagtttgtaccttcaaaccattttatgccaattcatgaattctcagaaaatgtagatagccttacaagctttaagtccattaaaaatggtaatgataaggacatcactgctgaactttctgctcctgtgaaaggacagtctgatgttttactttctaccaccagcaaagaaataatttcatctgaaatgttagctacttccattgatggcatggaaagaccaggaaatttaaataaagtagtggagcagagacagaatgttggaacacttgaaagtttctctccaggagattttagaactaatatgaatgttgttcatcaaaacaagcagttagagagctgcaatggtgaaaagcctccttgtctggagattctaacaaatgggtttgcagtgttggaaactgtaaatcctcagggaacagatgatctggacaatgtagctgattcaaagggacggaagcctcttagcactcatagcactgagtataatttagactctgtacctagtcctgctgaggaatttgcagattttgccacattttccaaaaaggaaaggatacaattagaagaaatagaatgtgcagttttaaatgatagagaagcactaaccattcgggaaaacaataaaattaatagagtcaatgaactgaattctgtaaaagaagtggctttgggtagaagcttggataacaaaggagacactgatggagaggatcaggtttgtgtttcagaaataagcatagtgactaacagaggtttcagtgttgaaaaacaaggccttccaacactgcaacaggatgaatttttacagtcaggtgttcagtcaaaggcttggagtttggtagactcagctgataattcagaagccattaggagagaacaatgtaaaactgaagaaaaacttgacttacttacttctaaatgtgctcacctatgcatggattctgttaaaacttctgatgatgaagttggttctcccaaagaagaaagtagaaagtttactaatttccaaagcccaaacattgaccccacagaagaaaatgatttggatgattctttaagtgtaaaaaatggtgatagtagtaatgactttgtgacttgcaatgatatcaatgaagatgattttggtgattttggtgactttggctctgccagtggctcaactccaccttttgttactggtactcaagattcaatgagtgatgccacttttgaagagtcttcagagcactttccacattttagtgaaccaggtgatgactttggagaatttggggatataaatgctgtttcttgccaagaggagacaatattaacaaagtcagacctaaaacagacttctgataatttatcagaagaatgtcaattggcaagaaaatctagtggaacaggcactgaacctgttgcaaaacttaaaaatgggcaagaaggtgagattggacattttgattctgtgccaaatattcaggatgactgcaatggttttcaagactctgatgattttgcagacttcagttcagctggtcctagccaagttgtagattggaatgcttttgaggatgaacaaaaagatagttgttcttgggctgcttttggagaccagcaggctactgaatctcatcatcgaaaggaagcctggcagtcacataggacagatgaaaatattgatactccaggaacccccaaaacgcacagtgtaccttcagcaacttccaaaggagcagttgctagtggccatttacaggaatcagccacttcagttcagacagctttattaaaccgcctggagcgaattttcgaagcatgttttccttccatacttgtccctgatgctgaagaggaagttacttccctgaagcacttgctggaaacaagcactttgccaataaaaacgagagaggccttacctgaaagtggggaattgctagatgtgtggactgagctacaggatatccatgatgcacatggcttgagataccagtggggcggctcccatagcaacaagaagcttttgtcctccttgggaatagacacccgaaacattctcttcacgggcaataagaagcagcctgttatagtgcccatgtatgcagcaggattgggtatgttagagcccaccaaggaaccactgaaaccactttctgctgcagaaaaaatagcttccatcggtcagacagccaccatgtcaccagatatgaacacatgtacatctgatcagttccaggagtctctaccacccgtccagtttgactggagtagcagtggccttactaaccctttagatggtgtggatccggagttgtatgagttaacaacttctaagctggaaatctccacctcaagcctcaaagtgactgatgcatttgcaagactcatgtctacagtagagaagacaagcacatctaccaggaaaccgaaaagagaagagcacctaagtgaagaagctatcaaggtgatcgctggccttcctgacttaacattcatgcatgccaaggtgttgatgttcccagccacgttaacaccttccacaagctctcaagaaaaagcagacggataactgatgtgaattggacagtttctattgcttttccttttttccatcccttccctaccatcaaaagcatacctgctctaattaaaaaaaaaaaaaaaaaaaattcaagttcagctgatttgttggtaagccgcactagaaaggtatacatagtaatgtatatttatttacatactgaagtcctaaatttatattagaaaaatgtaaataatcgggggtaaacatttttgaagatttattctttttgtgttgctggggtgtatacatttatgtctttgtgaaatacactggtggtgtccttcttacaaaacttttgaaataaaaaaaaaactcaaatcttcactgtctgtgaaatccccttcagtcttttcagattgcattgactgtcctcttgatttttcatattacatgtcaaattacttttgctatcataaataagctccaaagtcccccatttaatttttttttaattttgtgtatgatgggtttcagatctggcttttgttaacattttggggcttttttaatcttttcaatctggcgtattgctgtttgaccttttgcaaggtacttaattgctcttttgttatagggtatggatcattgtcagaacttgattggaggggtttaaagagattgtgtctgtttaaaatcagtatgattcagagaaggaccaaattatatgaatgtcttacaatggaatttacttgttactgatttttttgttctattgtaccactattttttgaggattttgcacagtgtaaaatgacataatcatagattgctatggtttaggctgtatatacagtgaaaactatgggttttaaatgtttggggaaattcctatggaaaaaagagagacatgtagaagaacctctaacaaggttaatgtgcatgcccaaggtcttttgaaatttcagtgtgtaaatttccttttagcttatacaaaaataaaataatttaaaagaaaaaaaaaaaaaaaaa

SEQ ID NO: 1173 - DNA, 4028 bp, Homo sapiens
gcatgatgggagagtgtgtggagtgggcggggggtctccgcggaggaggtggaggaggcggcggcggcggcggaagagggcggagggtagtgggatgggggtcccgcggcagcggtgaaactccgggtgggcgtccatggtgctgctgcgctgacagggctgtgagcagccggccttccgctctcaccagttccgcgtcggaatagacggtccttccccggggagtcagttcctccccgggcccctgagccatgcccatcgcagccgccccgaaggagccaggtgtaaattaattatttgaaagcaactgaacaatggagccagacatcattcgaatgtactcttcatccccaccaccattagacaatggagcagaggatgatgatgatgatgaatttggggaatttggtgggttttcagaagttagcccttctggtgtagggtttgttgatttcgatacaccagattatactcgtcccaaggaagagtttgtaccttcaaaccattttatgccaattcatgaattctcagaaaatgtagatagccttacaagctttaagtccattaaaaatggtaatgataaggacatcactgctgaactttctgctcctgtgaaaggacagtctgatgttttactttctaccaccagcaaagaaataatttcatctgaaatgttagctacttccattgatggcatggaaagaccaggaaatttaaataaagtagtggagcagagacagaatgttggaacacttgaaagtttctctccaggagattttagaactaatatgaatgttgttcatcaaaacaagcagttagagagctgcaatggtgaaaagcctccttgtctggagattctaacaaatgggtttgcagtgttggaaactgtaaatcctcagggaacagatgatctggacaatgtagctgattcaaagggacggaagcctcttagcactcatagcactgagtataatttagactctgtacctagtcctgctgaggaatttgcagattttgccacattttccaaaaaggaaaggatacaattagaagaaatagaatgtgcagttttaaatgatagagaagcactaaccattcgggaaaacaataaaattaatagagtcaatgaactgaattctgtaaaagaagtggctttgggtagaagcttggataacaaaggagacactgatggagaggatcaggtttgtgtttcagaaataagcatagtgactaacagaggtttcagtgttgaaaaacaaggccttccaacactgcaacaggatgaatttttacagtcaggtgttcagtcaaaggcttggagtttggtagactcagctgataattcagaagccattaggagagaacaatgtaaaactgaagaaaaacttgacttacttacttctaaatgtgctcacctatgcatggattctgttaaaacttctgatgatgaagttggttctcccaaagaagaaagtagaaagtttactaatttccaaagcccaaacattgaccccacagaagaaaatgatttggatgattctttaagtgtaaaaaatggtgatagtagtaatgactttgtgacttgcaatgatatcaatgaagatgattttggtgattttggtgactttggctctgccagtggctcaactccaccttttgttactggtactcaagattcaatgagtgatgccacttttgaagagtcttcagagcactttccacattttagtgaaccaggtgatgactttggagaatttggggatataaatgctgtttcttgccaagaggagacaatattaacaaagtcagacctaaaacagacttctgataatttatcagaagaatgtcaattggcaagaaaatctagtggaacaggcactgaacctgttgcaaaacttaaaaatgggcaagaaggtgagattggacattttgattctgtgccaaatattcaggatgactgcaatggttttcaagactctgatgattttgcagacttcagttcagctggtcctagccaagttgtagattggaatgcttttgaggatgaacaaaaagatagttgttcttgggctgcttttggagaccagcaggctactgaatctcatcatcgaaaggaagcctggcagtcacataggacagatgaaaatattgatactccaggaacccccaaaacgcacagtgtaccttcagcaacttccaaaggagcagttgctagtggccatttacaggaatcagccacttcagttcagacagctttattaaaccgcctggagcgaattttcgaagcatgttttccttccatacttgtccctgatgctgaagaggaagttacttccctgaagcacttgctggaaacaagcactttgccaataaaaacgagagaggccttacctgaaagtggggaattgctagatgtgtggactgagctacaggatatccatgatgcacatggcttgagataccagtggggcggctcccatagcaacaagaagcttttgtcctccttgggaatagacacccgaaacattctcttcacgggcaataagaagcagcctgttatagtgcccatgtatgcagcaggattgggtatgttagagcccaccaaggaaccactgaaaccactttctgctgcagaaaaaatagcttccatcggtcagacagccaccatgtcaccagatatgaacacatgtacatctgatcagttccaggagtctctaccacccgtccagtttgactggagtagcagtggccttactaaccctttagatggtgtggatccggagttgtatgagttaacaacttctaagctggaaatctccacctcaagcctcaaagtgactgatgcatttgcaagactcatgtctacagtagagaagacaagcacatctaccagtaggaaaccgaaaagagaagagcacctaagtgaagaagctatcaaggtgatcgctggccttcctgacttaacattcatgcatgccaaggtgttgatgttcccagccacgttaacaccttccacaagctctcaagaaaaagcagacggataactgatgtgaattggacagtttctattgcttttccttttttccatcccttccctaccatcaaaagcatacctgctctaattaaaaaaaaaaaaaaaaaaaattcaagttcagctgatttgttggtaagccgcactagaaaggtatacatagtaatgtatatttatttacatactgaagtcctaaatttatattagaaaaatgtaaataatcgggggtaaacatttttgaagatttattctttttgtgttgctggggtgtatacatttatgtctttgtgaaatacactggtggtgtccttcttacaaaacttttgaaataaaaaaaaaactcaaatcttcactgtctgtgaaatccccttcagtcttttcagattgcattgactgtcctcttgatttttcatattacatgtcaaattacttttgctatcataaataagctccaaagtcccccatttaatttttttttaattttgtgtatgatgggtttcagatctggcttttgttaacattttggggcttttttaatcttttcaatctggcgtattgctgtttgaccttttgcaaggtacttaattgctcttttgttatagggtatggatcattgtcagaacttgattggaggggtttaaagagattgtgtctgtttaaaatcagtatgattcagagaaggaccaaattatatgaatgtcttacaatggaatttacttgttactgatttttttgttctattgtaccactattttttgaggattttgcacagtgtaaaatgacataatcatagattgctatggtttaggctgtatatacagtgaaaactatgggttttaaatgtttggggaaattcctatggaaaaaagagagacatgtagaagaacctctaacaaggttaatgtgcatgcccaaggtcttttgaaatttcagtgtgtaaatttccttttagcttatacaaaaataaaataatttaaaagaaaaaaaaaaaaaaaaa

SEQ ID NO: 1174 - DNA, 4109 bp, Homo sapiens
gcatgatgggagagtgtgtggagtgggcggggggtctccgcggaggaggtggaggaggcggcggcggcggcggaagagggcggagggtagtgggatgggggtcccgcggcagcggtgaaactccgggtgggcgtccatggtgctgctgcgctgacagggctgtgagcagccggccttccgctctcaccagttccgcgtcggaatagacggtccttccccggggagtcagttcctccccgggcccctgagccatgcccatcgcagccgccccgaaggagccaggtgtaaattaattatttgaaagcaactgaacaatggagccagacatcattcgaatgtactcttcatccccaccaccattagacaatggagcagaggatgatgatgatgatgaatttggggaatttggtgggttttcagaagttagcccttctggtgtagggtttgttgatttcgatacaccagattatactcgtcccaaggaagagtttgtaccttcaaaccattttatgccaattcatgaattctcagaaaatgtagatagccttacaagctttaagtccattaaaaatggtaatgataaggacatcactgctgaactttctgctcctgtgaaaggacagtctgatgttttactttctaccaccagcaaagaaataatttcatctgaaatgttagctacttccattgatggcatggaaagaccaggaaatttaaataaagtagtggagcagagacagaatgttggaacacttgaaagtttctctccaggagattttagaactaatatgaatgttgttcatcaaaacaagcagttagagagctgcaatggtgaaaagcctccttgtctggagattctaacaaatgggtttgcagtgttggaaactgtaaatcctcagggaacagatgatctggacaatgtagctgattcaaagggacggaagcctcttagcactcatagcactgagtataatttagactctgtacctagtcctgctgaggaatttgcagattttgccacattttccaaaaaggaaaggatacaattagaagaaatagaatgtgcagttttaaatgatagagaagcactaaccattcgggaaaacaataaaattaatagagtcaatgaactgaattctgtaaaagaagtggctttgggtagaagcttggataacaaaggagacactgatggagaggatcaggtttgtgtttcagaaataagcatagtgactaacagaggtttcagtgttgaaaaacaaggccttccaacactgcaacaggatgaatttttacagtcaggtgttcagtcaaaggcttggagtttggtagactcagctgataattcagaagccattaggagagaacaatgtaaaactgaagaaaaacttgacttacttacttctaaatgtgctcacctatgcatggattctgttaaaacttctgatgatgaagttggttctcccaaagaagaaagtagaaagtttactaatttccaaagcccaaacattgaccccacagaagaaaatgatttggatgattctttaagtgtaaaaaatggtgatagtagtaatgactttgtgacttgcaatgatatcaatgaagatgattttggtgattttggtgactttggctctgccagtggctcaactccaccttttgttactggtactcaagattcaatgagtgatgccacttttgaagagtcttcagagcactttccacattttagtgaaccaggtgatgactttggagaatttggggatataaatgctgtttcttgccaagaggagacaatattaacaaagtcagacctaaaacagacttctgataatttatcagaagaatgtcaattggcaagaaaatctagtggaacaggcactgaacctgttgcaaaacttaaaaatgggcaagaaggtgagattggacattttgattctgtgccaaatattcaggatgactgcaatggttttcaagactctgatgattttgcagacttcagttcagctggtcctagccaagttgtagattggaatgcttttgaggatgaacaaaaagatagttgttcttgggctgcttttggagaccagcaggctactgaatctcatcatcgaaaggaagcctggcagtcacataggacagatgaaaatattgatactccaggaacccccaaaacgcacagtgtaccttcagcaacttccaaaggagcagttgctagtggccatttacaggaatcagccacttcagttcagacagctttattaaaccgcctggagcgaattttcgaagcatgttttccttccatacttgtccctgatgctgaagaggaagttacttccctgaagcacttgctggaaacaagcactttgccaataaaaacgagagaggccttacctgaaagtggggaattgctagatgtgtggactgagctacaggatatccatgatgcacatggcttgagataccagtggggcggctcccatagcaacaagaagcttttgtcctccttgggaatagacacccgaaacattctcttcacgggcaataagaagcagcctgttatagtgcccatgtatgcagcaggattgggtatgttagagcccaccaaggaaccactgaaaccactttctgctgcagaaaaaatagcttccatcggtcagacagccaccatgtcaccagatatgaacacatgtacatctgatcagttccaggagtctctaccacccgtccagtttgactggagtagcagtggccttactaaccctttagatgctagtggaggttccactcttctgaaccttgatttctttgggcccgtggatgacagtagctctagcagcagcaccacaatcccaggtgtggatccggagttgtatgagttaacaacttctaagctggaaatctccacctcaagcctcaaagtgactgatgcatttgcaagactcatgtctacagtagagaagacaagcacatctaccaggaaaccgaaaagagaagagcacctaagtgaagaagctatcaaggtgatcgctggccttcctgacttaacattcatgcatgccaaggtgttgatgttcccagccacgttaacaccttccacaagctctcaagaaaaagcagacggataactgatgtgaattggacagtttctattgcttttccttttttccatcccttccctaccatcaaaagcatacctgctctaattaaaaaaaaaaaaaaaaaaaattcaagttcagctgatttgttggtaagccgcactagaaaggtatacatagtaatgtatatttatttacatactgaagtcctaaatttatattagaaaaatgtaaataatcgggggtaaacatttttgaagatttattctttttgtgttgctggggtgtatacatttatgtctttgtgaaatacactggtggtgtccttcttacaaaacttttgaaataaaaaaaaaactcaaatcttcactgtctgtgaaatccccttcagtcttttcagattgcattgactgtcctcttgatttttcatattacatgtcaaattacttttgctatcataaataagctccaaagtcccccatttaatttttttttaattttgtgtatgatgggtttcagatctggcttttgttaacattttggggcttttttaatcttttcaatctggcgtattgctgtttgaccttttgcaaggtacttaattgctcttttgttatagggtatggatcattgtcagaacttgattggaggggtttaaagagattgtgtctgtttaaaatcagtatgattcagagaaggaccaaattatatgaatgtcttacaatggaatttacttgttactgatttttttgttctattgtaccactattttttgaggattttgcacagtgtaaaatgacataatcatagattgctatggtttaggctgtatatacagtgaaaactatgggttttaaatgtttggggaaattcctatggaaaaaagagagacatgtagaagaacctctaacaaggttaatgtgcatgcccaaggtcttttgaaatttcagtgtgtaaatttccttttagcttatacaaaaataaaataatttaaaagaaaaaaaaaaaaaaaaa

SEQ ID NO: 1175 - DNA, 2964 bp, Homo sapiens
cagagccacgggcgcccgccccgccccgcgccgccccgcgccggctccgcagctcgcgcccgcccgcctgccggcccgcccggcgccgggccatggcgctgctgcgggatgtgtcgctgcaggacccgcgggaccgcttcgagctgctgcagcgcgtgggggccgggacctatggcgacgtctacaaggcccgcgacacggtcacgtccgaactggccgccgtgaagatagtcaagctagacccaggggacgacatcagctccctccagcaggaaatcaccatcctgcgtgagtgccgccaccccaatgtggtggcctacattggcagctacctcaggaatgaccgcttgtggatctgcatggagttctgcggagggggctccctgcaggagatttaccatgccactgggcccctggaggagcggcagattgcctacgtctgccgagaggcactgaaggggctccaccacctgcattctcaggggaagatccacagagacatcaagggagccaaccttctcctcactctccagggagatgtcaaactggctgactttggggtgtcaggcgagctgacagcgtctgtggccaagaggaggtctttcattgggactccctactggatggctcccgaggtggctgctgtggagcgcaaaggtggctacaatgagctatgtgacgtctgggccctgggcatcactgccattgagctgggcgagctgcagccccctctgttccacctgcaccccatgagggccctgatgctcatgtcgaagagcagcttccagccgcccaaactgagagataagactcgctggacccagaatttccaccactttctcaaactggccctgaccaagaatcctaagaagaggccgacagcagagaagctcctgcagcacccgttcacgactcagcagctccctcgggccctcctcacacagctgctggacaaagccagtgaccctcatctggggaccccctcccctgaggactgtgagctggagacctatgacatgtttccagacaccattcactcccgggggcagcacggcccagccgagaggaccccctcggagatccagtttcaccaggtgaaatttggcgccccacgcaggaaggaaactgacccactgaatgagccgtgggaggaagagtggacactactgggaaaggaagagttgagtgggagcctgctgcagtcggtccaggaggccctggaggaaaggagtctgactattcggtcagcctcagaattccaggagctggactccccagacgataccatgggaaccatcaagcgggccccgttcctagggccactccccactgaccctccagcagaggagcctctgtccagtcccccaggaaccctgcccccacctccttcaggccccaacagctccccactgctgcccacggcctgggccaccatgaagcagcgggaggatcctgagaggtcatcctgccacgggctccccccaactcccaaggtgcatatgggcgcctgcttctccaaggtcttcaatggctgccccctgcggatccacgctgctgtcacctggattcaccctgttactcgggaccagttcctggtggtaggggccgaggaaggcatctacacactcaacctgcatgaactgcatgaggatacgctggagaagctgatttcacatcgctgctcctggctctactgcgtgaacaacgtgctgctgtcactctcagggaaatccacgcacatctgggcccatgacctcccaggcctgtttgagcagcggaggctacagcaacaggttcccctctccatccccaccaaccgcctcacccagcgcatcatccccaggcgctttgctctgtccaccaagattcctgacaccaaaggctgcttgcagtgtcgtgtggtgcggaacccctacacgggtgccaccttcctgctggccgccctgcccaccagcctgctcctgctgcagtggtatgagccgctgcagaagtttctgctgctgaagaacttctccagccctctgcccagcccagctgggatgctggagccgctggtgctggatgggaaggagctgccgcaggtgtgtgttggggccgaggggcctgaggggcccggctgccgcgtcctgttccatgtcctgcccctggaggctggcctgacgcccgacatcctcatcccacctgaggggatcccaggctcggcccagcaggtgatccaggtggacagggacacaatcctagtcagctttgaacgctgtgtgaggattgtcaacatgcagggcgagcccacggccacactggcacctgagctgacctttgatttccccatcgagactgtggtgtgcctgcaggacagtgtgctggccttctggagccatgggatgcaaggccgaagcctggataccaatgaggtgacccaggagatcacagatgaaacaaggatcttccgagtgcttggggcccacagagacatcatcctggagagcattcccactgacaacccagaggcgcacagcaacctctacatcctcacgggccaccagagcacctactaagagcagcgggcctgtccaggggctccccgccccaccccacgccttagctgcaggcccttttgggcaaaggggcccatcctagaccagaggagcccaggccctggccctgctggggctgaaggtcagaagtaatcctgagaaatgtttcaggcctggggagggaggggagcccccgacgcctctgcaataactggaccagggggagctgctgtcactcccccatccccgaggcagcccagtccctagtgcccaaggcagggaccctgggcctgggccatccattccattttgttccacatttcctttctactctttctgccaagagcctgcccctgcatttgtcctgggaaacacggtatttaagagagaactatattggtattaaagctggtttgttttaaaaaaaaaa

SEQ ID NO: 1176 - DNA, 6404 bp, Homo sapiens
tacgcttctagcttgagggaaagaggccgaggcctgggccaagcccggagccgccgctcgccggagcctcctggagcctccgcgccggctcagcctgggggcgggctccggtccggcccgccgccgcacccaggacggaggctgcatgcccgaggaccaggccggcgcagccatggaggaggcgtctccctattccttacttgatatctgcttgaatttcttgactactcaccttgagaagttctgttcagccagacaagatggaacattgtgtctgcaggaacctggagtattcccacaggaggtggctgatcgactgcttcggaccatggcttttcatggtctattgaatgatggaactgtgggtatttttaggggcaaccagatgcgcttaaagcgagcctgcattcgcaaagcaaagatctctgctgttgctttccggaaagctttctgccaccacaagttagtggaacttgatgccacaggtgtgaatgctgatatcacgattacagacattatcagtgggcttggcagtaacaaatggatccagcagaatctccagtgcctggtgctgaattcattaactctctccctcgaggatccttacgagcgctgcttcagccggctttctggccttcgagctttaagcatcacgaatgttctcttttacaatgaagacctggctgaagttgcctcattgccaagattagagagcttggatatttctaacacctcaatcacagacatcactgctctactggcctgcaaagaccgactcaagtctctaaccatgcaccacttgaaatgtttaaaaatgacaactacccagatactggatgtagttcgggaactcaaacatctgaatcatcttgatatctcagatgataaacagtttacatcagacatagctcttcgcttactagaacaaaaagacatcctacctaaccttgtttctctggatgtttctgggagaaagcacgtgacagataaagccgttgaagcctttatacaacaacgtccaagcatgcaatttgtaggtttgctggctactgatgctggttactctgaattcctcacaggcgaaggacatttgaaggtgtctggggaagccaatgaaactcagattgcagaagcactgaagcgttacagtgaacgggcattctttgttcgggaagctctatttcatctttttagtctgactcatgtgatggaaaaaacaaagccagaaattttaaagcttgtggttactgggatgagaaaccaccctatgaatttgccagtgcaactggctgcaagcgcctgtgtatttaacttaaccaagcaggatcttgctgcagggatgcctgtccgactcctggctgatgtgacccatttgctgctcaaagccatggaacattttcccaatcaccagcagttacagaagaattgcctcctttcactttgcagtgaccggatccttcaagatgttccatttaacaggtttgaagcagccaagcttgtcatgcagtggctttgcaaccatgaggatcaaaacatgcaaaggatggcagttgctatcatttctatcctggctgccaagctttctacagaacaaactgcacagcttggtactgagctcttcattgtcaggcaacttcttcaaatagtgaagcagaaaaccaatcaaaattcagtggacactacattgaaatttactttgagtgcactttggaacctcacagatgaatctccaaccacttgtagacactttattgaaaaccaagggttagaactcttcatgagggttctagagtctttcccaactgagtcatccattcagcagaaagttctaggacttttgaacaatatagctgaagtacaagaattacattctgaattaatgtggaaagattttatagaccacatcagtagtctcctacacagtgtggaagtggaagtcagttactttgcagctggaattattgcccatttaatatccagaggtgaacaagcttggacattgagtcgtagccagaggaattctctgctggatgatttgcattcagctattttgaaatggccaactccagagtgtgagatggtagcatacaggtcctttaatccatttttcccattacttggctgtttcacaacaccaggagttcagctatgggcagtttgggccatgcaacatgtctgcagcaagaatccttcaaggtattgcagcatgctgattgaagaaggaggattgcagcatttatacaacatcaaagatcatgaacatactgatccccatgtccaacagattgctgtggccattctggatagcttagaaaaacacattgtgcgccatgggaggccacctccctgtaaaaaacagccccaagccagactaaattgatagccataagtattggatagttgaatcacaggaatcctttttgtgattggtccatttggaatatcttaccctccctgatgttttgggggtttctatgacaagagtcataaaatcagtttgggattgataatgtgtagtactgcccatgtgaacagtctctaatttgtcttgtgattttaaacttatgagtcaagaagggtctcttcctttatcattgccttttaggaaattttccacatctttcagtgtttgaacttacttgtgcttgagattctacagttttatggtaaagtttgcacgaacccttaggccagacttttctgatctcagagtcccttccaatcaatttgcagcttcacataagctgttgacctgatttctgacactgcttcagttgtaaattttatactgcttctgtataaaatgcctttcttctctatctgtgtatattttataagatgtccttcttagtgtgaaagaagggaaatgtggatcatcttgtggaagctaatcactggcaggagcctggatggctggcggaaagatatatgagaaagaaaaattatgaaggtagaacagagtgtaggaactgggaattggtttcatggtataggttttaaaatgagacaggctacccttcgggagtccacctctcttgaggcggtgagcagaagcttgtcctccatatttatacctagaagtgtggactgctggttcctgcacagactgccggttattcactaggaatatttccccaagcaccacagtataaaatactacagcactctgtgttaaagactaactgtctacatctccatatgttgtagtgttgtgaaaatgtgattttaaaaaattatcgccagttaaaactggctattcttttcctctatttcaaagtcatttttgttcagtggaatagagacagcaacatggtgttaacctctcaattaaaatacaattgacaccagtaaattttgccataaaaagttaaaatctcttgttcaaaatatgtgtatcttcttaatgtgttcatgttagagaaagtgtccccatctcactgccaaaaatgaaagaaaataattaaactctttaaatgattaaatgtaatgattctactcgcagtgcataacagcacatatttttgacagattattttttaggcaattacctttccttaaggtatctgatacagtatagtaaagaatcacttatatcagtaatagcacttgagagatagcaagtcaccaagaaacttaattttcatttaaaattttattttgtgaataaggtcaatctacaatcccagataactacattttttttcatagatggccagtgttttcaacagagatttaaaatggaatattaaaattatagtgattattcagaagcattttaatttagaaaggagctggtttgttagttcactgatgacattttttgacaaacattttataccattatcacaataatcagacttgaattttttttggagttccttcatgtgaatgaaaactgagttaaaagaaagtaggcatttaggtctggatgcagtggctcgtgcttgtgatcccagcactttgggaagctgaagcaggaggattgcttgagcccggaagttcgagactagcctgggcaacatagtgagactcggtctctaccaaaaaaaaaaatttttttttttttaaattagctgggtgtggtggcacctgggaaacagagcgagacgctgactcaaataaatatctaaatagatatttagaatcactgaaaaccatattaaatgctgggttaatgctgacttaattggcttaaggaatttttataggcgtaagataaattttcacagactaagtttatttcagacaaaatagagaattcttttaaaagtttttttttttttttcctttttcgaatgttaatgtctaagacaaagttcagaaaacgagatggcctgtggtagtttggaaattgctagatatgttgaccgtttccaggtcttttatctagtgtagttaagggaaagcctatttaagaagtttggcttcaagtttctgttttataagacaaaagtgcatatttctttacaggctaatgctaggtttttgtctttacaaattattttcagaaatggctaaaagtgtacagaaaacagtaaatcccttctttactcagaataacttcttaatagttgaagcatccaaaatatgtaaaagcaagggtgggcgtagtggctcttgcctgtgatcccagcattctgggaggccggggcgggcagatcacttgagatcaggagttcgagaccaccctggccaacgtggtgaaaccccgtctctactaaaaatacaaaaactagctgggcatggtggcttttttgcacgcctgtggtcccagctactcgggaggctgaggcacgagaatcacttgaacccaggaagtggaggttgcagtgagctaggatcgtgccactgcactccagcctggacaacggagtgagactctggggaaaaaaaaaattaaacttcctactttttttctttttgtagagacggagtttcactctgtcgcccaagctggagtgcagtggcacaatcatacctcactgcagcctcttgggcttatgtgatcttaccccctcagcctctggagtagctggaactacaggctaaatttcctactttgtaaacatcagtagtggccagatacttctgagtcttaaaagcataataggccgggcgcggtggctcacgcctgtaatcccagcactttgggaggccgaggtgggtggatcacaaggtcaggagttcaagaccagcctggcccaaatggtgaaaccctgtctctactaaatatacaaaaattagctgggtgtggtggcgggcacctgtaatcccagctactcaggaggctgaggcaggagaatcgcttgaacctgggaggtggaggttgtggtgagccaatatcatgccactgcactccagcctgggtgacggagtgagactccgtctcaaaaaaaaaaaaagcataataatttattacatcccaaatatataaaaatttgagtgcctttgcagttgggatggttcctaaaattgcgtatagaattaaggcacagaattgtgtgtaaggtcctgaatctggctaaaatacagtggatgtatgtattggaattatgaggcataagtagccagtatctatagttagaatctacaaggcctcctttttgcacctgtagactagaatataactgttattggtgcctttgagtgttatctctcagtggctagaggtgctgtttcaagcacaatttagactagggttgaaccactcattgttcaaatcattggtgggctccaatgtaaaatatcactacatcagtccacaagcaacattaaggaaatctaaaggaaatggaatttgactttttagagtataatgatgttctagggcataatgaggaaaatttttaaaaaatagattataatgatacatattggtatcattaagacaacagatttgagcaaatacaattaaggtgtcttattttttgcatcaagtaattattgctgtggtctttctactccacaaaataattttttctttttgcagttgaaaattaactgcattattaactaattaataaaataaatcaagtggtataagggattagtttaccctcaagccgatgactccatggctactgatattagttagtttaggatttttaaaaagcatatcagacccccagtttcaggaattgagtataaatattgcttcttgtcaccctgggacagtaatgccttatagtggcactagtcaccttaagtagattacacatggttgaggtgaataaagctgcatgggaatttgctttcgtgatatatttcatttgcaaacttctacataatcaagttttatgtttaaaaccatcggttctatatatctagctttaggaagttgcccttacaggtgggaccttttgtgttaatctgttttctccccagtcatcttatttggctatgtt

SEQ ID NO: 1177 - DNA, 4386 bp, Homo sapiens
gctgtgtgcgcaggcgcaagactagcgctcttgggaccggaagttaaggcgttcgcggcgtgtgaatccagggcctgaaaacccagaatgaacttgtgtccatcccagagatcactgcagatgtcatgaggtaccctttgtgtcaccagctcaagcaggcctctggccactttatcatctgtggtggtcctgtgccgtgaccaggaggaaaaattagctctttgaagagaaagtagttctctattgcaggcactggcctcttaaattgttgcaggtggggaatggatgagaatatttgttttgggtgatcagaactgagactcctattgtggattagtaacatgcctcctcctagaacaagggagggcagggatcgccgagaccaccaccgggctcccagcgaggaagaggccttggagaaatgggactggaattgtccagagacgcgtcgcctcttggaagatgccttcttccgtgaagaggattacatccgtcagggttctgaggaatgtcagaagttttggaccttctttgaacgcctgcagagattccagaatctcaagacctccaggaaggaggagaaagaccctggacagcccaagcacagcatcccagcgctggccgacctacctcgcacttacgacccacgttaccgcatcaacctctctgttcttggccctgccacgcggggctctcagggactgggcaggcacttgcccgcggagagagtggctgagttccgccgagccctgttgcactacctggactttggccagaagcaggcatttgggcgtctggccaagctgcagcgtgagcgggcagccctccccatcgcccagtatgggaaccgcatcctgcagacgctgaaggagcaccaggtggtggtagtggccggtgacaccggctgtggcaagtccactcaggtgccccagtacctgctggctgctggcttcagtcatgtggcgtgcacccagccccggcggatcgcctgcatctcactggccaagcgtgtgggctttgagagcctcagtcagtatggctcacaggtcggctaccagatccgctttgagagcacacgttcggcggccaccaagattgtattcctgacagtggggctgctcctgcgacaaatccagcgggaacccagcctgccccagtatgaggtcctgattgtggatgaagtccatgagcggcatctccacaacgatttcctcctgggcgtcctccagcgcctgttgcccacgcggcctgacctcaaggtcatcctcatgtcggccaccatcaacatctcgctcttctccagctatttcagcaatgcccctgtggtacaggtgcctgggaggctgttccccatcacggttgtgtaccagccgcaggaggcggagccgaccacgtccaagtcagagaagctggacccgcggcctttcctgagggtgctggagtccattgaccacaagtacccgcctgaggagcggggtgacctcctcgtcttcctcagcggcatggcggagatcagcgccgtgctggaggctgcccagacctatgccagccacacccagcgctgggtggtactgccactgcacagcgccctgtctgtggccgaccaggacaaggtatttgatgtggcaccccctggagtccggaaatgcatcctctccaccaacattgctgagacctcagtcaccattgacgggatccgcttcgtagtagattccggaaaggtgaaggagatgagctacgatccgcaggccaagctgcaacggctgcaggagttctggattagtcaggccagcgcagagcagcggaagggccgggcgggccgcacgggccccggagtctgcttccgcctctatgccgaatcggactatgatgccttcgccccctaccccgtcccagaaattcggagggtggccctggactcgttggtgctgcagatgaagagcatgagtgtgggggacccccgaaccttccccttcatcgagcccccaccaccagccagcctggaaaccgccatcctctacctccgggaccagggggccctggacagctcagaggccctcacacccattgggtccctgctagcccagctgcctgtggacgttgtgattgggaagatgctgatcctgggctccatgttcagcctggtggagcctgtgctcaccatcgcagccgcacttagcgtccagtcgcccttcacccgcagcgcccagagcagcccagagtgcgcggcagcacggcggccgctggagagcgaccagggtgaccccttcacgctcttcaacgtcttcaacgcctgggtgcaggtgaaatctgaacggagcagaaactctcgcaagtggtgccgccgccggggcatagaggagcatcgactgtacgaaatggccaaccttcggcgccagttcaaggagctgttggaggaccacgggctgctggctggggcccaggccgcgcaggtaggggacagctacagtcggttgcagcagcgccgggagcgccgggccctgcaccagctgaaacgccagcacgaggagggcgcggggcgcaggcgcaaggtgctgcggctgcaggaggagcaggacggcggctccagtgacgaggacagggctggcccagcccccccaggggccagtgatggcgtggacatccaggatgtgaagttcaagcttcggcatgacctggcgcagctgcaggccgctgccagctcagcccaggacctgagccgcgagcagctggctctgctgaagctggtgctgggccggggcctgtacccacagctggccgtccccgacgccttcaacagcagccgaaaggactcagaccagattttccacacgcaggccaagcagggcgccgtgctgcaccccacctgcgtcttcgctggcagccccgaggtgctgcacgcacaggagctggaggccagcaactgcgacggaagccgagacgacaaggacaagatgagcagcaaacaccagctcctcagcttcgtgtccctgctggagaccaacaagccgtacctggtgaactgcgtccgcatccctgccctccagtccctcctgctttttagccggtctttggacaccaatggtgactgctcccgcctggtggccgatggctggctggagctgcagctagcagacagtgaaagtgccatccgactcctggcggcttccctgcggctccgtgcccgctgggaaagtgccctggaccggcagctggcgcaccaggcccagcagcagctggaggaggaggaggaggatacgccagtcagccccaaggaggtggccaccctgagcaaggaactcctgcaattcacggcatccaagattccttacagcctccggcggctcacagggctagaagtccagaacatgtatgtgggaccccagaccatcccagccaccccccatcttcctggcctctttggcagctccaccctgtccccccaccccacaaaggggggctacgcagtcactgacttcctcacctacaactgcctcacgaatgacacagacctgtacagcgactgtctccgaaccttctggacctgcccccactgtggcctgcatgcgcccctcacgcccctggagcgcatcgcccatgagaacacctgcccccaggccccacaggatgggcccccaggggctgaggaagctgccctcgaaaccctccagaagacatctgtcctgcagaggccctaccactgcgaggcctgcgggaaggacttcctctttacacccacagaggtgctgcgccaccggaagcagcacgtgtgagctgggccaggagccctgcccacctccgtgcagctgacctgccctccagcccaggactaggggcaggactcttgcctgaacccccagcctgggcttagccctgtggtcctgtcccagtgcagagggcctggagcacggattgtgaataaagcctcacatgctgatacacactgttgttaggcctgcacctgcccatccagaaagcagcagctgccttgttagtcctccccagggtctagctttccttcttcctgctgcagggtgctgcctgaggggtcctgggtaggaggggcgttagagccagcagggacctcccatgtctccagattccaggtgcaggttcttagcacctccgcagccgctctctcttgagtccatcctcagtctctcctaccccttgaagtagggggaccctgaatttgcccatccacctgggtcactttgagagttgtgcaggggggctgggagcactggtgttcacgtgggaccacaggctgcaccataagacccactcacaataaaaaaataaaaggccgagccgggcatggttgctcactcccgtaataaaaaaataaaagaacaggctgagccgggaaaaaaaaaaaaaaaaaaa

SEQ ID NO: 1178 - DNA, 4461 bp, Homo sapiens
gctgtgtgcgcaggcgcaagactagcgctcttgggaccggaagttaaggcgttcgcggcgtgtgaatccagggcctgaaaacccagaatgaacttgtgtccatcccagagatcactgcagatgtcatgaggtaccctttgtgtcaccagctcaagcaggcctctggccactttatcatctgtggtggtcctgtgccgtgaccaggaggaaaaattagctctttgaagagaaagtagttctctattgcaggcactggcctcttaaattgttgcaggtggggaatggatgagaatatttgttttgggtgatcagaactgagactcctattgtggattagtaacatgcctcctcctagaacaagggagggcagggatcgccgagaccaccaccgggctcccagcgaggaagaggccttggagaaatgggactggaattgtccagagacgcgtcgcctcttggaagatgccttcttccgtgaagaggattacatccgtcagggttctgaggaatgtcagaagttttggaccttctttgaacgcctgcagagattccagaatctcaagacctccaggaaggaggagaaagaccctggacagcccaagcacagcatcccagcgctggccgacctacctcgcacttacgacccacgttaccgcatcaacctctctgttcttggccctgccacgcggggctctcagggactgggcaggcacttgcccgcggagagagtggctgagttccgccgagccctgttgcactacctggactttggccagaagcaggcatttgggcgtctggccaagctgcagcgtgagcgggcagccctccccatcgcccagtatgggaaccgcatcctgcagacgctgaaggagcaccaggtggtggtagtggccggtgacaccggctgtggcaagtccactcaggtgccccagtacctgctggctgctggcttcagtcatgtggcgtgcacccagccccggcggatcgcctgcatctcactggccaagcgtgtgggctttgagagcctcagtcagtatggctcacaggtcggctaccagatccgctttgagagcacacgttcggcggccaccaagattgtattcctgacagtggggctgctcctgcgacaaatccagcgggaacccagcctgccccagtatgaggtcctgattgtggatgaagtccatgagcggcatctccacaacgatttcctcctgggcgtcctccagcgcctgttgcccacgcggcctgacctcaaggtcatcctcatgtcggccaccatcaacatctcgctcttctccagctatttcagcaatgcccctgtggtacaggtgcctgggaggctgttccccatcacggttgtgtaccagccgcaggaggcggagccgaccacgtccaagtcagagaagctggacccgcggcctttcctgagggtgctggagtccattgaccacaagtacccgcctgaggagcggggtgacctcctcgtcttcctcagcggcatggcggagatcagcgccgtgctggaggctgcccagacctatgccagccacacccagcgctgggtggtactgccactgcacagcgccctgtctgtggccgaccaggacaaggtatttgatgtggcaccccctggagtccggaaatgcatcctctccaccaacattgctgagacctcagtcaccattgacgggatccgcttcgtagtagattccggaaaggtgaaggagatgagctacgatccgcaggccaagctgcaacggctgcaggagttctggattagtcaggccagcgcagagcagcggaagggccgggcgggccgcacgggccccggagtctgcttccgcctctatgccgaatcggactatgatgccttcgccccctaccccgtcccagaaattcggagggtggccctggactcgttggtgctgcagatgaagagcatgagtgtgggggacccccgaaccttccccttcatcgagcccccaccaccagccagcctggaaaccgccatcctctacctccgggaccagggggccctggacagctcagaggccctcacacccattgggtccctgctagcccagctgcctgtggacgttgtgattgggaagatgctgatcctgggctccatgttcagcctggtggagcctgtgctcaccatcgcagccgcacttagcgtccagtcgcccttcacccgcagcgcccagagcagcccagagtgcgcggcagcacggcggccgctggagagcgaccagggtgaccccttcacgctcttcaacgtcttcaacgcctgggtgcaggtgaaatctgaacggagcagaaactctcgcaagtggtgccgccgccggggcatagaggagcatcgactgtacgaaatggccaaccttcggcgccagttcaaggagctgttggaggaccacgggctgctggctggggcccaggccgcgcaggtaggggacagctacagtcggttgcagcagcgccgggagcgccgggccctgcaccagctgaaacgccagcacgaggagggcgcggggcgcaggcgcaaggtgctgcggctgcaggaggagcaggacggcggctccagtgacgaggacagggctggcccagcccccccaggggccagtgatggcgtggacatccaggatgtgaagttcaagcttcggcatgacctggcgcagctgcaggccgctgccagctcagcccaggacctgagccgcgagcagctggctctgctgaagctggtgctgggccggggcctgtacccacagctggccgtccccgacgccttcaacagcagccgaaaggactcagaccagattttccacacgcaggccaagcagggcgccgtgctgcaccccacctgcgtcttcgctggcagccccgaggtgctgcacgcacaggagctggaggccagcaactgcgacggaagccgaggcatggctgcgtgctgggagtcacattcagatttggctgaccttcttgtctgagccaggccaccaaagccatgccacgacaaggacaagatgagcagcaaacaccagctcctcagcttcgtgtccctgctggagaccaacaagccgtacctggtgaactgcgtccgcatccctgccctccagtccctcctgctttttagccggtctttggacaccaatggtgactgctcccgcctggtggccgatggctggctggagctgcagctagcagacagtgaaagtgccatccgactcctggcggcttccctgcggctccgtgcccgctgggaaagtgccctggaccggcagctggcgcaccaggcccagcagcagctggaggaggaggaggaggatacgccagtcagccccaaggaggtggccaccctgagcaaggaactcctgcaattcacggcatccaagattccttacagcctccggcggctcacagggctagaagtccagaacatgtatgtgggaccccagaccatcccagccaccccccatcttcctggcctctttggcagctccaccctgtccccccaccccacaaaggggggctacgcagtcactgacttcctcacctacaactgcctcacgaatgacacagacctgtacagcgactgtctccgaaccttctggacctgcccccactgtggcctgcatgcgcccctcacgcccctggagcgcatcgcccatgagaacacctgcccccaggccccacaggatgggcccccaggggctgaggaagctgccctcgaaaccctccagaagacatctgtcctgcagaggccctaccactgcgaggcctgcgggaaggacttcctctttacacccacagaggtgctgcgccaccggaagcagcacgtgtgagctgggccaggagccctgcccacctccgtgcagctgacctgccctccagcccaggactaggggcaggactcttgcctgaacccccagcctgggcttagccctgtggtcctgtcccagtgcagagggcctggagcacggattgtgaataaagcctcacatgctgatacacactgttgttaggcctgcacctgcccatccagaaagcagcagctgccttgttagtcctccccagggtctagctttccttcttcctgctgcagggtgctgcctgaggggtcctgggtaggaggggcgttagagccagcagggacctcccatgtctccagattccaggtgcaggttcttagcacctccgcagccgctctctcttgagtccatcctcagtctctcctaccccttgaagtagggggaccctgaatttgcccatccacctgggtcactttgagagttgtgcaggggggctgggagcactggtgttcacgtgggaccacaggctgcaccataagacccactcacaataaaaaaataaaaggccgagccgggcatggttgctcactcccgtaataaaaaaataaaagaacaggctgagccgggaaaaaaaaaaaaaaaaaaa

SEQ ID NO: 1179 - DNA, 3003 bp, Homo sapiens
tcggggagagaagctggactgcagctggtttcaggaacttctcttgacgagaagagagaccaaggaggccaagcaggggctgggccagaggtgccaacatggggaaactgaggctcggctcggaaaggtgaagtaacttgtccaagatcacaaagctggtgaacatcaagttggtgctatggcaaggctgggaaactgcagcctgacttgggctgccctgatcatcctgctgctccccggaagtctggaggagtgcgggcacatcagtgtctcagcccccatcgtccacctgggggatcccatcacagcctcctgcatcatcaagcagaactgcagccatctggacccggagccacagattctgtggagactgggagcagagcttcagcccgggggcaggcagcagcgtctgtctgatgggacccaggaatctatcatcaccctgccccacctcaaccacactcaggcctttctctcctgctgcctgaactggggcaacagcctgcagatcctggaccaggttgagctgcgcgcaggctaccctccagccataccccacaacctctcctgcctcatgaacctcacaaccagcagcctcatctgccagtgggagccaggacctgagacccacctacccaccagcttcactctgaagagtttcaagagccggggcaactgtcagacccaaggggactccatcctggactgcgtgcccaaggacgggcagagccactgctgcatcccacgcaaacacctgctgttgtaccagaatatgggcatctgggtgcaggcagagaatgcgctggggaccagcatgtccccacaactgtgtcttgatcccatggatgttgtgaaactggagccccccatgctgcggaccatggaccccagccctgaagcggcccctccccaggcaggctgcctacagctgtgctgggagccatggcagccaggcctgcacataaatcagaagtgtgagctgcgccacaagccgcagcgtggagaagccagctgggcactggtgggccccctccccttggaggcccttcagtatgagctctgcgggctcctcccagccacggcctacaccctgcagatacgctgcatccgctggcccctgcctggccactggagcgactggagccccagcctggagctgagaactaccgaacgggcccccactgtcagactggacacatggtggcggcagaggcagctggaccccaggacagtgcagctgttctggaagccagtgcccctggaggaagacagcggacggatccaaggttatgtggtttcttggagaccctcaggccaggctggggccatcctgcccctctgcaacaccacagagctcagctgcaccttccacctgccttcagaagcccaggaggtggcccttgtggcctataactcagccgggacctctcgtcccactccggtggtcttctcagaaagcagaggcccagctctgaccagactccatgccatggcccgagaccctcacagcctctgggtaggctgggagccccccaatccatggcctcagggctatgtgattgagtggggcctgggcccccccagcgcgagcaatagcaacaagacctggaggatggaacagaatgggagagccacggggtttctgctgaaggagaacatcaggccctttcagctctatgagatcatcgtgactcccttgtaccaggacaccatgggaccctcccagcatgtctatgcctactctcaagaaatggctccctcccatgccccagagctgcatctaaagcacattggcaagacctgggcacagctggagtgggtgcctgagccccctgagctggggaagagcccccttacccactacaccatcttctggaccaacgctcagaaccagtccttctccgccatcctgaatgcctcctcccgtggctttgtcctccatggcctggagcccgccagtctgtatcacatccacctcatggctgccagccaggctggggccaccaacagtacagtcctcaccctgatgaccttgaccccagaggggtcggagctacacatcatcctgggcctgttcggcctcctgctgttgctcacctgcctctgtggaactgcctggctctgttgcagccccaacaggaagaatcccctctggccaagtgtcccagacccagctcacagcagcctgggctcctgggtgcccacaatcatggaggaggatgccttccagctgcccggccttggcacgccacccatcaccaagctcacagtgctggaggaggatgaaaagaagccggtgccctgggagtcccataacagctcagagacctgtggcctccccactctggtccagacctatgtgctccagggggacccaagagcagtttccacccagccccaatcccagtctggcaccagcgatcaggtcctttatgggcagctgctgggcagccccacaagcccagggccagggcactatctccgctgtgactccactcagcccctcttggcgggcctcacccccagccccaagtcctatgagaacctctggttccaggccagccccttggggaccctggtaaccccagccccaagccaggaggacgactgtgtctttgggccactgctcaacttccccctcctgcaggggatccgggtccatgggatggaggcgctggggagcttctagggcttcctggggttcccttcttgggcctgcctcttaaaggcctgagctagctggagaagaggggagggtccataagcccatgactaaaaactaccccagcccaggctctcaccatctccagtcaccagcatctccctctcctcccaatctccataggctgggcctcccaggcgatctgcatactttaaggaccagatcatgctccatccagccccacccaatggccttttgtgcttgtttcctataacttcagtattgtaaactagtttttggtttgcagtttttgttgttgtttatagacactcttgggtgta

SEQ ID NO: 1180 - DNA, 2909 bp, Homo sapiens
tcggggagagaagctggactgcagctggtttcaggaacttctcttgacgagaagagagaccaaggaggccaagcaggggctgggccagaggtgccaacatggggaaactgaggctcggctcggaaaggtgaagtaacttgtccaagatcacaaagctggtgaacatcaagttggtgctatggcaaggctgggaaactgcagcctgacttgggctgccctgatcatcctgctgctccccggaagtctggaggagtgcgggcacatcagtgtctcagcccccatcgtccacctgggggatcccatcacagcctcctgcatcatcaagcagaactgcagccatctggacccggagccacagattctgtggagactgggagcagagcttcagcccgggggcaggcagcagcgtctgtctgatgggacccaggaatctatcatcaccctgccccacctcaaccacactcaggcctttctctcctgctgcctgaactggggcaacagcctgcagatcctggaccaggttgagctgcgcgcaggctaccctccagccataccccacaacctctcctgcctcatgaacctcacaaccagcagcctcatctgccagtgggagccaggacctgagacccacctacccaccagcttcactctgaagagtttcaagagccggggcaactgtcagacccaaggggactccatcctggactgcgtgcccaaggacgggcagagccactgctgcatcccacgcaaacacctgctgttgtaccagaatatgggcatctgggtgcaggcagagaatgcgctggggaccagcatgtccccacaactgtgtcttgatcccatggatgttgtgaaactggagccccccatgctgcggaccatggaccccagccctgaagcggcccctccccaggcaggctgcctacagctgtgctgggagccatggcagccaggcctgcacataaatcagaagtgtgagctgcgccacaagccgcagcgtggagaagccagctgggcactggtgggccccctccccttggaggcccttcagtatgagctctgcgggctcctcccagccacggcctacaccctgcagatacgctgcatccgctggcccctgcctggccactggagcgactggagccccagcctggagctgagaactaccgaacgggcccccactgtcagactggacacatggtggcggcagaggcagctggaccccaggacagtgcagctgttctggaagccagtgcccctggaggaagacagcggacggatccaaggttatgtggtttcttggagaccctcaggccaggctggggccatcctgcccctctgcaacaccacagagctcagctgcaccttccacctgccttcagaagcccaggaggtggcccttgtggcctataactcagccgggacctctcgtcccactccggtggtcttctcagaaagcagaggcccagctctgaccagactccatgccatggcccgagaccctcacagcctctgggtaggctgggagccccccaatccatggcctcagggctatgtgattgagtggggcctgggcccccccagcgcgagcaatagcaacaagacctggaggatggaacagaatgggagagccacggggtttctgctgaaggagaacatcaggccctttcagctctatgagatcatcgtgactcccttgtaccaggacaccatgggaccctcccagcatgtctatgcctactctcaagaaatggctccctcccatgccccagagctgcatctaaagcacattggcaagacctgggcacagctggagtgggtgcctgagccccctgagctggggaagagcccccttacccactacaccatcttctggaccaacgctcagaaccagtccttctccgccatcctgaatgcctcctcccgtggctttgtcctccatggcctggagcccgccagtctgtatcacatccacctcatggctgccagccaggctggggccaccaacagtacagtcctcaccctgatgaccttgaccccagcaggaagaatcccctctggccaagtgtcccagacccagctcacagcagcctgggctcctgggtgcccacaatcatggaggaggatgccttccagctgcccggccttggcacgccacccatcaccaagctcacagtgctggaggaggatgaaaagaagccggtgccctgggagtcccataacagctcagagacctgtggcctccccactctggtccagacctatgtgctccagggggacccaagagcagtttccacccagccccaatcccagtctggcaccagcgatcaggtcctttatgggcagctgctgggcagccccacaagcccagggccagggcactatctccgctgtgactccactcagcccctcttggcgggcctcacccccagccccaagtcctatgagaacctctggttccaggccagccccttggggaccctggtaaccccagccccaagccaggaggacgactgtgtctttgggccactgctcaacttccccctcctgcaggggatccgggtccatgggatggaggcgctggggagcttctagggcttcctggggttcccttcttgggcctgcctcttaaaggcctgagctagctggagaagaggggagggtccataagcccatgactaaaaactaccccagcccaggctctcaccatctccagtcaccagcatctccctctcctcccaatctccataggctgggcctcccaggcgatctgcatactttaaggaccagatcatgctccatccagccccacccaatggccttttgtgcttgtttcctataacttcagtattgtaaactagtttttggtttgcagtttttgttgttgtttatagacactcttgggtgta

SEQ ID NO: 1181 - DNA, 3084 bp, Homo sapiens
tcggggagagaagctggactgcagctggtttcaggaacttctcttgacgagaagagagaccaaggaggccaagcaggggctgggccagaggtgccaacatggggaaactgaggctcggctcggaaaggtgaagtaacttgtccaagatcacaaagctggtgaacatcaagttggtgctatggcaaggctgggaaactgcagcctgacttgggctgccctgatcatcctgctgctccccggaagtctggaggagtgcgggcacatcagtgtctcagcccccatcgtccacctgggggatcccatcacagcctcctgcatcatcaagcagaactgcagccatctggacccggagccacagattctgtggagactgggagcagagcttcagcccgggggcaggcagcagcgtctgtctgatgggacccaggaatctatcatcaccctgccccacctcaaccacactcaggcctttctctcctgctgcctgaactggggcaacagcctgcagatcctggaccaggttgagctgcgcgcaggctaccctccagccataccccacaacctctcctgcctcatgaacctcacaaccagcagcctcatctgccagtgggagccaggacctgagacccacctacccaccagcttcactctgaagagtttcaagagccggggcaactgtcagacccaaggggactccatcctggactgcgtgcccaaggacgggcagagccactgctgcatcccacgcaaacacctgctgttgtaccagaatatgggcatctgggtgcaggcagagaatgcgctggggaccagcatgtccccacaactgtgtcttgatcccatggatgttgtgaaactggagccccccatgctgcggaccatggaccccagccctgaagcggcccctccccaggcaggctgcctacagctgtgctgggagccatggcagccaggcctgcacataaatcagaagtgtgagctgcgccacaagccgcagcgtggagaagccagctgggcactggtgggccccctccccttggaggcccttcagtatgagctctgcgggctcctcccagccacggcctacaccctgcagatacgctgcatccgctggcccctgcctggccactggagcgactggagccccagcctggagctgagaactaccgaacgggcccccactgtcagactggacacatggtggcggcagaggcagctggaccccaggacagtgcagctgttctggaagccagtgcccctggaggaagacagcggacggatccaaggttatgtggtttcttggagaccctcaggccaggctggggccatcctgcccctctgcaacaccacagagctcagctgcaccttccacctgccttcagaagcccaggaggtggcccttgtggcctataactcagccgggacctctcgtcccactccggtggtcttctcagaaagcagaggcccagctctgaccagactccatgccatggcccgagaccctcacagcctctgggtaggctgggagccccccaatccatggcctcagggctatgtgattgagtggggcctgggcccccccagcgcgagcaatagcaacaagacctggaggatggaacagaatgggagagccacggggtttctgctgaaggagaacatcaggccctttcagctctatgagatcatcgtgactcccttgtaccaggacaccatgggaccctcccagcatgtctatgcctactctcaagaaatggctccctcccatgccccagagctgcatctaaagcacattggcaagacctgggcacagctggagtgggtgcctgagccccctgagctggggaagagcccccttacccactacaccatcttctggaccaacgctcagaaccagtccttctccgccatcctgaatgcctcctcccgtggctttgtcctccatggcctggagcccgccagtctgtatcacatccacctcatggctgccagccaggctggggccaccaacagtacagtcctcaccctgatgaccttgaccccagaggggtcggagctacacatcatcctgggcctgttcggcctcctgctgttgctcacctgcctctgtggaactgcctggctctgttgcagccccaacaggaagaatcccctctggccaagtgtcccagacccagctcacagcagcctgggctcctgggtgcccacaatcatggaggagctgcccggacccagacagggacagtggctggggcagacatctgaaatgagccgtgctctcaccccacatccttgtgtgcaggatgccttccagctgcccggccttggcacgccacccatcaccaagctcacagtgctggaggaggatgaaaagaagccggtgccctgggagtcccataacagctcagagacctgtggcctccccactctggtccagacctatgtgctccagggggacccaagagcagtttccacccagccccaatcccagtctggcaccagcgatcaggtcctttatgggcagctgctgggcagccccacaagcccagggccagggcactatctccgctgtgactccactcagcccctcttggcgggcctcacccccagccccaagtcctatgagaacctctggttccaggccagccccttggggaccctggtaaccccagccccaagccaggaggacgactgtgtctttgggccactgctcaacttccccctcctgcaggggatccgggtccatgggatggaggcgctggggagcttctagggcttcctggggttcccttcttgggcctgcctcttaaaggcctgagctagctggagaagaggggagggtccataagcccatgactaaaaactaccccagcccaggctctcaccatctccagtcaccagcatctccctctcctcccaatctccataggctgggcctcccaggcgatctgcatactttaaggaccagatcatgctccatccagccccacccaatggccttttgtgcttgtttcctataacttcagtattgtaaactagtttttggtttgcagtttttgttgttgtttatagacactcttgggtgta

SEQ ID NO: 1182 - DNA, 2583 bp, Homo sapiens
tcggggagagaagctggactgcagctggtttcaggaacttctcttgacgagaagagagaccaaggaggccaagcaggggctgggccagaggtgccaacatggggaaactgaggctcggctcggaaaggtgaagtaacttgtccaagatcacaaagctggtgaacatcaagttggtgctatggcaaggctgggaaactgcagcctgacttgggctgccctgatcatcctgctgctccccggaagtctggaggagtgcgggcacatcagtgtctcagcccccatcgtccacctgggggatcccatcacagcctcctgcatcatcaagcagaactgcagccatctggacccggagccacagattctgtggagactgggagcagagcttcagcccgggggcaggcagcagcgtctgtctgatgggacccaggaatctatcatcaccctgccccacctcaaccacactcaggcctttctctcctgctgcctgaactggggcaacagcctgcagatcctggaccaggttgagctgcgcgcaggctaccctccagccataccccacaacctctcctgcctcatgaacctcacaaccagcagcctcatctgccagtgggagccaggacctgagacccacctacccaccagcttcactctgaagagtttcaagagccggggcaactgtcagacccaaggggactccatcctggactgcgtgcccaaggacgggcagagccactgctgcatcccacgcaaacacctgctgttgtaccagaatatgggcatctgggtgcaggcagagaatgcgctggggaccagcatgtccccacaactgtgtcttgatcccatggatgttgtgaaactggagccccccatgctgcggaccatggaccccagccctgaagcggcccctccccaggcaggctgcctacagctgtgctgggagccatggcagccaggcctgcacataaatcagaagtgtgagctgcgccacaagccgcagcgtggagaagccagctgggcactggtgggccccctccccttggaggcccttcagtatgagctctgcgggctcctcccagccacggcctacaccctgcagatacgctgcatccgctggcccctgcctggccactggagcgactggagccccagcctggagctgagaactaccgaacgggcccccactgtcagactggacacatggtggcggcagaggcagctggaccccaggacagtgcagctgttctggaagccagtgcccctggaggaagacagcggacggatccaaggttatgtggtttcttggagaccctcaggccaggctggggccatcctgcccctctgcaacaccacagagctcagctgcaccttccacctgccttcagaagcccaggaggtggcccttgtggcctataactcagccgggacctctcgtcccactccggtggtcttctcagaaagcagaggcccagctctgaccagactccatgccatggcccgagaccctcacagcctctgggtaggctgggagccccccaatccatggcctcagggctatgtgattgagtggggcctgggcccccccagcgcgagcaatagcaacaagacctggaggatggaacagaatgggagagccacggggtttctgctgaaggagaacatcaggccctttcagctctatgagatcatcgtgactcccttgtaccaggacaccatgggaccctcccagcatgtctatgcctactctcaagaaatggctccctcccatgccccagagctgcatctaaagcacattggcaagacctgggcacagctggagtgggtgcctgagccccctgagctggggaagagcccccttacccactacaccatcttctggaccaacgctcagaaccagtccttctccgccatcctgaatgcctcctcccgtggctttgtcctccatggcctggagcccgccagtctgtatcacatccacctcatggctgccagccaggctggggccaccaacagtacagtcctcaccctgatgaccttgaccccagaggggtcggagctacacatcatcctgggcctgttcggcctcctgctgttgctcacctgcctctgtggaactgcctggctctgttgcagccccaacaggaagaatcccctctggccaagtgtcccagacccagctcacagcagcctgggctcctgggtgcccacaatcatggaggaggatgccttccagctgcccggccttggcacgccacccatcaccaagctcacagtgctggaggaggatgaaaagaagccggtgccctgggagtcccataacagctcagagacctgtggcctccccactctggtccagacctatgtgctccagggggacccaagagcagtttccacccagccccaatcccagtctggcaccagcgatcaggctgggcctcccaggcgatctgcatactttaaggaccagatcatgctccatccagccccacccaatggccttttgtgcttgtttcctataacttcagtattgtaaactagtttttggtttgcagtttttgttgttgtttatagacactcttgggtgta

SEQ ID NO: 1183 - DNA, 4640 bp, Homo sapiens
cccgcggctcgggatggaggctggacacctgttctgctgttgtgtcctgccattctcctgaagaacagaggcacactgtaaaacccaacacttccccttgcattctataagattacagcaagatggaaataccaaatccccctacctccaaatgtatcacttactggaaaagaaaagtgaaatctgaatacatgcgacttcgacaacttaaacggcttcaggcaaatatgggtgcaaaggctttgtatgtggcaaattttgcaaaggttcaagaaaaaacccagatcctcaatgaagaatggaagaagcttcgtgtccaacctgttcagtcaatgaagcctgtgagtggacacccttttctcaaaaagtgtaccatagagagcattttcccgggatttgcaagccaacatatgttaatgaggtcactgaacacagttgcattggttcccatcatgtattcctggtcccctctccaacagaactttatggtagaagatgagacggttttgtgcaatattccctacatgggagatgaagtgaaagaagaagatgagacttttattgaggagctgatcaataactatgatgggaaagtccatggtgaagaagagatgatccctggatccgttctgattagtgatgctgtttttctggagttggtcgatgccctgaatcagtactcagatgaggaggaggaagggcacaatgacacctcagatggaaagcaggatgacagcaaagaagatctgccagtaacaagaaagagaaagcgacatgctattgaaggcaacaaaaagagttccaagaaacagttcccaaatgacatgatcttcagtgcaattgcctcaatgttccctgagaatggtgtcccagatgacatgaaggagaggtatcgagaactaacagagatgtcagaccccaatgcacttccccctcagtgcacacccaacatcgatggccccaatgccaagtctgtgcagcgggagcaatctctgcactccttccacacacttttttgccggcgctgctttaaatacgactgcttccttcacccttttcatgccacccctaatgtatataaacgcaagaataaagaaatcaagattgaaccagaaccatgtggcacagactgcttccttttgctggaaggagcaaaggagtatgccatgctccacaacccccgctccaagtgctctggtcgtcgccggagaaggcaccacatagtcagtgcttcctgctccaatgcctcagcctctgctgtggctgagactaaagaaggagacagtgacagggacacaggcaatgactgggcctccagttcttcagaggctaactctcgctgtcagactcccacaaaacagaaggctagtccagccccacctcaactctgcgtagtggaagcaccctcggagcctgtggaatggactggggctgaagaatctctttttcgagtcttccatggcacctacttcaacaacttctgttcaatagccaggcttctggggaccaagacgtgcaagcaggtctttcagtttgcagtcaaagaatcacttatcctgaagctgccaacagatgagctcatgaacccctcacagaagaagaaaagaaagcacagattgtgggctgcacactgcaggaagattcagctgaagaaagataactcttccacacaagtgtacaactaccaaccctgcgaccacccagaccgcccctgtgacagcacctgcccctgcatcatgactcagaatttctgtgagaagttctgccagtgcaacccagactgtcagaatcgtttccctggctgtcgctgtaagacccagtgcaataccaagcaatgtccttgctatctggcagtgcgagaatgtgaccctgacctgtgtctcacctgtggggcctcagagcactgggactgcaaggtggtttcctgtaaaaactgcagcatccagcgtggacttaagaagcacctgctgctggccccctctgatgtggccggatggggcaccttcataaaggagtctgtgcagaagaacgaattcatttctgaatactgtggtgagctcatctctcaggatgaggctgatcgacgcggaaaggtctatgacaaatacatgtccagcttcctcttcaacctcaataatgattttgtagtggatgctactcggaaaggaaacaaaattcgatttgcaaatcattcagtgaatcccaactgttatgccaaagtggtcatggtgaatggagaccatcggattgggatctttgccaagagggcaattcaagctggcgaagagctcttctttgattacaggtacagccaagctgatgctctcaagtacgtggggatcgagagggagaccgacgtcctttagccctcccaggccccaacggcagcacttatggtagcggcactgtcttggctttcgtgctcacaccactgctgctcgagtctcctgcactgtgtctcccacactgagaaaccccccaacccactccctctgtagtgaggcctctgccatgtccagagggcacaaaactgtctcaatgagaggggagacagaggcagctagggcttggtctcccaggacagagagttacagaaatgggagactgtttctctggcctcagaagaagcgagcacaggctggggtggatgacttatgcgtgatttcgtgtcggctccccaggctgtggcctcaggaatcaacttaggcagttcccaacaagcgctagcctgtaattgtagctttccacatcaagagtccttatgttattgggatgcaggcaaacctctgtggtcctaagacctggagaggacaggctaagtgaagtgtggtccctggagcctacaagtggtctgggttagaggcgagcctggcaggcagcacagactgaactcagaggtagacaggtcaccttactacctcctccctcgtggcagggctcaaactgaaagagtgtgggttctaagtacaggcattcaaggctgggggaaggaaagctacgccatccttccttagccagagagggagaaccagccagatgatagtagttaaactgctaagcttgggcccaggaggctttgagaaagccttctctgtgtactctggagatagatggagaagtgttttcagattcctgggaacagacaccagtgctccagctcctccaaagttctggcttagcagctgcaggcaagcattatgctgctattgaagaagcattaggggtatgcctggcaggtgtgagcatcctggctcgctggatttgtgggtgttttcaggccttccattccccatagaggcaaggcccaatggccagtgttgcttatcgcttcagggtaggtgggcacaggcttggactagagaggagaaagattggtgtaatctgctttcctgtctgtagtgcctgctgtttggaaagggtgagttagaatatgttccaaggttggtgaggggctaaattgcacgcgtttaggctggcaccccgtgtgcagggcacactggcagagggtatctgaagtgggagaagaagcaggtagaccacctgtcccaggctgtggtgccaccctctctggcattcatgcagagcaaagcactttaaccatttcttttaaaaggtctatagattggggtagagtttggcctaaggtctctagggtccctgcctaaatcccactcctgagggagggggaagaagagagggtgggagattctcctccagtcctgtctcatctcctgggagaggcagacgagtgagtttcacacagaagaatttcatgtgaatggggccagcaagagctgccctgtgtccatggtgggtgtgccgggctggctgggaacaaggagcagtatgttgagtagaaagggtgtgggcgggtatagattggcctgggagtgttacagtagggagcaggcttctcccttctttctgggactcagagccccgcttcttcccactccacttgttgtcccatgaaggaagaagtggggttcctcctgacccagctgcctcttacggtttggtatgggacatgcacacacactcacatgctctcactcaccacactggagggcacacatgtaccccgcacccagcaactcctgacagaaagctcctcccacccaaatgggccaggccccagcatgatcctgaaatctgcatccgccgtggtttgtattcattgtgcatatcagggataccctcaagctggactgtgggttccaaattactcatagaggagaaaaccagagaaagatgaagaggaggagttaggtctatttgaaatgccaggggctcgctgtgaggaataggtgaaaaaaaaacttttcaccagcctttgagagactagactgaccccacccttccttcagtgagcagaatcactgtggtcagtctcctgtcccagcttcagttcatgaatactcctgttcctccagtttcccatcctttgtccctgctgtcccccacttttaaagatgggtctcaacccctccccaccacgtcatgatggatggggcaaggtggtggggactaggggagcctggtatacatgcggcttcattgccaataaatttcatgcactttaaagtcctgtggcttgtgacctcttaataaagtgttagaatccaaaaaaaaaaaaaaaa

SEQ ID NO: 1184 - DNA, 2792 bp, Homo sapiens
ccacgcgtccgaactgagtgcgctgagcggggaagcgcaaaggggcaagttacccgtcctggcgtttctggggttcgcctcggaggctagcctcggtgctctcgcaggctcgctcgcttctgcatccccgttgccgcccggagccaactcttaagttctggacgccaggcctgaggcagttccgccatggacttctccaagttcctggcagacgacttcgacgtgaaggagtggatcaatgcggccttcagggccggctccaaggaggcggcgtccgggaaggcggatggccacgcagccaccctggtgatgaagctgcagctgttcatccaagaggtgaaccacgccgtggaggaaacaagtcaccaagctctccagaacatgcccaaagtgctccgtgatgttgaagccctaaaacaggaggcatctttcctgaaagaacagatgattcttgtcaaggaggacattaaaaaatttgaacaggacacatctcaatccatgcaggtgttggtagaaattgaccaagtgaagtccagaatgcaacttgctgccgaatctcttcaggaagcagataagtggagcacgttgagcgccgatattgaggagacatttaagactcaggacatagctgtgatttctgccaagctaacaggtatgcagaacagcttaatgatgcttgttgatacaccagactactcagaaaagtgtgtgcacttggaggcactgaagaacaggctggaggccctagccagtccacagattgtagcggcattcacctctcaggctgtagatcagtccaaagtgtttgtgaaggtgtttactgaaattgaccggatgccccagctcctggcctactactacaagtgtcacaaggtgcagcttttagcagcctggcaagagctgtgtcaaagtgacctatccctggaccggcagcttaccggactctatgatgccttgcttggtgcttggcacacacaaatccagtgggctacacaggttttccagaagccccacgaggtggtaatggtgctgctgattcagaccctgggggccctcatgccctcgctgccctcctgcctcagcaacggcgtggagagggcagggcccgagcaggagctcaccaggctgctggagttctacgacgccaccgcccacttcgccaagggcttggagatggcactgctcccccacctacatgaacacaatctggtaaaagtcacggagctggtggatgctgtgtatgatccatacaaaccctaccagctgaagtatggcgacatggaagagagcaacctcctcatccagatgagtgctgtgcctctggagcatggggaagtgattgactgtgtgcaggagctgagccactccgtgaacaagctgtttggtctggcgtctgcagccgttgacagatgcgtcagattcaccaatggcctggggacctgcggcctgttgtcagccctgaaatccctctttgccaagtatgtgtctgatttcaccagcactctccagtccatacgaaagaagtgcaaactggaccacattcctcccaactccctcttccaggaagattggacggcttttcagaactccattaggataatagccacctgtggagagcttttgcggcattgtggggacttcgagcagcagctagccaacaggattttgtccacagctgggaagtatctatctgattcctgcagcccccggagcctggctggttttcaggagagcatcttgacagacaagaagaactctgccaagaacccatggcaagaatataattacctccagaaagataaccctgctgaatatgccagtttaatggaaatactttatacccttaaggaaaaagggtcaagcaaccacaacctgctggctgcacctcgagcagcgctgactcggcttaaccagcaggcccaccagctggctttcgattccgtgttcctgcgcatcaaacaacagctgttgcttatttcgaagatggacagctggaatacggctggcatcggagaaaccctcacagatgaactgcccgcctttagtctcacccctctcgagtacatcagcaacatcgggcagtacatcatgtccctccccctgaatcttgagccatttgtgactcaggaggactctgccttagagttggcattgcacgctggaaagctgccatttcctcctgagcagggggatgaattgcccgagctggacaacatggctgacaactggctgggctcgatcgccagagccacaatgcagacctactgtgatgcgatcctacagatccctgagctgagcccacactctgccaagcagctggccactgacatcgactatctgatcaacgtgatggatgccctgggcctgcagccgtcccgcaccctccagcacatcgtgacgctactgaagaccaggcctgaggactatagacaggtcagcaaaggcctgccccgtcgcctggccaccaccgtggccaccatgcggagtgtgaattactgaccccaccacacaccggaccaccaagagagccagggctgctgtttcgcgactcaccagcacagatttgctcagaaactctgcccaagattgggcagaagttactttaaaaagacttggttcagctggtcacggtggctcacgcctgtaatcccagcactttgggaggccaagccagatggatcatgaagccaggagttcgagaccagcctgaccaacatggtgaaaccccatctctactaaaaatacaaaaattaacagcagagcgagactctgtctcaaaaaaaaaaaaaaaa

SEQ ID NO: 1185 - DNA, 15156 bp, Homo sapiens
cctctgcggagccgggctcgggtcgccggagccgcgccccaccccgccagctccagagccacgactaatggctgaaggataaatcaacatggcaactatgattccaccagtgaagctgaaatggcttgaacacttgaacagctcctggattacagaggacagtgaatctattgctacaagagagggagttgctgttctgtattctaaactggttagcaataaggaagtagtacctttgccccaacaagttttatgcctcaaaggaccacagttgccagactttgaacgtgagtctctttcaagtgatgagcaggaccactatttggatgcccttcttagcagccagctagcattggcaaagatggtatgttcagattccccatttgccggggcacttagaaaacgactgcttgtactccagcgtgtcttttatgcactttctaataaataccatgacaaaggcaaggtgaagcagcagcagcattctccggagagcagttctggttcagcagatgtccattctgttagtgaacgcccccggtcaagcactgatgcacttatagaaatgggtgttcgaactggtctaagtttattatttgcgcttctaagacaaagttggatgatgcctgtgtcaggacctggtctcagtctttgcaacgatgtcattcatactgcaattgaagttgtgagctctttgccaccattatcattagcaaatgaaagcaagattcctcctatgggcttggactgcttatcgcaagtaacaacatttcttaaaggagtcactattcctaattctggggcagacactttaggtcgtagattagcttctgagttgctgcttggtttggcagctcaacgaggctcattgcgatatcttcttgaatggatagaaatggctttgggggcttcggcagttgtacacaccatggagaaaggcaaactactctcaagccaggaaggaatgatcagctttgactgctttatgaccatattaatgcagatgaggcgttctttgggttcatctgctgatcggagtcagtggagagaaccaaccagaacatcggatggcttgtgctccctttacgaggcagcattatgtctctttgaagaggtttgcagaatggcttctgattattcgagaacatgtgctagcccagatagcattcagactggtgatgctcccattgtctccgaaacctgtgaggtttatgtttgggggagcaatagcagccatcagttggtagaaggtacacaggagaaaatactgcaacccaaactggctcctagtttctctgatgcacagaccattgaagctggacagtactgcacttttgtcatttctacggatggctctgttagagcttgcgggaaaggcagctatgggagactgggccttggagactccaataatcagtcaactttaaaaaagttaacattcgagcctcacagatccattaaaaaggtttcatcttctaaaggatctgatggtcacactttagcctttacgacagaaggagaagtcttcagttggggagatggtgattatgggaaactggggcatggaaatagttcaacacagaaatatcccaagcttattcagggacctctacaaggaaaggtagttgtttgtgtgtcagctggatacagacatagtgctgctgtcacagaggatggggaattatacacatggggtgaaggagactttggaagattaggtcatggtgacagcaatagtcgtaacattccaacattagtaaaagacatcagcaatgtaggagaggtttcttgtggcagttcacatactattgctctgtctaaagatgggagaactgtatggtcttttggaggaggagacaatggtaaacttggtcatggtgataccaacagagtgtataaacctaaagttattgaagctttacaaggaatgttcattcgcaaagtttgtgctgggagccagtcttcacttgctttgacatcaacagggcaggtctatgcttggggctgtggagcttgtctaggttgtggttcttcagaagctactgctttgagacccaagcttattgaagaactggctgccacaagaatagttgatgtttctattggagacagtcattgtttggctctttctcatgataatgaagtttatgcctggggcaataactcaatggggcaatgtggtcagggaaattccacaggtcctattactaaaccaaagaaagtgagtggcttagatggcatagctattcagcagatttcggctggaacatcacatagtctggcatggactgctcttcctagggacagacaagttgttgcatggcaccgaccttattgtgtagatcttgaagagagtaccttctcacacctgcgttcttttcttgagagatactgtgataaaataaacagtgagattcccccactccctttcccttcatcaagagaacaccacagttttctcaagctgtgcctgaagctactttcaaatcaccttgctcttgcacttgcgggaggggtagctaccagcattctcgggaggcaggcaggtccacttcgaaatttgctcttcagactgatggactcaactgtcccagatgaaatccaagaggtggtaattgaaactttatcagtgggagcaaccatgctgttacctccattacgagaacggatggaattacttcattctcttttacctcaaggacctgatagatgggaaagcttatctaaaggacagagaatgcaactggatatcatcctgacaagtttgcaagatcatacccacgtagcctccctacttggctatagttcaccctctgatgctgctgacctatcttctgtgtgtactggctacggaaatctgtcagatcaaccttacggcactcagagctgccatccagatacccacctggctgaaattttgatgaagaccctcttaagaaatttaggattttatacagatcaagcatttggagagctagaaaagaatagtgataaatttctacttggaacatcatcatcagaaaacagtcagcctgctcatcttcatgaactgctatgttcactacagaaacagctgctggcattttgccatatcaataacattagtgagaactcaagcagtgtggcattgcttcataaacatcttcagcttttgttgcctcatgccacagatatttattcacgttctgcaaatttgctcaaagaaagtccttggaatggcagtgttggagaaaaattaagagatgtgatatacgtctcagctgctggcagtatgctctgccagattgttaactccctgctgttactccctgtgtcagtggctcggcctttattgagttacctcctcgacttgttgccacctcttgattgccttaatagactcctgccagctgctgatcttttagaagaccaggagttacagtggcctcttcatggagggccagaactaattgatcctgctggtctgccattacctcagccagctcagtcctgggtatggcttgtggatctagaaagaacaattgctctccttattgggcggtgtcttggtggcatgcttcagggctcccctgtgtctccagaggaacaggacactgcatattggatgaaaacgccactgttcagtgacggtgtagaaatggacactcctcaattggataaatgtatgagttgcctgttagaagtagcactttctggaaatgaagaacagaagccttttgattataaattgcggcctgaaattgctgtctatgtagacttggcattgggttgttctaaagagcctgcccgaagcctttggatcagcatgcaggactatgctgttagtaaagattgggacagtgcaactttaagtaatgagtcactcttggacactgtgtctagatttgttcttgcagctcttctgaaacacacaaatttacttagtcaagcatgtggagaaagccgatatcaacctggtaaacacttatcagaagtgtaccgttgtgtatacaaagttcgaagtcgtttacttgcttgcaagaaccttgaacttattcaaacaaggtcatcatcacgggacagatggatatcagaaaaccaggactctgcagatgttgatcctcaggagcattcatttactcgaactattgatgaagaagctgaaatggaagaacaggctgagagagaccgggaagaggggcatccggagccagaggatgaagaggaggaacgggaacatgaagtgatgacagctggcaaaatctttcagtgtttcctctcagcccgtgaagtagctcgtagccgagaccgagatagaatgaacagtggggcagggtctggggctcgagctgatgatccacctcctcagtctcagcaagagcgaagggtcagcacagaccttcctgagggtcaggatgtgtacactgctgcatgcaactccgtgatccatcggtgtgccctgttaatattaggagtaagtcctgtgatagatgagcttcagaagcgaagagaagaaggacagttgcagcaaccttcaacaagtgcctctgaagggggtggacttatgaccaggagtgaaagtcttactgcagagagccggctagtccacacaagcccaaattatagactgatcaaatcgaggagtgaatctgatttgtctcagcctgaatcagatgaagagggttacgcactgagtggcagacgaaatgttgatttggatttggcagcatctcacagaaagagaggtcctatgcacagtcaattggaatccctgagtgactcttgggctcgcctgaaacatagcagagactggttatgcaactcctcctattcctttgagtcagattttgatcttaccaagtctttgggagttcacactttgattgaaaatgttgtaagctttgtgagtggagatgtggggaatgccccaggttttaaagagccagaggaaagtatgtctacaagtccccaggcctccatcattgcaatggaacagcagcagttaagggcagaacttcgtttagaggcacttcatcagatcctcgttctattgtctgggatggaagaaaaaggtagcatctcactggcaggaagcagattgagttcaggcttccagtcctccacactactcacgtctgtgaggctgcagttcctagcagggtgttttggtttaggcactgttggacacacaggagccaagggagagagtggccgattgcatcactatcaggatgggatcagagcagctaagagaaatattcagattgaaatccaggtagctgtgcataaaatttatcaacagttgtctgctaccctggaaagagccctgcaagcaaacaagcatcacattgaagcccagcaacgtctgcttctggttacagtttttgccctaagtgttcattatcaaccagtagatgtttctttggcaatttccactggtctgctaaacgtattgtcacagttgtgtggtacagacaccatgctaggacagcccctgcagttgttgccaaagacgggtgtttcccagcttagcacagctttgaaagtggccagtacaaggttgctccagattctagccatcactactgggacctatgctgataaactgagtcccaaagtagttcaatccttgttggatctactctgtagtcagttgaagaatttattgtcccaaactggtgtactacatatggcctctttcggagaaggggagcaagaagacggtgaagaagaagaaaaaaaagttgactccagtggagaaactgagaagaaagatttcagagctgctcttaggaaacaacatgcagccgaactccatctaggggattttttagtttttcttcgcagagttgtatcttcaaaagcaattcaatcaaaaatggcttccccaaagtggaccgaagtgcttctaaatatagcatctcagaaatgttcttcaggtatccctctggttggtaacttaagaacaaggctccttgcacttcatgtccttgaagctgtgctgccagcttgtgaatctggtgtagaagatgatcaaatggcccagattgttgagcgcttattttcccttctctctgattgtatgtgggagacacccattgctcaggccaaacatgctattcagataaaggaaaaagaacaagaaataaaactacagaagcagggcgagttggaagaagaagatgagaatcttcctatccaagaagtatcctttgacccggagaaagctcagtgttgcctagtggagaatggacagattttaactcacggcagtggagggaaaggatatggattggcatctacaggagtaacttctgggtgctatcagtggaagttttatattgtgaaggaaaacagaggtaatgaaggcacgtgtgttggagtttctcgctggccagtacatgactttaatcaccgcactacctcggatatgtggctctatagggcctacagtggtaacctctatcacaatggagaacagactctcacattgtccagctttactcaaggagatttcattacctgtgtgttagacatggaagccaggaccatttcttttgggaaaaatggagaggaacccaaattagcttttgaagatgtggatgcagcagagttgtacccatgtgtgatgttctatagtagcaatccaggggaaaaggtgaaaatttgtgatatgcagatgcgtggcacaccccgagacttacttccaggagaccctatttgtagtccagtagcagcagtgctggctgaggccactattcagctcatccgtatccttcaccgaacagaccgttggacttactgcattaacaaaaaaatgatggaaaggcttcacaaaattaagatatgtattaaagagtcaggtcagaagctaaagaaaagccgctcggttcagagccgagaggaaaatgaaatgagagaggagaaggagagcaaagaggaagagaaaggtaaacatactaggcatggcctcgctgacctctcagagctgcagctgaggactctttgcatagaggtgtggcccgtgctggctgtgataggaggagttgatgctggtcttagagttggaggtcggtgtgttcacaagcaaactgggcgccatgccacgctgctgggagtggtcaaagagggcagcacgtctgccaaggtccaatgggatgaagcagaaattactatcagcttcccaactttttggtcgcctagtgatactccattgtataatctggaaccctgtgaaccattgccgtttgatgtggcgcgattccgaggcctgacggcttctgtgctgctggacctaacatatctcactggcgttcatgaagacatgggcaaacagagcaccaaacgacatgaaaagaaacaccgacatgaatccgaggagaaaggggatgttgagcagaaacctgagagtgaatccgctttagatatgcgaacaggcctaacatctgatgacgtcaaaagtcagagtaccacaagctccaaatcagaaaatgaaatcgcttcattttctttagatccaacactgccaagtgtggaatcccaacatcaaataacagaagggaaaagaaaaaatcatgaacacatgtccaaaaaccatgatgtagcccagtcagaaatcagagcagtccagctgtcctatctttacctcggtgctatgaagtcacttagtgcccttcttggctgtagtaaatatgctgagctgttgctgataccaaaagttctggctgaaaatggccacaactcagactgtgcaagttctccagttgttcatgaagacgtggagatgcgagcagccctgcagttcttgatgcgacacatggtgaagcgagcagtcatgcggtcacccataaagagagcattgggattagctgatctggaacgagcgcaagccatgatctataaattagtggttcatgggcttttggaagaccagtttgggggcaaaattaagcaagagattgatcaacaagctgaagaaagtgaccctgcccagcaggcacagacaccagttactactagcccatcagcctcaagcacgacctcctttatgagcagctctctggaggacaccacaactgccaccactccagtcactgacacagaaacagtgcctgcatccgagtccccgggagtgatgcctcttagtcttctcaggcaaatgttctctagttacccaactaccactgtacttcccacacgtcgggcacagactcctccaatatcttcgttaccaacctctccttctgatgaagtaggaaggaggcaaagtttaacttctcctgattcccagtcagcaaggccagctaaccgcacagccttgtcagacccaagcagtagactttcaacttctcctcctcctccagcaattgcagttcccttgctggaaatggggttctctcttcggcagattgccaaagccatggaagctacaggtgctaggggagaggctgatgcccagaatatcactgtccttgccatgtggatgatagagcaccctgggcatgaggatgaagaggagccccagtcgggcagcacagcagactctaggcctggagcagccgttctaggcagtggcgggaagtcaaatgatccctgttatttgcagtcacctggagacataccatcagctgatgctgctgaaatggaggaaggttttagtgaaagccctgataatttggatcatacagagaatgcagcttctggaagtggaccatcagctagaggtcgctcagcggtaacaagaagacacaagtttgacttagctgctcgcacactgctagcaagagcagcgggattataccgctctgtgcaggcccacaggaatcaaagtcggagagaaggaatatctttgcagcaagacccaggggcgttgtatgactttaatttagatgaggaattggaaattgatcttgatgatgaggcgatggaagctatgtttggacaagacctgaccagtgacaatgatattctgggaatgtggatcccagaggtactggattggcctacctggcatgtttgtgagtctgaagacagggaagaagtggtggtgtgtgaactgtgtgaatgcagcgtcgtcagcttcaatcagcacatgaagagaaaccatccaggctgtgggcgcagtgcaaaccgccagggctatcgcagcaatggttcctatgtggatggctggtttggcggtgaatgtgggagtggaaatccatactacctgttatgtggcacctgcagggagaagtacttagccatgaagaccaaatctaagtcaacaagttctgaaaggtacaagggacaagctccagatctaattggcaagcaagacagtgtgtatgaagaagactgggacatgttggatgttgatgaagatgaaaagctaactggtgaagaagaatttgaattacttgctggaccgcttggtttaaatgaccggcgcattgtaccagaaccagttcagttccctgacagcgatccactgggagcatcagtagcaatggtcacagccaccaacagtatggaagagactctgatgcaaataggttgccatggctccgtagaaaagagctcctctgggagaataacgttaggagagcaggcagctgccctagcaaaccctcatgaccgtgtggtggctttaaggagagtgactgctgctgctcaggttcttctggccagaaccatggtcatgagagcgctgtctcttctctcagtcagtggttccagttgtagcctggctgctggtcttgagtctctggggctaacagatatccgaacgctagttcgattaatgtgcttggcagcagcagggagagctggcctctccaccagcccttctgccatggctagcacctcagaacgatcacgaggtgggcatagcaaggctaacaagcctatctcttgcctggcctatttgagcacagcagtgggatgtctggcatcaaatgctcctagtgctgccaaactgcttgtacagttgtgtacacagaacttgatttctgctgcaacaggtgtaaatctaaccacagttgatgactcaattcagcgaaagtttctacccagctttctccgaggaattgctgaagagaacaagcttgtgacctccccaaactttgttgtaacacaggcccttgtggcattgctagcagacaaaggggccaaactaagacctaactatgataagtcagaagttgaaaagaaaggccctctggagttggctaatgccctggcagcctgctgcctctcctccaggctgtcctcacagcatcggcaatgggcagctcagcaactcgtgcgcactcttgctgcacacgaccgtgacaaccaaactactctgcagacacttgctgatatgggaggagatcttagaaaatgctcctttatcaaattggaggctcatcagaacagagtaatgacatgtgtttggtgtaataaaaaaggtcttttggctacaagtggcaatgatggcaccatccgcgtatggaatgttaccaagaagcaatattcactgcaacagacctgtgtgttcaacagattggaaggggatgctgaggaaagcctgggatcacccagtgatccaagtttctcaccagtttcctggagtatcagtggcaaatatctagcaggcgctttggaaaagatggtgaatatctggcaagttaatggaggaaaaggattagtagatattcagcctcattgggtatctgccctggcttggccagaagagggtccggctacagcctggtcaggagagtctccagaattgttgttggtgggacggatggatggatctctgggactgattgaagttgttgatgtgtccaccatgcaccgtcgagaattggagcattgctatcgaaaggatgtgtctgttacttgcattgcatggttcagtgaagacagaccatttgcagtgggatattttgatggaaaactgttactgggaacaaaggaaccacttgagaaaggaggcattgttctaattgatgcacataaggatactcttattagcatgaagtgggaccctacaggtcatattcttatgacatgtgccaaagaagacagtgtgaaactctggggctctatttcgggatgctggtgctgtctacattcactctgccatccatctattgtaaatggcattgcttggtgccgccttccagggaaaggatccaagttgcagttactgatggctactggctgtcagagtggcttagtatgtgtttggcgcattcctcaagatactacacagaccaatgtgactagtgcagaaggatggtgggagcaggaatcaaattgccaggatggatataggaaatcatcaggagccaagtgtgtttatcagctgcggggacacatcactcctgttcggactgttgcctttagttctgatgggttggccctggtgtctggtggactaggtgggctcatgaacatttggtctttaagggatggctctgtcttgcaaactgttgtgataggctctggagctattcagaccacagtatggattccagaagttggagtagctgcttgctcaaatagatcaaaggatgttttggtcgtgaattgtacagcagaatgggcagctgccaatcatgttttggcaacctgtaggacagcattgaaacagcagggtgttctgggattgaacatggctccctgcatgagagcatttttggagcggctccccatgatgcttcaggagcagtatgcctatgaaaagcctcatgtggtttgtggtgaccaacttgttcatagcccctatatgcaatgcttggcttcccttgctgtgggacttcatctggatcagctgttgtgtaaccctccagtgccaccacaccaccagaactgtctccctgaccctgcatcctggaatccaaatgaatgggcctggttagaatgtttctcaaccactataaaagctgccgaagccctgaccaatggagcccagtttccagaatcttttaccgttccagatctagaacctgttccagaggatgaacttgtatttctaatggataacagtaaatggattaacggcatggatgaacaaattatgtcttgggcaacttccagacctgaggactggcacctgggaggtaaatgtgatgtctacttatggggtgctggtaggcatggacagctggcagaagctggaagaaatgtaatggtacctgcagcagctccctcattctcacaggcccaacaggtcatttgtggtcagaattgtacctttgtcatccaggccaatggcacagtgttggcttgtggggaaggaagttatggcagattaggacaaggaaattcagatgaccttcatgtgctgacagttatttcagccttacaaggctttgtggtgacccagctggtgacttcctgtggttctgatgggcactctatggccctaactgaaagtggtgaggtctttagctggggagatggtgactatggtaaacttggccatgggaacagcgacaggcagcggcggcccaggcagatcgaggccttacaaggagaagaagtggtgcagatgtcttgtggcttcaagcactcagcagtggtcacttcagatggcaaactgttcacctttgggaatggtgactatggtcgtctgggtcttggaaatacctctaacaaaaaacttccagagagagtgactgcactggagggatatcagattggacaggtggcctgtggattaaaccacactttggcagtgtcagcagatggttccatggtgtgggcttttggagatggagactatggaaaactaggcttaggaaattccactgcaaaatcttcacctcagaaaattgacgtcctttgtggaattggaataaaaaaggttgcttgtggaactcagttttctgttgctttgaccaaagatggtcatgtgtatacctttggtcaagatcgcctgataggcttgccagaggggcgtgctcgcaatcacaatcgaccgcaacaaatccctgtcctggctggagtaatcatagaagatgtggcagttggagctgaacacacacttgctttggcatcaaatggagatgtgtatgcctgggggagcaattcagaagggcagctcggcttaggccataccaaccatgttcgagaaccaaccctggtaacaggtctgcaagggaaaaatgttcggcagatctcggctggccgctgccacagtgctgcatggacagcaccacctgtcccaccaagagcaccaggtgtgtcagtacctctgcagctgggcctgcctgacacagtgcccccccagtatggggcgctgagagaagtcagcattcacacggtgcgggccaggctccggctgctctaccacttctctgacctcatgtactcatcctggagactgctgaaccttagccccaacaaccagaacagcacatcccattataatgctggaacttggggcattgtacagggacaacttcggcctttgttagccccaagagtctacactctgccaatggtgcgctccataggaaaaaccatggttcaaggcaaaaactatggacctcagataactgtaaagaggatatcaaccagaggacggaagtgtaagcctatttttgtccaaatagcgagacaagtagttaagctgaatgcttcagacctccgcctgccttcccgagcgtggaaggttaagctggttggagaaggggctgatgatgctggaggagtgtttgatgacaccatcacagagatgtgccaggaacttgaaactggtattgttgaccttcttataccctctcccaatgccaccgcagaagtgggttacaatagggacaggttcctttttaacccttctgcctgcctcgatgaacacttaatgcagtttaagtttttaggaattttaatgggggttgccattcgcacaaagaagcctctggacctccacttggcccctctggtgtggaagcagctgtgctgtgtcccactcaccctagaggacctggaggaggtggatctgctctacgtgcagactctcaacagcattcttcacattgaagacagtgggattaccgaggagagtttccatgagatgattcctcttgattcttttgttggccagagtgctgatggcaaaatggttcctataatccctggtggaaatagtatcccactcacattttccaacaggaaggaatatgtggagagggccattgaatatcgacttcatgagatggacagacaggtggctgcagtccgagaagggatgtcctggattgttcctgtgccgctgctgtccctcctcacagcaaaacaactggagcagatggtgtgtgggatgcccgagatctctgtggaagtcttgaagaaagtggtgcggtaccgtgaggtggatgagcagcatcagctggtgcagtggttctggcacacgctggaagagttctccaatgaggagcgggtgcttttcatgaggtttgtgtcaggaagatctcgactaccagccaacactgctgacatttctcagagatttcaaatcatgaaggttgataggccttacgacagtctgcctacctcacagacctgcttcttccagctgaggctgcccccgtactccagccagctggtcatggccgagcgcctgcgctatgccatcaacaactgccgctcaatcgacatggacaactacatgctctcgagaaacgtggacaacgccgagggctccgacactgactactgaccgtgcgggtgctctcaccctcccttctctccctcaataatgctcacttctgatttgatgttgatatacttttatggtaactacatagatgttataagaacataaaccaacattataaacaatggccacatttagttactctaaatgtaacaaagaaattagatgtttttatttttctgtgattgtacaaaaacaacaaaaacgaagtgctctcagtcaggtttttccctccatatttttggtcacttttgataagtttgcatgaaaccattttggtgcatttttagttgggaatggtacatttttgtaaatccacccagtgaacatgaaattgtacattgtgtataattgttcattagaaaggacagttttacatgaatattcatatatttattttgttttaatttgaattgcctgttcagggttccttatgcagagaaataaagcagattcaggaattggaaaaaaaaaaaaaaaaaaaa

SEQ ID NO: 1186 - DNA, 2184 bp, Homo sapiens
ggatcctggaggtgggggctgtgccctgagggagggcacagggaaccgggatggggctgggggacagcgagtgctgggaagtgtgcgagatttcactccggggctcgggtcgagctaccccgtgcttcaggcggtcctgcgcctcctctccccaagacccttcggggacacagcactgcagacccgccggagacaacttgtgcgggagcccggagtcctcggaataacacttggtaagtgttaccgcgcccttcttcccttacgccagtccgtagttcgtggtccttcgccggtgtccccggagcccagcggctgtggatggcagaagcccagagtgggactggtcagctgcaggagcagaagaaaggtcttctgatagccgtcagcgtctccgttgataaaatcatctcgcatttcggggccgcccggaacttggtgcagaaggcccagttgggtgatagccggctgagcccggatgtggggcacctggtgctgaccaccctctgcccggccctccacgccctggtggcggacgggctgaagcctttccggaaggacctcatcaccgggcagcgcaggagcagcccctggagcgtggtggaggcgtcggtgaagccaggctccagcacccgctcccttggaaccctgtatagccaggtcagccgtctagccccgctgagcagcagccgtagccgcttccatgcctttatcctgggcctcctcaacaccaagcagttggagctgtggttttccagtctccaggaagatgcaggcctgctctccctcctgtacctgccaacaggatttttctccctggcccgcggtggttgtccctccctgtccacagagctgctgctcctgctgcagccattgtcggtgctcactttccacctggacctgctctttgagcaccaccaccacctgcccctgggcccacctcaggcccctgcccctccaggcccacctccagctctgcagcagactatgcaagccatgctgcactttgggggccggctggcccagagccttcgggggacttccaaggaagctgcttcagacccctctgactctccaaaccttcccacaccagggagctggtgggagcagttgacccaggcctcccgggtctatgcctctgggggcactgagggctttcctctttcccgatgggcaccggggcgtcatgggactgcagctgaagaaggtgcacaggagagacccctgcccacagatgagatggcaccaggcaggggcctctggttgggaagactatttggagtgcctgggggccccgcagaaaatgagaatggagccctaaagtccaggagaccatctagctggctgcccccgacagtgagtgtgttggctcttgtgaagcggggggcacctcccgagatgccttctcctcaggagcttgaggcctcagcacccaggatggtgcaaacccatagggcagtgcgggctctctgtgatcacactgctgcaagacctgaccagttgagcttccggcgtggggaagtgctgcgtgtcatcaccacagtggatgaggactggctccgctgtgggcgggatggcatggagggtctggtgcctgtggggtatacctcccttgttctgtagccctgggaccctttcctgcgtatgtgtctccttcctgtcacctgggaatggaatggccagtgaacaccatcccagaagcattttccctctgcaaaatgacgtttcttcccacgtctgtttctgctaatatttaaaataaactttccttcttccctcctatacccacctgtaaggtgaaatctgctcttcttccaaatatataaaaaaggaattgccctccaggtaatccctttcctttttcccgtctatataagggaatgtcttccttcctatctatctgcaaaatggaaatctagacctccttcttcatccataagtggactgtgccagtacaatacatgcctcagcccccaagcctagaaggacctctagtctccttcctgtgtggaatcttccccactccatccctcccaagttgcctgtattgataatgtactcactcatgctgtactaggtgctgaagcctggacacccttggtgggtgggcctgtggtgatggtttgcatccttcctcccttgtcccaataaagtatgggagttgaaaaaaaaaaaaaaaaaaaaaaa

SEQ ID NO: 1187 - DNA, 5518 bp, Homo sapiens
agggcgcgggagcgcggagcgagtttggttgcacttacaccggtacttaagcgcggaccggcgtgtccttggacttagagagtggggacgtccggcttcggagcgggagtgttcgttgtgccagcgactaaaaagagaattaaatatgggtgatgttgagaaaggcaagaagatttttattatgaagtgttcccagtgccacaccgttgaaaagggaggcaagcacaagactgggccaaatctccatggtctctttgggcggaagacaggtcaggcccctggatactcttacacagccgccaataagaacaaaggcatcatctggggagaggatacactgatggagtatttggagaatcccaagaagtacatccctggaacaaaaatgatctttgtcggcattaagaagaaggaagaaagggcagacttaatagcttatctcaaaaaagctactaatgagtaataattggccactgccttatttattacaaaacagaaatgtctcatgacttttttatgtgtaccatcctttaatagatctcatacaccagaattcagatcatgaatgactgacagaatattttgttgggcagtcctgatttaaaactaagactggcttgtggttaaatgaatatgttcagtttttgaattttaatagtaactccaattcagtaaatggtatcactgtttaccccttttaaagatatgattagacttcgttagtaatgttcaacttttcacaaagatggtgagtgccatcttaaaacttactggagattggttttatatttagatttatataactggttatgtgaatatatttaaatactggggaaattgcttcactgtcttagaaccaagcaagattcacctgtgttttgtgttcatgttcatttgcctcttaaaggcaagggttgaagataaataaggtagcaatgtctatagttttggccttaactatgccaatctaattataattccctgtatttaaaatggtttcttttacttattgaaaggcattttagtgtggtttatgtgtaatattaaagattattcaacacctctcacatcttacagatctataaggtcacatgcttttaaaatagtagcaagttaaacttcactcttgaattctttacaatctaagtcaaactaagttataatttaggattgtctttaaacagccattcagaaacaaaactgtagaactgtgtatttgattgggaatggtgcttttgccaacttaaaaggattaaagtaacggagatatacacaaattttaaaattatgtgtgatcacaagactaaagataattaaaaagaaaaccacagatcatgactttttgactgtgcttgatttcatgactgatgcacaaattttaatgattaaaaagtgcaggagccctaaatgtcagtgcagcagccctaaatgtcagtgcagcagtgttaaccagtcatggtgctagattgtttacttggttttctaggactgcctcaactagaataacacttcactaattgactcttagtttctttgctcagattgagaactgcagcatttatgccagacatggacagaggaatgcctgtggtcatagttttgtgatgtgtaacagtgtataattacatactgaattatttcatgcatagtctgtgccatacacatttagagtagtccttggagattttatggagatggtgagcacaaggtaagtcataaagaataatgagaaaataaatctatgctggtgcagctgagaactgtatctttgtgggacagtgagaagactgagaagatgtgaatccatggtctcaaaggtgatagggacgattagataggtgttttaaggcctgaaagcaatttataacatatgagtcttatttttatttatagaaatgtggaaagcttgctgtaattcatatttgaagtcctagtctgagttctggtggggaatttaaaaatgcatcctggaaatcctttaaagatttcagactttgaaaggccttgtagcagaggacttggtgactgtataaagttagtggtattcagggacagtgtagcaagtagcttacaaggggacaattctggactaatgagaaagacctgaagtgaaggctagagagttgattttttttttttttggcatcctggaaatgatacaggaaacatattaagatagatacagaaatgtgttcaaccttccatcttggctagttgtggcgtttagtttgttttttgagacatggtcacgctgtgtcgccaaggctggagtgcagtggtgcgatctcggctggctgcaacctctatttcccaggctcaagcgattctctcacttcagcttcccaagtagctgggactacaggtgttcgccaccatgcccagctaatttttttgtagagatggagttttgccatgtggtcccaggctggtctcaaactcctgagctcaagcaatccgtccacttgccttggctccccaaagtgctgggattacaggcgtgagccaccaggccctgcctggttttcaaattcagaaatcttattatttaacccagaagtaatcagcccagtagtaacttaggtttaattttttttcaggtttaaaatttttctcatttattttttctgagacggagtttcgcccttttcgcccaggctgagtacagtggtgcaatctcactgcaacctccgccttccagttgcaagtgattctcctgcctcagcctcctgagtagctgggattacaggcacccgccaccacgcctggctaatttttgtatttttagtggagatggtgtttcaccatgttggccagactggtcttggactcctgacctcgtgatccacccaccttggcctcccaaagttctaggattacaggtgtgagccaccacgtccggccaatttttctcatttctatgcctcctatattaaggtctgtgttggcacagatgagtaactgccatgttctaggtcagttatacccaagcacttctggtggtttaaaatgtgattctgtaacttttttatttttatttttttgagataatttcactcttgttgcccaggctggagtgcaatggcgtgatcgctgctcaccgcaacctccgccttccaggttcaagcgattctcctgactcagcctctcaagtagctgggattacaagcatgcgccaccatgcccagcttattttgtgtttttagtagagacagggtttctccatgctggacaggctggtcttgaactcccgacgtcgggtgatctgcctgcctcggcctcccaaagtgctgggattacaggcgtgagccaccacgcctggccaattatgtaattttttaaaaaggacatttctatcagggatatataccttcagaaataaggaaataggggaaaaaaagagcactataaaccacatgttttcatttctagtgcttcgctgtaagtggctaggttggtagaatcaaaaacaagggccagatgtatttaaggggtattcagatgccacctacatgcttattttgtctagaacagtgctgtctaatagaactttctgtgacgatggatattttgtagacttttgctgtccagtgtggtagccactaaccacatgtggctgttaagcccttgaaatatagctagtgtgactagaaagtattttattttaaatttacataggcacaagtggctagtggctactgtattgacattctgggtctaggactagaaccagtggtctgtaacaaaagtactttctctttactctattaaatctagaattagccgggcatggtcgctcatgcctgtaatcccagcactttgggaggccaaggcaggcagatcacttgaggtcaggcgtttgagaccagcctggtcaacatggcgaaaccctgtctctacaaaaaacataaaagttagccaggtgtggtggtgggcacctgtaatctcagctacttgggaggctgaggcacaagaatcacttgaacttgggaggtggaggttgcagtgagccaagattgtgccactgcactcaagcctgggtgacgagtgaaactgtctccaaaaaaaaaaaaaaatctagaattcttggaagtacattatattgcccttcagaatagattccagttcctgttgtgctcacctttataattttaccataagttttacctattcgtaagttggcagttttagatagataacattctggtggtagctagggatttaccttttgtcatccttttcctgcacttctcttgaattcctttatagatgtacagttttgctttaaccactgaagattgctgtaaattataaagggtgtgatagaatccacatggctgtcaagaaggagatcttaccaaggacagttgactgactagtctcagattgtttcatatcatttatacttgggtaagagtaaactagataactgggcgtcgtggtgcacacctgtagtcccagccactctgaggcaggaggactgcttgtgcccagaagttcgaggctgcagtgtagctgtgattgtgctactgcactccagcctgggcaacagataaaggaaactccatctcttttaaaaaaaaaaaaagtggtctgggtgcagtaggtcatgcctgcaatcccagcactttgggaggccaaggcaggcagatcacctgaggtcaggagcttgagaccagcctggccaacatggtgaaaccccatctctaccaaaaatataaaaactagctgggcgtggtggcggcacctgtaattgcagctatttgagaggctgaggcaggagaatcgcttgaacctgggagatgggggttgcagtgagccaagaccgccccatcgcactccagcctgggcaacaatagtgaaactccgtctcaaaaagaaaaaaagtttccttagaatggaaaatattcattcatgagctcttttggcaatccgtcatcagtatattctgaaaaccaataagatgttgccaagttgggggcgagagctatgtaatgcaaggcatatgcctgatgaagtatacaaatacacctgaccagaaactttgtctcccacataagtctcttctaggcactgtcggggtacatactgagctgctgctttggctgtattttctgtgcctcagaataaccattgtcctggtgttcatatccttagagttcagtacaaaatgttggatatccatttaataggttccaggttatcttagttggagtttggggtatttgaaaacgtcatgccttcaggctatcatttccctcagaaagctaagtaaatttactgcattcatttctcaaagagtaaaagtgcaggttgtatgtgtctatgaacatttaaacatgttaaaatgttaaatttaacattttaaatttaaacatttaaatatgtctgtaacttgaacagtgtagtttcagaaaggaccactgggctagtgtaatgcagaaaatgctgggtctaggattaggagaaaattgtgtttagtgtgtatcaataaacagcccgtggacccaaaaaaaaaaaa

SEQ ID NO: 1188 - DNA, 482 bp, Homo sapiens
gcgggcgccgctcttttgtttcttgctgcagcaacgcgagtgggagcaccaggatctcgggctcggaacgagactgcacggattgttttaagaaaatggcagacaaaccagacatgggggaaatcgccagcttcgataaggccaagctgaagaaaacggagacgcaggagaagaacaccctgccgaccaaagagaccattgagcaggagaagcggagtgaaatttcctaagatcctggaggatttcctacccccgtcctcttcgagaccccagtcgtgatgtggaggaagagccacctgcaagatggacacgagccacaagctgcactgtgaacctgggcactccgcgccgatgccaccggcctgtgggtctctgaagggacccccccccaatcggactgccaaattctccggtttgccccgggatattatagaaaattatttgtatgaataatgaaaataaaacacacctcgtggcatggc

SEQ ID NO: 1189 - DNA, 628 bp, Homo sapiens
cctgcgtggctgggctgctcgggttagatcgtcaggaaaagcctaaagattagactgtaagaaaagaaaatagaagccatgtttcgaagacctgtattacaggtacttcgtcagtttgtaagacatgagtccgaaacaactaccagtttggttcttgaaagatccctgaatcgtgtgcacttacttgggcgagtgggtcaggaccctgtcttgagacaggtggaaggaaaaaatccagtcacaatattttctctagcaactaatgagatgtggcgatcaggggatagtgaagtttaccaactgggtgatgtcagtcaaaagacaacatggcacagaatatcagtattccggccaggcctcagagacgtggcatatcaatatgtgaaaaaggggtctcgaatttatttggaagggaaaatagactatggtgaatacatggataaaaataatgtgaggcgacaagcaacaacaatcatagctgataatattatatttctgagtgaccagacgaaagagaaggagtagaaaggatgattcttctttggccatcatttggtacagtctcatttccaagtcatgtataatctttatggcttccaaggacaagaattaaaatactcttttacgt

SEQ ID NO: 1190 - DNA, 5273 bp, Homo sapiens
ccgcggcggcggagaagcagctcgccagccagcagcccgccagccgccgggaggttcgatacaagaggctgttttcctagcgtggcttgctgcctttggtaagaacatgtcgtccatcttgccattcacgccgccagttgtgaagagactgctgggatggaagaagtcagctggtgggtctggaggagcaggcggaggagagcagaatgggcaggaagaaaagtggtgtgagaaagcagtgaaaagtctggtgaagaagctaaagaaaacaggacgattagatgagcttgagaaagccatcaccactcaaaactgtaatactaaatgtgttaccataccaagcacttgctctgaaatttggggactgagtacaccaaatacgatagatcagtgggatacaacaggcctttacagcttctctgaacaaaccaggtctcttgatggtcgtctccaggtatcccatcgaaaaggattgccacatgttatatattgccgattatggcgctggcctgatcttcacagtcatcatgaactcaaggcaattgaaaactgcgaatatgcttttaatcttaaaaaggatgaagtatgtgtaaacccttaccactatcagagagttgagacaccagttttgcctccagtattagtgccccgacacaccgagatcctaacagaacttccgcctctggatgactatactcactccattccagaaaacactaacttcccagcaggaattgagccacagagtaattatattccagaaacgccacctcctggatatatcagtgaagatggagaaacaagtgaccaacagttgaatcaaagtatggacacaggctctccagcagaactatctcctactactctttcccctgttaatcatagcttggatttacagccagttacttactcagaacctgcattttggtgttcgatagcatattatgaattaaatcagagggttggagaaaccttccatgcatcacagccctcactcactgtagatggctttacagacccatcaaattcagagaggttctgcttaggtttactctccaatgttaaccgaaatgccacggtagaaatgacaagaaggcatataggaagaggagtgcgcttatactacataggtggggaagtttttgctgagtgcctaagtgatagtgcaatctttgtgcagagccccaattgtaatcagagatatggctggcaccctgcaacagtgtgtaaaattccaccaggctgtaatctgaagatcttcaacaaccaggaatttgctgctcttctggctcagtctgttaatcagggttttgaagccgtctatcagctaactagaatgtgcaccataagaatgagttttgtgaaagggtggggagcagaataccgaaggcagacggtaacaagtactccttgctggattgaacttcatctgaatggacctctacagtggttggacaaagtattaactcagatgggatccccttcagtgcgttgctcaagcatgtcataaagcttcaccaatcaagtcccatgaaaagacttaatgtaacaactcttctgtcatagcattgtgtgtggtccctatggactgtttactatccaaaagttcaagagagaaaacagcacttgaggtctcatcaattaaagcaccttgtggaatctgtttcctatatttgaatattagatgggaaaattagtgtctagaaatactctcccattaaagaggaagagaagattttaaagacttaatgatgtcttattgggcataaaactgagtgtcccaaaggtttattaataacagtagtagttatgtgtacaggtaatgtatcatgatccagtatcacagtattgtgctgtttatatacatttttagtttgcatagatgaggtgtgtgtgtgcgctgcttcttgatctaggcaaacctttataaagttgcagtacctaatctgttattcccacttctctgttatttttgtgtgtcttttttaatatataatatatatcaagattttcaaattatttagaagcagattttcctgtagaaaaactaatttttctgccttttaccaaaaataaactcttgggggaagaaaagtggattaacttttgaaatccttgaccttaatgtgttcagtggggcttaaacagtcattctttttgtggttttttgtttttttttgtttttttttttaactgctaaatcttattataaggaaaccataccgaaaacctttccaagcctcttttttccattcccatttttgtcctcataatcaaaacagcataacatgacatcatcaccagtaatagttgcattgatactgctggcaccagttaattctgggatacagtaagaattcatatggagaaagtccctttgtcttatgcccaaatttcaacaggaataattggcttgtataatctagcagtctgttgatttatccttccacctcataaaaaatgcataggtggcagtataattattttcagggatatgctagaattacttccacatatttatccctttttaaaaaagctaatctataaataccgtttttccaaaggtattttacaatatttcaacagcagaccttctgctcttcgagtagtttgatttggtttagtaaccagattgcattatgaaatgggccttttgtaaatgtaattgtttctgcaaaatacctagaaaagtgatgctgaggtaggatcagcagatatgggccatctgtttttaaagtatgttgtattcagtttataaattgattgttattctacacataattatgaattcagaattttaaaaattgggggaaaagccatttatttagcaagttttttagcttataagttacctgcagtctgagctgttcttaactgatcctggttttgtgattgacaatatttcatgctctgtagtgagaggagatttccgaaactctgttgctagttcattctgcagcaaataattattatgtctgatgttgactcattgcagtttaaacatttcttcttgtttgcatcttagtagaaatggaaaataaccactcctggtcgtcttttcataaattttcatatttttgaagctgtctttggtacttgttctttgaaatcatatccacctgtctctataggtatcattttcaatactttcaacatttggtggttttctattgggtactccccattttcctatatttgtgtgtatatgtatgtgttcatgtaaatttggtatagtaattttttattcattcaacaaatatttattgttcacctgtttgtaccaggaacttttcttagtctttgggtaaaggtgaacaagacaactacagttcctgcctttgctgagacagcagttacactaacccttaattatcttacttgtctatgaaggagataaacagggtactgtactggagaataacagatgggatgcttcaggtaggacatcaaggaaagcctctaaggaaaggatgcatgagctaacacctgacattaaagaagcaagccaagtgaggagccaggggagataagcattcctggcaaagagaatagcatcaaatgcaaaaaggttcacactaaaggaaactcctgattaggtattaatgctttatacagaaacctctatacaaatccaaacttgaagatcagaatggttctacagttcataacattttgaaggtggccttattttgtgatagtctgcttcatgtgattctcactaacatatctccttcctcaacctttgctgtaaaaatttcatttgcaccacatcagtactacttaatttaacaagcttttgttgtgtaagctctcactgttttagtgccctgctgcttgcttccagactttgtgctgtccagtaattatgtcttccactacccatcttgtgagcagagtaaatgtcctaggtaataccactatcaggcctgtaggagatactcagtggagcctctgcccttctttttcttacttgagaacttgtaatggtgttagggaacagttgtaggggcagaaaacaactctgaaagtggtagaaggtcctgatcttggtggttactcttgcattactgtgttaggtcaagcagtgcctactatgctgtttcagtagtggagcgcatctctacagttctgatgcgatttttctgtacagtatgaaattgggactcaactctttgaaaacacctattgagcagttatacctgttgagcagtttacttcctggttgtaattacatttgtgtgaatgtgtttgatgctttttaacgagatgatgttttttgtattttatctactgtggcctgattttttttttgttttctgcccctccccccatttataggtgtggttttcatttttctaagtgatagaatcccctctttgttgaatttttgtctttatttaaattagcaacattacttaggatttattcttcacaatactgttaattttctaggaatgatgacctgagaaccgaatggccatgctttctatcacatttctaagatgagtaatattttttccagtaggttccacagagacaccttgggggctggcttaggggaggctgttggagttctcactgacttagtggcatatttattctgtactgaagaactgcatggggtttcttttggaaagagtttcattgctttaaaaagaagctcagaaagtctttataaccactggtcaacgattagaaaaatataactggatttaggcctaccttctggaataccgctgattgtgctctttttatcctactttaaagaagctttcatgattagatttgagctatatcagttataccgattataccttataatacacattcagttagtaaacatttattgatgcctgttgtttgcccagccactgtgatggatattgaataataaaaagatgactaggacggggccctgacccttgagctgtgcttggtcttgtagaggttgtgttttttttcctcaggacctgtcactttggcagaaggaaatctgcctaatttttcttgaaagctaaattttctttgtaagtttttacaaattgtttaatacctagttgtattttttaccttaagccacattgagttttgcttgatttgtctgtcttttaaacactgtcaaatgctttcccttttgttaaaattattttaatttcactttttttgtgcccttgtcaatttaagactaagactttgaaggtaaaacaaacaaacaaacatcagtcttagtctcttgctagttgaaatcaaataaaagaaaatatatacccaaa

SEQ ID NO: 1191 - DNA, 5415 bp, Homo sapiens
gcgcccgggccgccggccgggcccgggcctgggggcggggcgggaagacggcggccgggagtgttttcagttccgcctccaatcgcccattcccctcttcccctcccagccccctccatcccatcggaagaggaaggaacaaaaggtcccggaccccccggatctgacggggcgggacctggcgccaccttgcaggttcgatacaagaggctgttttcctagcgtggcttgctgcctttggtaagaacatgtcgtccatcttgccattcacgccgccagttgtgaagagactgctgggatggaagaagtcagctggtgggtctggaggagcaggcggaggagagcagaatgggcaggaagaaaagtggtgtgagaaagcagtgaaaagtctggtgaagaagctaaagaaaacaggacgattagatgagcttgagaaagccatcaccactcaaaactgtaatactaaatgtgttaccataccaagcacttgctctgaaatttggggactgagtacaccaaatacgatagatcagtgggatacaacaggcctttacagcttctctgaacaaaccaggtctcttgatggtcgtctccaggtatcccatcgaaaaggattgccacatgttatatattgccgattatggcgctggcctgatcttcacagtcatcatgaactcaaggcaattgaaaactgcgaatatgcttttaatcttaaaaaggatgaagtatgtgtaaacccttaccactatcagagagttgagacaccagttttgcctccagtattagtgccccgacacaccgagatcctaacagaacttccgcctctggatgactatactcactccattccagaaaacactaacttcccagcaggaattgagccacagagtaattatattccagaaacgccacctcctggatatatcagtgaagatggagaaacaagtgaccaacagttgaatcaaagtatggacacaggctctccagcagaactatctcctactactctttcccctgttaatcatagcttggatttacagccagttacttactcagaacctgcattttggtgttcgatagcatattatgaattaaatcagagggttggagaaaccttccatgcatcacagccctcactcactgtagatggctttacagacccatcaaattcagagaggttctgcttaggtttactctccaatgttaaccgaaatgccacggtagaaatgacaagaaggcatataggaagaggagtgcgcttatactacataggtggggaagtttttgctgagtgcctaagtgatagtgcaatctttgtgcagagccccaattgtaatcagagatatggctggcaccctgcaacagtgtgtaaaattccaccaggctgtaatctgaagatcttcaacaaccaggaatttgctgctcttctggctcagtctgttaatcagggttttgaagccgtctatcagctaactagaatgtgcaccataagaatgagttttgtgaaagggtggggagcagaataccgaaggcagacggtaacaagtactccttgctggattgaacttcatctgaatggacctctacagtggttggacaaagtattaactcagatgggatccccttcagtgcgttgctcaagcatgtcataaagcttcaccaatcaagtcccatgaaaagacttaatgtaacaactcttctgtcatagcattgtgtgtggtccctatggactgtttactatccaaaagttcaagagagaaaacagcacttgaggtctcatcaattaaagcaccttgtggaatctgtttcctatatttgaatattagatgggaaaattagtgtctagaaatactctcccattaaagaggaagagaagattttaaagacttaatgatgtcttattgggcataaaactgagtgtcccaaaggtttattaataacagtagtagttatgtgtacaggtaatgtatcatgatccagtatcacagtattgtgctgtttatatacatttttagtttgcatagatgaggtgtgtgtgtgcgctgcttcttgatctaggcaaacctttataaagttgcagtacctaatctgttattcccacttctctgttatttttgtgtgtcttttttaatatataatatatatcaagattttcaaattatttagaagcagattttcctgtagaaaaactaatttttctgccttttaccaaaaataaactcttgggggaagaaaagtggattaacttttgaaatccttgaccttaatgtgttcagtggggcttaaacagtcattctttttgtggttttttgtttttttttgtttttttttttaactgctaaatcttattataaggaaaccataccgaaaacctttccaagcctcttttttccattcccatttttgtcctcataatcaaaacagcataacatgacatcatcaccagtaatagttgcattgatactgctggcaccagttaattctgggatacagtaagaattcatatggagaaagtccctttgtcttatgcccaaatttcaacaggaataattggcttgtataatctagcagtctgttgatttatccttccacctcataaaaaatgcataggtggcagtataattattttcagggatatgctagaattacttccacatatttatccctttttaaaaaagctaatctataaataccgtttttccaaaggtattttacaatatttcaacagcagaccttctgctcttcgagtagtttgatttggtttagtaaccagattgcattatgaaatgggccttttgtaaatgtaattgtttctgcaaaatacctagaaaagtgatgctgaggtaggatcagcagatatgggccatctgtttttaaagtatgttgtattcagtttataaattgattgttattctacacataattatgaattcagaattttaaaaattgggggaaaagccatttatttagcaagttttttagcttataagttacctgcagtctgagctgttcttaactgatcctggttttgtgattgacaatatttcatgctctgtagtgagaggagatttccgaaactctgttgctagttcattctgcagcaaataattattatgtctgatgttgactcattgcagtttaaacatttcttcttgtttgcatcttagtagaaatggaaaataaccactcctggtcgtcttttcataaattttcatatttttgaagctgtctttggtacttgttctttgaaatcatatccacctgtctctataggtatcattttcaatactttcaacatttggtggttttctattgggtactccccattttcctatatttgtgtgtatatgtatgtgttcatgtaaatttggtatagtaattttttattcattcaacaaatatttattgttcacctgtttgtaccaggaacttttcttagtctttgggtaaaggtgaacaagacaactacagttcctgcctttgctgagacagcagttacactaacccttaattatcttacttgtctatgaaggagataaacagggtactgtactggagaataacagatgggatgcttcaggtaggacatcaaggaaagcctctaaggaaaggatgcatgagctaacacctgacattaaagaagcaagccaagtgaggagccaggggagataagcattcctggcaaagagaatagcatcaaatgcaaaaaggttcacactaaaggaaactcctgattaggtattaatgctttatacagaaacctctatacaaatccaaacttgaagatcagaatggttctacagttcataacattttgaaggtggccttattttgtgatagtctgcttcatgtgattctcactaacatatctccttcctcaacctttgctgtaaaaatttcatttgcaccacatcagtactacttaatttaacaagcttttgttgtgtaagctctcactgttttagtgccctgctgcttgcttccagactttgtgctgtccagtaattatgtcttccactacccatcttgtgagcagagtaaatgtcctaggtaataccactatcaggcctgtaggagatactcagtggagcctctgcccttctttttcttacttgagaacttgtaatggtgttagggaacagttgtaggggcagaaaacaactctgaaagtggtagaaggtcctgatcttggtggttactcttgcattactgtgttaggtcaagcagtgcctactatgctgtttcagtagtggagcgcatctctacagttctgatgcgatttttctgtacagtatgaaattgggactcaactctttgaaaacacctattgagcagttatacctgttgagcagtttacttcctggttgtaattacatttgtgtgaatgtgtttgatgctttttaacgagatgatgttttttgtattttatctactgtggcctgattttttttttgttttctgcccctccccccatttataggtgtggttttcatttttctaagtgatagaatcccctctttgttgaatttttgtctttatttaaattagcaacattacttaggatttattcttcacaatactgttaattttctaggaatgatgacctgagaaccgaatggccatgctttctatcacatttctaagatgagtaatattttttccagtaggttccacagagacaccttgggggctggcttaggggaggctgttggagttctcactgacttagtggcatatttattctgtactgaagaactgcatggggtttcttttggaaagagtttcattgctttaaaaagaagctcagaaagtctttataaccactggtcaacgattagaaaaatataactggatttaggcctaccttctggaataccgctgattgtgctctttttatcctactttaaagaagctttcatgattagatttgagctatatcagttataccgattataccttataatacacattcagttagtaaacatttattgatgcctgttgtttgcccagccactgtgatggatattgaataataaaaagatgactaggacggggccctgacccttgagctgtgcttggtcttgtagaggttgtgttttttttcctcaggacctgtcactttggcagaaggaaatctgcctaatttttcttgaaagctaaattttctttgtaagtttttacaaattgtttaatacctagttgtattttttaccttaagccacattgagttttgcttgatttgtctgtcttttaaacactgtcaaatgctttcccttttgttaaaattattttaatttcactttttttgtgcccttgtcaatttaagactaagactttgaaggtaaaacaaacaaacaaacatcagtcttagtctcttgctagttgaaatcaaataaaagaaaatatatacccaaa

SEQ ID NO: 1192 - DNA, 4214 bp, Homo sapiens
ggcagcggcgcttcctgctaggaccggccggggccgtaccggaggctcgggctccaccgaccctcctcccaccccctcccactcaccctctgggccgcgactgcgcagggcggggccggccgaaccatgggccgcggtgtgggctaagctggtggccccggctttagactggaccccacaatgtttgcagagatgttcaggcacgcgggagctgattacacacaatgaatgggggcaatgagagcagtggagcagacagagctgggggccctgtggccacatctgtccccatcggctggcagcgctgtgtgcgagagggtgctgtgctctacatcagtccaagtggcacagagctgtcttccttggagcaaacccggagctacctcctcagcgatgggacctgcaagtgcggtctggagtgtccacttaatgtccccaaggttttcaactttgaccctttggccccggtgaccccgggtggggctggggtggggccagcatcagaggaggacatgaccaagctgtgcaaccaccggcggaaagctgttgctatggcaactctgtaccgcagcatggagaccacctgctcacactcttctcctggagagggagcgagcccccaaatgttccacactgtgtccccagggcccccctctgcccgccctccctgtcgagttcctcctacaactccacttaatgggggtcctggctcccttcccccagaaccaccctcagtttcccaggcctttcccactctagcaggccctggggggcttttccccccaaggcttgctgacccagtcccttctgggggcagtagcagcccccgtttcctcccaaggggcaatgccccctctccagccccacctcctccacctgctatcagcctcaatgctccctcatacaactggggagctgccctcagatccagcctggtgccctctgacctgggctctcctccggcccctcatgcctcctcctcaccaccttcagaccctcctctcttccactgtagtgatgccttaacaccccctcccctgcccccgagcaataatctccccgcccaccctggtcctgcctctcagccaccagtgtcttcagccactatgcacctgcccctggtcctggggcccctgggaggggcccccacggtggaggggcctggggcaccccccttccttgctagcagcctactctctgcagcggccaaggcacagcatcccccactaccccctcccagcactttacagggccgaaggccccgtgcccaggcaccctcagcttcccactcctcatcacttcgtccctctcagcgtcgtccccgcagaccccctactgtatttcgattgctagaagggagaggccctcaaacccctagacggagccgtcctcgggcccctgctcctgtcccccaacccttttctctcccggagccatcccaaccaattctcccttctgtgctgtccctgctgggactccccacccctggcccttcccactctgatggaagctttaaccttttggggtcagatgcacaccttcctcctcccccaaccctctcctcagggagccctccccagcccaggcaccccatccagccctccctgcctgggaccaccagtggcagcctcagcagtgtgccaggtgcccctgccccaccagctgcctccaaagccccagtagtccccagccctgtgcttcaaagcccatccgaaggactggggatgggggcaggcccggcctgccctctgcctcccctggctggtggagaggctttccctttccccagccctgagcagggcctggcactgagtggagctggcttccctgggatgcttggggccttgcctctccctctgagtctggggcagcctccaccttctccattgctcaaccacagtttatttggtgtgctgactgggggaggaggacaacctccccctgagcccctgctacccccaccaggaggacctggtcctcccctagccccaggagagcctgaagggccttcgcttttggtggcttccttgcttcctccaccaccctcagaccttcttccacctccttcagcacctcccagcaacctccttgcctctttcctgcccctgttggctctgggccccacagctggggatggggagggatctgcagagggagccgggggtccaagtggggagccattttcaggcttgggagacctgtcccccctacttttccccccactttcagccccccctaccctcatagctttaaattctgcgctgctggctgccaccctggatcccccctcggggacacccccccagccctgtgtcctgagtgccccccaacctggaccacctacctccagtgtcaccacggcaactactgacccgggggcctcctctctgggcaaggccccctccaactcagggagacccccccaactccttagccctctgctgggtgccagcctgctgggtgacctgtcttcactgaccagcagccctggagccctccccagcctgttgcagcctcctggccctcttctctctggccagttggggctgcagctcctccctggggggggagctcctccacccctctcagaggcttctagtcccctagcctgcctgctacagagtctccagatccctccagagcagccagaagccccctgtctaccccccgagagccctgcctcagccctcgaaccagagcctgccaggcctcccctcagtgccttagccccaccccatggttctcccgaccccccagtccctgagctgctcactgggagggggtcagggaaacggggccggaggggaggagggggacttaggggcattaatggtgaggccaggccagcccggggccgaaagcctggcagccggcgggagcctggccgactggccctcaaatgggggacacgtggtggcttcaatggacaaatggaaaggtccccaagaagaacccaccattggcagcataatggggagctggctgaagggggtgctgagcccaaggatccaccccctcccgggccccattctgaggaccttaaggtgcccccgggagtagtcagaaagtctcgtcgtggccgtaggagaaaatacaaccctacccggaacagcaatagctcccgccaggacattaccttggaacccagccctacagcccgagcagctgtccctctgcctccccgggcccgccctggccgtcctgccaaaaacaagaggaggaaactggccccatagcagccatacctggagctggatctgaccctgattggggagagctgagtgctgagccttgggagcccctgccagccacctgcacctgtggacagtgggtgggggcactactccccactcagagcacaaatgcaactccttcccctacaatcccatcctgagccattgcagggggcagggaagttcacccccccccaccacccccccgcccccccgaagccatgtcactgaaaaggcctgggggggatggtatatggccctttccccaccaggcgctaaggggaacacccccttccccaggtcttttatttgtttaagttatttttgcacaaatgactcttttatatttaattcgatttcattgcctcccttcttaaagccaacaggctcagtttacaaacctgtgagctactgttggctgctgccctccttcccagtgaaaggtacaaagcaataagcatcatgcatcctccccttacccctccaacacccctctgcctctggctcaggttgctcaaagcacagatcctctcttaccccgtccccaggtttgaaacacatagcctcatttcaaggtgtagccaggttcccccgactttcctctgggatataaaaaagggggtaagggggcaaagagagccctctgggcctctcctcccatacacactacactgccccttctccccccatcaaaacgctcagagacgttgtgatgatgcgactgaggattatgcaacgtggtccaaccggagcggccagcatgaccagctgtccaggggctgcctcctgccttttcttttgtaaagacaagacccttgggagttttaattctgttttgtacttgccctgtggggcctccactgcttttctatgggagacactcttaatttaacagatgagaatattttgaaactctgaaaaaaaaaaaaaaaaaaaaaaaaaaaaaaaaaaaaaaaaaaaaaaaaaaaaaaaaaaaaaaaa

SEQ ID NO: 1193 - DNA, 3462 bp, Homo sapiens
gtgttttcagtctctccgggttgcatgtactgtatgtggagcagtgtacagtgaagcggaggcagagcggctccgcgagcttctctccactttcccatagagaaaccctgactggccgctgagggctagctacacacacgccctcacgcccggcgagcccgcgaggtcactatcatatgacaaaggctttgccgcagttcatcttcctccctgtgtactttccatttgccttcctggaatcctgctgcatcacagaagctggaagttctgatgttccactgaaatcacaatggaaagtcttgacttgactggtcacagtaatgaaaggcagtaatagaaataaggatcattcagcagaaggagaaggggttggaaaacgaccaaaacgaaagtgtcttcagtggcatccattgctagcaaagaaacttcttgatttttcagaagaggaagaagaggaagacgaagaggaggatattgataaggttcaacttcttggggccgatggcctagagcaagatgttggtgaaactgaagatgatgaatcaccagagcagcgagcccggagaccaatgaatgcatttcttttattttgcaaacgccatcgctctcttgtacgtcaggaacaccccaggcttgataaccgaggtgctaccaagatactagctgattggtgggctgttcttgatccaaaggaaaagcagaaatacacagacatggccaaggagtataaggatgcatttatgaaagcaaatcctggctacaaatggtgtcctaccacaaacaagcctgtgaaatccccaacacccactgtcaatccacgaaagaaactttgggccttcccatctgactcttcaagagacttgccaagccccaagaaagcaaagactgaagaaatgcctcagcttaactttggaatggctgatcctactcaaatgggaggcctgagtatgctgctgttagctggagaacatgctcttggcacaccagaggtatcctctggcacatgcaggcctgatgtttcagaatctcctgaattacgtcagaagtcaccattgtttcagtttgccgagatatcttcaagtacgtcccactctgatgcttctacaaagcagtgtcaaacatctgccttgtttcagtttgcagagatttcttcaaacacttcgcagttgggtggtgctgagcctgtaaaacgctgtggaaagtctgcactctttcaactggcagagatgtgcctggcatcagaagggatgaaaatggaagaatcaaagctaataaaagcaaaagaatccgatggtggaagaattaaagaattagagaagggaaaggaagaaaaagaaattaaaatggagaaaacagatgaaactaggttacagaaggaagcagaatttgaaaaatcggctaaggaaaatttaagagattctaaggaattgagaaattttgaggcattgcaaatagatgacataatggctataaaaatggaagatcccaaagaaattagaaaggaagagttagaagaagatcacaaatgtagtcattttcctgatttttcttattctgccagtagcaagataataattagtgatgttcccagtagaaaggatcatatgtgccatcctcatggaattatgatcattgaggatcccgcagcattaaacaagccagaaaagctaaaaaagaaaaagaagaaaagcaaaatggatcgacatggaaatgataaatccacacccaagaagacttgcaaaaagaggcagtcttcggaatctgacattgagagcgtcatatataccattgaagccgtcgcaaaaggagactggggcatagagaaacttggagatacccctcgcaagaaggtccgcacatcctcaagtggcaagggaagcattttggatgccaagccaccaaagaaaaaagtgaaatcaagagagaagaaaatgtcaaaggagaaatcctcagacaccaccaaagagtcaagacctccagatttcattagtatttctgctagcaagaacatttctggtgagacaccagagggtataaaagcagaaccattgacccctatggaagatgcactaccacccagcctatcaggacaggccaagcctgaggacagtgactgtcacagaaaaatagaaacttgtggttccaggaaatccgagaggtcttgcaaaggtgctctttataaaaccctggtgtctgagggcatgctcacctctctgcgagctaatgttgacagaggaaaacgaagctcaggaaaaggaaactcctctgatcatgaagggtgttggaatgaagaaagctggacatttagtcagagtgggaccagtgggagcaagaagttcaagaagacaaagccaaaagaagactgtctccttggctccgcaaagctggatgaagaatttgaaaaaaaattcaacagcctccctcaatatagtcctgttacatttgaccggaaatgtgtacctgtcccaagaaaaaagaagaagactggaaatgtgtcctcagaaccgactaaaaccagcaaaggaagtggggataaatggtcaaacaagcaactcttcttggatgccattcaccctacagaagccatattttcagaagacagaaacaccatggagcctgttcataaggttaaaaatatcccatccattttcaacactccagagccaacaacaacgcaagaacctttggtgggcagccaaaagagaaaagcaaggaaaaccaagattacacaccttgtcaggacagcagatggccgggtatcaccagcaggaggtactttggatgacaaaccaaaggaacaactgcagaggagtctccctaaagcaactgagacagactgcaatgacaaatgctcacacaacaccgaggtcggggagacgcggagcagtactccagaaatgcctgccgtgtctgcgttctttagcctcgctgcgctggctgaagtggcagccatggaaaatgtgcacagaggtcagaggtcaactccgctcacccatgatggacagccaaaagaaatgccgcaggctcctgtacttatttcctgcgctgaccagtgaagcgccctttcattgtaaaacattgtgctttacctactaccctagccttgtctttaccgagggatgctagtgagtccaagtggtggaaaatatagactgcaaacaagtgcttgttgccccacacggcccagattcacttgaagcagaagttagcatcctgggccagtttgttctctcagaacccagaatctttgagggtaaggttatctgtctgatactgagcagaaacagaatgatcctggagctttgctttctattgaaggcttttgacggtaataggtggtaacttggtaaaaggctgcctttactgtagctcacccagcatctcttttaccaaccagagagtgtgaaactagtttcatatattacctagttattctttcaaaacaaaacaaaaaaaacaaaa

SEQ ID NO: 1194 - DNA, 2649 bp, Homo sapiens
aggaggacctgggggtgtggcagcgaggaagggccgagccacggactgtggggccgaaactcgctcccgcccaccctttctcgaggctgtggcctccgcgagagccgagcgggccgcaccgccggccgtgcgactgccccagtcagacacgaccccggcttctagcccgcctaagcctgtttggggttgctgactcgtttcctccccgagtttcccgcgggaactaactcttcaagaggaccaaccgcagcccagagcttcgcagacccggccaaccagaggcgaggttgagagcccggcgggccgcggggagagagcgtcccatctgtcctggaaagcctgggcgggtggattgggaccccgagagaagcaggggagctcggcggggtgcagaagtgcccaggcccctccccgctggggttgggagcttgggcaggccagcttcacccttcctaagtccgcttctggtctccgggcccagcctcggccaccatgtcccgccagaccacctctgtgggctccagctgcctggacctgtggagggaaaagaatgaccggctcgttcgacaggccaaggtggctcagaactccggtctgactctgaggcgacagcagttggctcaggatgcactggaagggctcagagggctcctccatagtctgcaagggctccctgcagctgttcctgttcttcccttggagctgactgtcacctgcaacttcattatcctgagggcaagcttggcccagggtttcacagaggatcaggcccaggatatccagcggagcctagagagagtgctggagacacaggagcagcaggggcccaggttggaacaggggctcagggagctgtgggactctgtccttcgtgcttcctgccttctgccggagctgctgtctgccctgcaccgcctggttggcctgcaggctgccctctggttgagtgctgaccgtcttggggacctggccttgttactagagaccctgaatggcagccagagtggagcctctaaggatctgctgttacttctgaaaacttggagtcccccagctgaggaattagatgctccattgaccctgcaggatgcccagggattgaaggatgtcctcctgacagcatttgcctaccgccaaggtctccaggagctgatcacagggaacccagacaaggcactaagcagccttcatgaagcggcctcaggcctgtgtccacggcctgtgttggtccaggtgtacacagcactggggtcctgtcaccgtaagatgggaaatccacagagagcactgttgtacttggttgcagccctgaaagagggatcagcctggggtcctccacttctggaggcctctaggctctatcagcaactgggggacacaacagcagagctggagagtctggagctgctagttgaggccttgaatgtcccatgcagttccaaagccccgcagtttctcattgaggtagaattactactgccaccacctgacctagcctcaccccttcattgtggcactcagagccagaccaagcacatactagcaagcaggtgcctacagacggggagggcaggagacgctgcagagcattacttggacctgctggccctgttgctggatagctcggagccaaggttctccccacccccctcccctccagggccctgtatgcctgaggtgtttttggaggcagcggtagcactgatccaggcaggcagagcccaagatgccttgactctatgtgaggagttgctcagccgcacatcatctctgctacccaagatgtcccggctgtgggaagatgccagaaaaggaaccaaggaactgccatactgcccactctgggtctctgccacccacctgcttcagggccaggcctgggttcaactgggtgcccaaaaagtggcaattagtgaatttagcaggtgcctcgagctgctcttccgggccacacctgaggaaaaagaacaaggggcagctttcaactgtgagcagggatgtaagtcagatgcggcactgcagcagcttcgggcagccgccctaattagtcgtggactggaatgggtagccagcggccaggataccaaagccttacaggacttcctcctcagtgtgcagatgtgcccaggtaatcgagacacttactttcacctgcttcagactctgaagaggctagatcggagggatgaggccactgcactctggtggaggctggaggcccaaactaaggggtcacatgaagatgctctgtggtctctccccctgtacctagaaagctatttgagctggatccgtccctctgatcgtgacgccttccttgaagaatttcggacatctctgccaaagtcttgtgacctgtagctgccacgttttgaagagcttgagctgggtccccagtgggctgtctctctgtggggagggctttctgcttcaccatcattaggaatgtgaccattcctatataattcctggactggtgagattggtggtaggcctgtgaaatttgccctagttactaccattctcgttttggaggaaacaatctctgccaccaccaagtcattgactttgctcgaggcaccttttttcctgtttctccttttctgttgtcgagtaaaatttcatatttataaaaaaaaaaaaaaaaaa

SEQ ID NO: 1195 - DNA, 2371 bp, Homo sapiens
acttccgggagcctggggcccaggactgcagcggcttcggaaggtgggctctgccagcgggaccatgctgctccgagccgcttggaggcgggcggcagtggcggtgacagcggctccagggccgaagcccgcggcgcccactcgggggctgcgcctgcgcgttggagaccgtgctcctcagtctgcggttcccgcagatacagccgctgccccggaggtggggccagtgctgcgacctctctatatggatgtgcaagctacaactcctctggacccccgggtgcttgatgccatgctcccttacctaatcaactactatgggaacccacactcccggacacatgcttatggctgggagagtgaggcagccatggaacgtgctcgtcagcaagtagcatctctgattggagctgatcctcgtgagatcatttttactagtggtgctactgaatccaacaacatagcaattaagggggtggcccgattctacaggtcacggaaaaagcacttgatcaccacccagacagaacacaaatgtgtcttggactcctgccgttcactggaagctgagggctttcaggtcacctacctcccagtgcagaagagtgggatcattgacctaaaggaactagaggctgctatccagccagatactagcctggtgtcagtcatgactgtgaacaatgagattggagtgaagcagcctattgcagaaatagggcggatttgcagttccagaaaggtatatttccatactgatgcagcccaggctgttggaaaaatcccacttgatgtcaatgacatgaaaattgatctcatgagcattagtggtcacaaaatctacggtcccaaaggggttggtgccatctacatccgtcgccggccccgtgtgcgtgtggaggccctgcagagtggaggggggcaggagcggggtatgcggtctgggacagtgcccacacccttagtggtggggctgggggctgcgtgtgaggtggcacagcaagagatggagtatgaccacaagcgaatctcaaagttgtcagagcggctgatacagaatataatgaagagccttccagatgtggtgatgaatggggaccctaagcaccattatcccggctgtatcaacctctcctttgcatatgtggaaggggaaagtctgctgatggcactgaaggacgttgccttatcctcagggagtgcctgcacctctgcatccctggagccctcttatgtgcttagagcaattggcactgatgaggatttagcgcactcttctatcaggtttggaattggccgcttcactacagaggaggaagtggactacacagtggagaaatgcattcagcatgtgaagcgtcttcgagaaatgagccctctctgggagatggttcaggatggcattgacctcaagagcatcaagtggacccaacactagaagaatagggccctgactttgtgctggtctggcccctcctgcctcaccaacccgtgcacaaccagacaccttgttacacctagtggatgctctagattggtatagaccagttgacttcagcatcagtccacctctatgacagaaacacaagaaaactgtctttccctagcttcagttccttgggtgtggagcactccccatttcttctcgggtcttaaagtgtgtggacattttcatcccgaagccatagagacatttgctgtcatattgctgctgggcacatctgtgctcttggtgaggagagcaagaggaaccagaagaagtctctttggtcagggaccatgatgctctacatggacatttgagtcttcgtcttctgctgctgctcggctggaccagcttctttaacagcaagcataatccacttcaatgtaatattttctgtagctccaaaggctatctcttcatattgactgcagacagactgaatggacagtttcttagagggcttgtctcctttctacccttgtcctctttcctttcctttgacctaatggagctagaaatatgtctgtgactccaccagttattctaataatttgttttcttgaaaattgttaatttcaagactggagaaataaactcaccttctatttactctgtgactttatgagaggttgagggaaaagtggaagctgtacttgggaattgtggagaagaccgccactccatctgatttgcataaatgactcagtgggcttttgtatctcttcatttaagaattatttgaatgcctgccaggagccagatttgttctgggtattaggaatacactggttaacaggaccaaaaaagaccctgccctcactgagttttaaattttagtggagagatggaaaataattaaacaaataaacaatgttatagattgtg

SEQ ID NO: 1196 - DNA, 808 bp, Homo sapiens
acttccgggagcctggggcccaggactgcagcggcttcggaaggtgggctctgccagcgggaccatgctgctccgagccgcttggaggcgggcggcagtggcggtgacagcggctccagggccgaagcccgcggcgcccactcgggggctgcgcctgcgcgttggagaccgtgctcctcagtctgcggttcccgcagatacagccgctgccccggaggtggggccagtgctgcgacctctctatatggatgtgcaagctacaactcctctggacccccgggtgcttgatgccatgctcccttacctaatcaactactatgggaacccacactcccggacacatgcttatggctgggagagtgaggcagccatggaacgtgctcgtcagcaagtagcatctctgattggagctgatcctcgtgagatcatttttactagtggtgctactgaatccaacaacatagcaattaagactgagtctcactctgtcatccaggctggagtgcagtggcacgatcttgactcactgcaagctccgcctcctgggttcacgccattctcctgcctcagcctcctgagtagctgggactacaggcgccctccaccacacccggctaattttttgtatttttagtagagacagggtttcactgtgttagccagaatggtctcgatctcctgacctcgtgatccgccctcctcggcctcccaaagtgccccacaaccatttttacttactgatgtaaatactttttaggataaaatagagtataaatcaaaaaaaaaaaaaaaaaaaaaaaaaaaaaaa

SEQ ID NO: 1197 - DNA, 2466 bp, Homo sapiens
gttttccggcgccggccctaggtcccggcagcggtggtgacggcggtgccggaggttgtccttggcaggttttcctcggcgcttctccatggaggaggcggtgcgaacggcttcagccccgaatgctcgcatctcccactggacggcgacgaaggcggtggccgtgcgagcgcaggactgggcggcctgtgtgggggtgtgagccgcggtgcccaaggctgcgccggcgaggggaagccgcgcggccggccggccgactagggctggagctactcggccagggtttaagactttaaatgagaataaagggtggtatttacgaggaaatgagagtgaataagtcatctctaacctctcccagcctttttttcataagagagaccatattaaacttacatgtttgaagactgcttcattctgcctctagtaccagcggtttctctgttctgtgatcaatgtgattcacaggaactccttaagtaacaaacgaaatgagccaggggcgtggaaaatatgacttctatattggtctgggattggctatgagctccagcattttcattggaggaagtttcattttgaaaaaaaagggcctccttcgacttgccaggaaaggctctatgagagcaggtcaaggtggccatgcatatcttaaggaatggttgtggtgggctggactgctgtcaatgggagctggtgaggtggccaacttcgctgcgtatgcgtttgcaccagccactctagtgactccactaggagctctcagcgtgctagtaagtgccattctttcttcatactttctcaatgaaagacttaatcttcatgggaaaattgggtgtttgctaagtattctaggatctacagttatggtcattcatgctccaaaggaagaggagattgagactttaaatgaaatgtctcacaagctaggtgatccaggttttgtggtctttgcaacccttgtggtcattgtggccttgatattaatcttcgtggtgggtcctcgccatggacagacaaacattcttgtgtacataacaatctgctctgtaatcggcgcgttttcagtctcctgtgtgaagggcctgggcattgctatcaaggagctgtttgcagggaagcctgtgctgcggcatcccctggcttggattctgctgctgagcctcatcgtctgtgtgagcacacagattaattacctaaatagggccctggatatattcaacacttccattgtgactccaatatattatgtattctttacaacatcagttttaacttgttcagctattctttttaaggagtggcaagatatgcctgttgacgatgtcattggtactttgagtggcttctttacaatcattgtggggatattcttgttgcatgcctttaaagacgtcagctttagtctagcaagtctgcctgtgtcttttcgaaaagacgagaaagcaatgaatggcaatctctctaatatgtatgaagttcttaataataatgaagaaagcttaacctgtggaatcgaacaacacactggtgaaaatgtctcccgaagaaatggaaatctgacagctttttaagaaaggtgtaattaaaggttaatctgtgattgttatgaagtgaatttgaatatcatcagaatgtgtctgaaaaaacattgtcctcaaataatgttctttaaaggcaatctttttaaagatttcactaatttggaccaagaaattacttttcttgtatttaaacaaacaatggtagctcactaaaatgacctcagcacatgacgatttctattaacattttattgttgtagaagtattttacattttcatcccttctccaaaagccgaatgcactaatgacagttttaagtctatgaaaatgctttattttttcattggtgatgaaagtctgaaatgtgcatttgtcatccccactccatcaatccctgaccatgtaaggcttttttattttaaaaaaacagagttatcccaatacattatcctgtgatttaccttacctacaaaagtggctcctgtttgtttgatgatgattggttttatttttgaaatatttattaagggaaaactaagttactgaatgaaggaacctctttcttacaaaacaaaaaaaagggcagaaatcaccccaaggaacgatttctcaggttgagatgatcaccgtgaatccggcttcctctgagcattcgatggccttagcacctcatcaagccagcacatcctgcctgctgttgcagcctggctgggtttattcttcagttaccctaatcccatgatgcctggaaccttgattaccgttttacatcagctcttgtacttttcagtatattttcataatgagttatattgtcatttagactttgaacagctctgggaaatagaagactagggttgtttcttaaatttagctcatgttataataaaaagttgaaatgaaaaaaaaaaaaaaaaaaaa

SEQ ID NO: 1198 - DNA, 2330 bp, Homo sapiens
gttttccggcgccggccctaggtcccggcagcggtggtgacggcggtgccggaggttgtccttggcaggttttcctcggcgcttctccatggaggaggcggtgcgaacggcttcagccccgaatgctcgcatctcccactggacggcgacgaaggcggtggccgtgcgagcgcaggactgggcggcctgtgtgggggtgtgagccgcggtgcccaaggctgcgccggcgaggggaagccgcgcggccggccggccgactagggtttgaagactgcttcattctgcctctagtaccagcggtttctctgttctgtgatcaatgtgattcacaggaactccttaagtaacaaacgaaatgagccaggggcgtggaaaatatgacttctatattggtctgggattggctatgagctccagcattttcattggaggaagtttcattttgaaaaaaaagggcctccttcgacttgccaggaaaggctctatgagagcaggtcaaggtggccatgcatatcttaaggaatggttgtggtgggctggactgctgtcaatgggagctggtgaggtggccaacttcgctgcgtatgcgtttgcaccagccactctagtgactccactaggagctctcagcgtgctagtaagtgccattctttcttcatactttctcaatgaaagacttaatcttcatgggaaaattgggtgtttgctaagtattctaggatctacagttatggtcattcatgctccaaaggaagaggagattgagactttaaatgaaatgtctcacaagctaggtgatccaggttttgtggtctttgcaacccttgtggtcattgtggccttgatattaatcttcgtggtgggtcctcgccatggacagacaaacattcttgtgtacataacaatctgctctgtaatcggcgcgttttcagtctcctgtgtgaagggcctgggcattgctatcaaggagctgtttgcagggaagcctgtgctgcggcatcccctggcttggattctgctgctgagcctcatcgtctgtgtgagcacacagattaattacctaaatagggccctggatatattcaacacttccattgtgactccaatatattatgtattctttacaacatcagttttaacttgttcagctattctttttaaggagtggcaagatatgcctgttgacgatgtcattggtactttgagtggcttctttacaatcattgtggggatattcttgttgcatgcctttaaagacgtcagctttagtctagcaagtctgcctgtgtcttttcgaaaagacgagaaagcaatgaatggcaatctctctaatatgtatgaagttcttaataataatgaagaaagcttaacctgtggaatcgaacaacacactggtgaaaatgtctcccgaagaaatggaaatctgacagctttttaagaaaggtgtaattaaaggttaatctgtgattgttatgaagtgaatttgaatatcatcagaatgtgtctgaaaaaacattgtcctcaaataatgttctttaaaggcaatctttttaaagatttcactaatttggaccaagaaattacttttcttgtatttaaacaaacaatggtagctcactaaaatgacctcagcacatgacgatttctattaacattttattgttgtagaagtattttacattttcatcccttctccaaaagccgaatgcactaatgacagttttaagtctatgaaaatgctttattttttcattggtgatgaaagtctgaaatgtgcatttgtcatccccactccatcaatccctgaccatgtaaggcttttttattttaaaaaaacagagttatcccaatacattatcctgtgatttaccttacctacaaaagtggctcctgtttgtttgatgatgattggttttatttttgaaatatttattaagggaaaactaagttactgaatgaaggaacctctttcttacaaaacaaaaaaaagggcagaaatcaccccaaggaacgatttctcaggttgagatgatcaccgtgaatccggcttcctctgagcattcgatggccttagcacctcatcaagccagcacatcctgcctgctgttgcagcctggctgggtttattcttcagttaccctaatcccatgatgcctggaaccttgattaccgttttacatcagctcttgtacttttcagtatattttcataatgagttatattgtcatttagactttgaacagctctgggaaatagaagactagggttgtttcttaaatttagctcatgttataataaaaagttgaaatgaaaaaaaaaaaaaaaaaaaa

SEQ ID NO: 1199 - DNA, 2273 bp, Homo sapiens
gttttccggcgccggccctaggtcccggcagcggtggtgacggcggtgccggaggttgtccttggcaggttttcctcggcgcttctccatggaggaggcggtgcgaacggcttcagccccgaatgctcgcatctcccactggacggcgacgaaggcggtggccgtgcgagcgcaggactgggcggcctgtgtgggggtgtgagccgcggtgcccaaggctgcgccggcgaggggaagccgcgcggccggccggccgactagggtttgaagactgcttcattctgcctctagtaccagcggtttctctgttctgtgatcaatgtgattcacaggaactccttaagtaacaaacgaaatgagccaggggcgtggaaaatatgacttctatattggtctgggattggctatgagctccagcattttcattggaggaagtttcattttgaaaaaaaagggcctccttcgacttgccaggaaaggctctatgagagcagtgggagctggtgaggtggccaacttcgctgcgtatgcgtttgcaccagccactctagtgactccactaggagctctcagcgtgctagtaagtgccattctttcttcatactttctcaatgaaagacttaatcttcatgggaaaattgggtgtttgctaagtattctaggatctacagttatggtcattcatgctccaaaggaagaggagattgagactttaaatgaaatgtctcacaagctaggtgatccaggttttgtggtctttgcaacccttgtggtcattgtggccttgatattaatcttcgtggtgggtcctcgccatggacagacaaacattcttgtgtacataacaatctgctctgtaatcggcgcgttttcagtctcctgtgtgaagggcctgggcattgctatcaaggagctgtttgcagggaagcctgtgctgcggcatcccctggcttggattctgctgctgagcctcatcgtctgtgtgagcacacagattaattacctaaatagggccctggatatattcaacacttccattgtgactccaatatattatgtattctttacaacatcagttttaacttgttcagctattctttttaaggagtggcaagatatgcctgttgacgatgtcattggtactttgagtggcttctttacaatcattgtggggatattcttgttgcatgcctttaaagacgtcagctttagtctagcaagtctgcctgtgtcttttcgaaaagacgagaaagcaatgaatggcaatctctctaatatgtatgaagttcttaataataatgaagaaagcttaacctgtggaatcgaacaacacactggtgaaaatgtctcccgaagaaatggaaatctgacagctttttaagaaaggtgtaattaaaggttaatctgtgattgttatgaagtgaatttgaatatcatcagaatgtgtctgaaaaaacattgtcctcaaataatgttctttaaaggcaatctttttaaagatttcactaatttggaccaagaaattacttttcttgtatttaaacaaacaatggtagctcactaaaatgacctcagcacatgacgatttctattaacattttattgttgtagaagtattttacattttcatcccttctccaaaagccgaatgcactaatgacagttttaagtctatgaaaatgctttattttttcattggtgatgaaagtctgaaatgtgcatttgtcatccccactccatcaatccctgaccatgtaaggcttttttattttaaaaaaacagagttatcccaatacattatcctgtgatttaccttacctacaaaagtggctcctgtttgtttgatgatgattggttttatttttgaaatatttattaagggaaaactaagttactgaatgaaggaacctctttcttacaaaacaaaaaaaagggcagaaatcaccccaaggaacgatttctcaggttgagatgatcaccgtgaatccggcttcctctgagcattcgatggccttagcacctcatcaagccagcacatcctgcctgctgttgcagcctggctgggtttattcttcagttaccctaatcccatgatgcctggaaccttgattaccgttttacatcagctcttgtacttttcagtatattttcataatgagttatattgtcatttagactttgaacagctctgggaaatagaagactagggttgtttcttaaatttagctcatgttataataaaaagttgaaatgaaaaaaaaaaaaaaaaaaaa

SEQ ID NO: 1200 - DNA, 2588 bp, Homo sapiens
gttttccggcgccggccctaggtcccggcagcggtggtgacggcggtgccggaggttgtccttggcaggttttcctcggcgcttctccatggaggaggcggtgcgaacggcttcagccccgaatgctcgcatctcccactggacggcgacgaaggcggtggccgtgcgagcgcaggactgggcggcctgtgtgggggtgtgagccgcggtgcccaaggctgcgccggcgaggggaagccgcgcggccggccggccgactagggctggagctactcggccagggtttaagactttaaatgagaataaagggtggtatttacgaggaaatgagagtgaataagtcatctctaacctctcccagcctttttttcataagagagaccatattaaacttacatgctctcccggctgtgatagaccttcagttacagagagagggagcagagtgggaccaggtctgagaatagtgaagcaactcattcctttcaggacattccctctgatgtcctattttcaaactgtttgaagactgcttcattctgcctctagtaccagcggtttctctgttctgtgatcaatgtgattcacaggaactccttaagtaacaaacgaaatgagccaggggcgtggaaaatatgacttctatattggtctgggattggctatgagctccagcattttcattggaggaagtttcattttgaaaaaaaagggcctccttcgacttgccaggaaaggctctatgagagcaggtcaaggtggccatgcatatcttaaggaatggttgtggtgggctggactgctgtcaatgggagctggtgaggtggccaacttcgctgcgtatgcgtttgcaccagccactctagtgactccactaggagctctcagcgtgctagtaagtgccattctttcttcatactttctcaatgaaagacttaatcttcatgggaaaattgggtgtttgctaagtattctaggatctacagttatggtcattcatgctccaaaggaagaggagattgagactttaaatgaaatgtctcacaagctaggtgatccaggttttgtggtctttgcaacccttgtggtcattgtggccttgatattaatcttcgtggtgggtcctcgccatggacagacaaacattcttgtgtacataacaatctgctctgtaatcggcgcgttttcagtctcctgtgtgaagggcctgggcattgctatcaaggagctgtttgcagggaagcctgtgctgcggcatcccctggcttggattctgctgctgagcctcatcgtctgtgtgagcacacagattaattacctaaatagggccctggatatattcaacacttccattgtgactccaatatattatgtattctttacaacatcagttttaacttgttcagctattctttttaaggagtggcaagatatgcctgttgacgatgtcattggtactttgagtggcttctttacaatcattgtggggatattcttgttgcatgcctttaaagacgtcagctttagtctagcaagtctgcctgtgtcttttcgaaaagacgagaaagcaatgaatggcaatctctctaatatgtatgaagttcttaataataatgaagaaagcttaacctgtggaatcgaacaacacactggtgaaaatgtctcccgaagaaatggaaatctgacagctttttaagaaaggtgtaattaaaggttaatctgtgattgttatgaagtgaatttgaatatcatcagaatgtgtctgaaaaaacattgtcctcaaataatgttctttaaaggcaatctttttaaagatttcactaatttggaccaagaaattacttttcttgtatttaaacaaacaatggtagctcactaaaatgacctcagcacatgacgatttctattaacattttattgttgtagaagtattttacattttcatcccttctccaaaagccgaatgcactaatgacagttttaagtctatgaaaatgctttattttttcattggtgatgaaagtctgaaatgtgcatttgtcatccccactccatcaatccctgaccatgtaaggcttttttattttaaaaaaacagagttatcccaatacattatcctgtgatttaccttacctacaaaagtggctcctgtttgtttgatgatgattggttttatttttgaaatatttattaagggaaaactaagttactgaatgaaggaacctctttcttacaaaacaaaaaaaagggcagaaatcaccccaaggaacgatttctcaggttgagatgatcaccgtgaatccggcttcctctgagcattcgatggccttagcacctcatcaagccagcacatcctgcctgctgttgcagcctggctgggtttattcttcagttaccctaatcccatgatgcctggaaccttgattaccgttttacatcagctcttgtacttttcagtatattttcataatgagttatattgtcatttagactttgaacagctctgggaaatagaagactagggttgtttcttaaatttagctcatgttataataaaaagttgaaatgaaaaaaaaaaaaaaaaaaaa

SEQ ID NO: 1201 - DNA, 3627 bp, Homo sapiens
tttgggatggtgacttgacatttaaatgtattaccattaggccctatctgtcaaaaggtctttcaggacatcaaggcacgcaagtacacagcctctgtaaaccagaaccagtccattccatagtccatgatcttcttatcaggagaaagttgttgaaatcagtctcttgtctaatcaaagctgtagttatggcttttggctggattagtgtccgatgttggatgttccagttggaattggcaaagggcctcttggactcgtccccgactgtactgggcgttggcggcgagtccgcgaacactgcgcatgcgcgagccggaagctgccgcccgcggcggaaggggcggacccgggagactgaggacttggattgcttaaggacaccaggcaggcgcgacagccttcagcctctccctctgcagttttggccggttcctttaacttgccttcatctggggctgtttggtatttccacgtgccttgggcccgcccactgcagcctccatcttggaagcggccgccggcgcctagattgagcatttccacagaaattacagttttgtcctttttgaaaaaatagaactgtatttcagaaaaaagaaactacagttttagcatgcagaaaggaaaagggagaacaagccggatcagaagacgaaaactctgcggaagttctgaatcaagaggagagatggggtctttctgtgttgggcaggctgggctcaaactcctggcctcaagcagtcctcccgccttggcctcccaaatgctgggaatacagaatgaatgagagccacaagtctgaatttatagagctgaggaagtggctgaaagctaggaagtttcaagattcaaacttagcgcctgcttgttttccaggtacaggaagagggctgatgagtcaaacatccctgcaggagggacagatgattatttcgttgcctgagagttgcctgctcaccacggacacagtgattcgaagctacttaggggcatacattactaagtggaagcctcctccatctcctctgctggcgctgtgcacctttttagtttcagaaaagcatgctgggcaccgatctctttggaagccttacctggagattttacccaaggcgtatacctgccctgtttgtttggagccggaagtggtgaaccttcttcccaaatctttaaaagcaaaggctgaagagcagagagcccacgtgcaggagttctttgcttcctccagagactttttctcttctctgcagcctctgtttgcggaggctgttgacagcatcttcagctacagtgccctgctgtgggcttggtgcaccgtcaacaccagagccgtgtacctgaggcccaggcagcgggaatgcctttctgcagagccggacacctgtgcactcgctccgtacctggacctgctgaatcatagcccacatgtccaggtaaaagcagcgtttaatgaagaaactcattcttacgaaattagaacgacttcacgttggagaaagcatgaagaggtattcatctgttacggccctcacgataatcaacggctgttcctggaatacggatttgtttctgtccataatcctcatgcttgtgtttatgtctcaagagaaatacttgttaaatatcttccatcaacagataaacagatggacaaaaagatttctattttaaaggatcatggctatatagaaaatttgacatttggatgggatggaccatcttggaggctactcacagcccttaagttgttatgtctggaagctgagaaatttacatgctggaaaaaagtacttcttggggaggtaatttcagatacgaatgagaagacaagtttggacatagcccagaaaatatgctattatttcatagaagagactaatgctgtgcttcaaaaggtgtctcatatgaaggatgaaaaagaggccctgataaaccaactaactttggtggaatccttgtggacggaagagctaaagattctcagggcatctgccgagaccctgcacagtttgcaaacagcttttacctgatttcaccgaagcgcatttggtcacctcctctggtgggtgttagtcacacattttagactaaggtttgatggactaaatttatatagtttagagtcgatgagttgtgtctactcaacaattaggaacttaatccttttccttttgcttttcctacagaaacaaaagttaattttgaagagcatcatcatgggctggggtggtggctgcccccaggacatgcaggatttctgcagggggcagcacaggttctgggattgtgaggctgtgagtgaaggtggacaagctgtctggatggcaggtctaatgctcttccgaataaagtgctgaactgtgaggagagaggcggactgtgaggcagccaggagccagctgcgtccgtgtgtggtctgtcaccacggggcctgcttcttatctgacacagcagctatcagagtctagtggttgtgcttttaagatgctctgataccattgggttaaggggcagattggcggtgggtgtggggcagtgtgaggtagtcctggatccccgccagggtggcccagacgccagcccttccctgtgtggctgcactgaggtgggtgttgaagagccccctaggggacacacagcttccaggaggagggaatgtcctctaagcatgctcctggcctctcaaggtggcgcttgtctaattattcacttgggaagaatgactagctcagccagcggctctttctgctttgttctggcgactttcctgggcaggcctttccacctggggagctggctcatcctgcacagctgggccgtggtgggcctgtctgcttgattctggggttcagtgtaggtcagctgatggcgaaccatggtggtggtttggcttctgttcttattcttgagttttgataccacgcagaccttgggtggggagagcttcctgcacagctctcagcggcctgtggccttggaactgcctgcgtaagtaacggaggggctgctggtcctgttcaggcccgtgctggggacgccgcttagacaatgttgcccagagtcctgtttaccctcccagggttcattcttcccaagaactcaaattcctttctcattggagcctagtgaaaccaaatgaacgggacctgctggcctcaggaggcaggcagagtttaaaataaaactttctcatgatttcttgaacatctttccctgtttgtatatacactttgtgtttatttttcagtagctgcagtatattttttttcaatattcagtataatgcagtgtatttcatcatatgctgtatggagagtgggcagacttctgtggagggcccgatagtaaccatttgaagctttctggacctgtggtcttagtcccagcgattctgcagagcggccatcggcagcatgtcaaccatttgcatggctgggctccagggaaactactgacaacgacaggtggtgggccatagtttcctgacccctgtgctatgccagaatttctttttcctcttccctatgagtggacctaaatatgttaattccttttcacctttcaaaacggacagccccttgaacattaaaaacttcgcagaccctaaaaaaaaaaaaaaaaaaa

SEQ ID NO: 1202 - DNA, 1132 bp, Homo sapiens
gttgcccgggtaacgggagcagagtcggcgggattgagcatttccacagaaattacagttttgtcctttttgaaaaaatagaactgtatttcagaaaaaagaaactacagttttagcatgcagaaaggaaaagggagaacaagccggatcagaagacgaaaactctgcggaagttctgaatcaagaggagtgaatgagagccacaagtctgaatttatagagctgaggaagtggctgaaagctaggaagtttcaagattcaaacttagcgcctgcttgttttccaggtacaggaagagggctgatgagtcaaacatccctgcaggagggacagatgattatttcgttgcctgagagttgcctgctcaccacggacacagtgattcgaagctacttaggggcatacattactaagtggaagcctcctccatctcctctgctggcgctgtgcacctttttagtttcagaaaagcatgctgggcaccgatctctttggaagccttacctggagattttacccaaggcgtatacctgccctgtttgtttggagccggaagtggtgaaccttcttcccaaatctttaaaagcaaaggctgaagagcagagagcccacgtgcaggagttctttgcttcctccagagactttttctcttctctgcagcctctgtttgcggaggctgttgacagcatcttcagctacagtgccctgctgtgggcttggtgcaccgtcaacaccagagccgtgtacctgaggcccaggcagcgggaatgcctttctgcagagccggacacctgtgcactcgctccgtacctggacctgctgaatcatagcccacatgtccaggtaaaagcagcgtttaatgaagaaactcattcttacgaaattagaacgacttcacgttggagaaagcatgaagaggtattcatctgttacggccctcacgataatcaacggctgttcctggaatacggatttgtttctgtccataatcctcatgcttgtgtttatgtctcaagaggttggaatcaactttgttcttaacattaacactatataatttttttccccatttggagatgtgtattttcagttttaataaaaatatcaaaaccttaaaaaaaaaaaaaaaaaa

SEQ ID NO: 1203 - DNA, 1212 bp, Homo sapiens
gacagagggcttcaggcacgcggctgctgctgccactgctgctctgagacaaggtggatgagtctgctgccggatcaagaaaaagaactgtatttcagaaaaaagaaactacagttttagcatgcagaaaggaaaagggagaacaagccggatcagaagacgaaaactctgcggaagttctgaatcaagaggagagatggggtctttctgtgttgggcaggctgggctcaaactcctggcctcaagcagtcctcccgccttggcctcccaaatgctgggaatacagaatgaatgagagccacaagtctgaatttatagagctgaggaagtggctgaaagctaggaagtttcaagattcaaacttagcgcctgcttgttttccaggtacaggaagagggctgatgagtcaaacatccctgcaggagggacagatgattatttcgttgcctgagagttgcctgctcaccacggacacagtgattcgaagctacttaggggcatacattactaagtggaagcctcctccatctcctctgctggcgctgtgcacctttttagtttcagaaaagcatgctgggcaccgatctctttggaagccttacctggagattttacccaaggcgtatacctgccctgtttgtttggagccggaagtggtgaaccttcttcccaaatctttaaaagcaaaggctgaagagcagagagcccacgtgcaggagttctttgcttcctccagagactttttctcttctctgcagcctctgtttgcggaggctgttgacagcatcttcagctacagtgccctgctgtgggcttggtgcaccgtcaacaccagagccgtgtacctgaggcccaggcagcgggaatgcctttctgcagagccggacacctgtgcactcgctccgtacctggacctgctgaatcatagcccacatgtccaggtaaaagcagcgtttaatgaagaaactcattcttacgaaattagaacgacttcacgttggagaaagcatgaagaggtattcatctgttacggccctcacgataatcaacggctgttcctggaatacggatttgtttctgtccataatcctcatgcttgtgtttatgtctcaagaggttggaatcaactttgttcttaacattaacactatataatttttttccccatttggagatgtgtattttcagttttaataaaaatatcaaaacctt

SEQ ID NO: 1204 - DNA, 1208 bp, Homo sapiens
gttgcccgggtaacgggagcagagtcggcgggattgagcatttccacagaaattacagttttgtcctttttgaaaaaatagaactgtatttcagaaaaaagaaactacagttttagcatgcagaaaggaaaagggagaacaagccggatcagaagacgaaaactctgcggaagttctgaatcaagaggagagatggggtctttctgtgttgggcaggctgggctcaaactcctggcctcaagcagtcctcccgccttggcctcccaaatgctgggaatacagaatgaatgagagccacaagtctgaatttatagagctgaggaagtggctgaaagctaggaagtttcaagattcaaacttagcgcctgcttgttttccaggtacaggaagagggctgatgagtcaaacatccctgcaggagggacagatgattatttcgttgcctgagagttgcctgctcaccacggacacagtgattcgaagctacttaggggcatacattactaagtggaagcctcctccatctcctctgctggcgctgtgcacctttttagtttcagaaaagcatgctgggcaccgatctctttggaagccttacctggagattttacccaaggcgtatacctgccctgtttgtttggagccggaagtggtgaaccttcttcccaaatctttaaaagcaaaggctgaagagcagagagcccacgtgcaggagttctttgcttcctccagagactttttctcttctctgcagcctctgtttgcggaggctgttgacagcatcttcagctacagtgccctgctgtgggcttggtgcaccgtcaacaccagagccgtgtacctgaggcccaggcagcgggaatgcctttctgcagagccggacacctgtgcactcgctccgtacctggacctgctgaatcatagcccacatgtccaggtaaaagcagcgtttaatgaagaaactcattcttacgaaattagaacgacttcacgttggagaaagcatgaagaggtattcatctgttacggccctcacgataatcaacggctgttcctggaatacggatttgtttctgtccataatcctcatgcttgtgtttatgtctcaagaggttggaatcaactttgttcttaacattaacactatataatttttttccccatttggagatgtgtattttcagttttaataaaaatatcaaaacctt

SEQ ID NO: 1205 - DNA, 3271 bp, Homo sapiens
tttgggatggtgacttgacatttaaatgtattaccattaggccctatctgtcaaaaggtctttcaggacatcaaggcacgcaagtacacagcctctgtaaaccagaaccagtccattccatagtccatgatcttcttatcaggagaaagttgttgaaatcagtctcttgtctaatcaaagctgtagttatggcttttggctggattagtgtccgatgttggatgttccagttggaattggcaaagggcctcttggactcgtccccgactgtactgggcgttggcggcgagtccgcgaacactgcgcatgcgcgagccggaagctgccgcccgcggcggaaggggcggacccgggagactgaggacttggattgcttaaggacaccaggcaggcgcgacagccttcagcctctccctctgcagttttggccggttcctttaacttgccttcatctggggctgtttggtatttccacgtgccttgggcccgcccactgcagcctccatcttggaagcggccgccggcgcctagaactgtatttcagaaaaaagaaactacagttttagcatgcagaaaggaaaagggagaacaagccggatcagaagacgaaaactctgcggaagttctgaatcaagaggagtgaatgagagccacaagtctgaatttatagagctgaggaagtggctgaaagctaggaagtttcaagattcaaacttagcgcctgcttgttttccaggtacaggaagagggctgatgagtcaaacatccctgcaggtggaagcctcctccatctcctctgctggcgctgtgcacctttttagtttcagaaaagcatgctgggcaccgatctctttggaagccttacctggagattttacccaaggcgtatacctgccctgtttgtttggagccggaagtggtgaaccttcttcccaaatctttaaaagcaaaggctgaagagcagagagcccacgtgcaggagttctttgcttcctccagagactttttctcttctctgcagcctctgtttgcggaggctgttgacagcatcttcagctacagtgccctgctgtgggcttggtgcaccgtcaacaccagagccgtgtacctgaggcccaggcagcgggaatgcctttctgcagagccggacacctgtgcactcgctccgtacctggacctgctgaatcatagcccacatgtccaggtaaaagcagcgtttaatgaagaaactcattcttacgaaattagaacgacttcacgttggagaaagcatgaagaggtattcatctgttacggccctcacgataatcaacggctgttcctggaatacggatttgtttctgtccataatcctcatgcttgtgtttatgtctcaagagaaatacttgttaaatatcttccatcaacagataaacagatggacaaaaagatttctattttaaaggatcatggctatatagaaaatttgacatttggatgggatggaccatcttggaggctactcacagcccttaagttgttatgtctggaagctgagaaatttacatgctggaaaaaagtacttcttggggaggtaatttcagatacgaatgagaagacaagtttggacatagcccagaaaatatgctattatttcatagaagagactaatgctgtgcttcaaaaggtgtctcatatgaaggatgaaaaagaggccctgataaaccaactaactttggtggaatccttgtggacggaagagctaaagattctcagggcatctgccgagaccctgcacagtttgcaaacagcttttacctgatttcaccgaagcgcatttggtcacctcctctgaaacaaaagttaattttgaagagcatcatcatgggctggggtggtggctgcccccaggacatgcaggatttctgcagggggcagcacaggttctgggattgtgaggctgtgagtgaaggtggacaagctgtctggatggcaggtctaatgctcttccgaataaagtgctgaactgtgaggagagaggcggactgtgaggcagccaggagccagctgcgtccgtgtgtggtctgtcaccacggggcctgcttcttatctgacacagcagctatcagagtctagtggttgtgcttttaagatgctctgataccattgggttaaggggcagattggcggtgggtgtggggcagtgtgaggtagtcctggatccccgccagggtggcccagacgccagcccttccctgtgtggctgcactgaggtgggtgttgaagagccccctaggggacacacagcttccaggaggagggaatgtcctctaagcatgctcctggcctctcaaggtggcgcttgtctaattattcacttgggaagaatgactagctcagccagcggctctttctgctttgttctggcgactttcctgggcaggcctttccacctggggagctggctcatcctgcacagctgggccgtggtgggcctgtctgcttgattctggggttcagtgtaggtcagctgatggcgaaccatggtggtggtttggcttctgttcttattcttgagttttgataccacgcagaccttgggtggggagagcttcctgcacagctctcagcggcctgtggccttggaactgcctgcgtaagtaacggaggggctgctggtcctgttcaggcccgtgctggggacgccgcttagacaatgttgcccagagtcctgtttaccctcccagggttcattcttcccaagaactcaaattcctttctcattggagcctagtgaaaccaaatgaacgggacctgctggcctcaggaggcaggcagagtttaaaataaaactttctcatgatttcttgaacatctttccctgtttgtatatacactttgtgtttatttttcagtagctgcagtatattttttttcaatattcagtataatgcagtgtatttcatcatatgctgtatggagagtgggcagacttctgtggagggcccgatagtaaccatttgaagctttctggacctgtggtcttagtcccagcgattctgcagagcggccatcggcagcatgtcaaccatttgcatggctgggctccagggaaactactgacaacgacaggtggtgggccatagtttcctgacccctgtgctatgccagaatttctttttcctcttccctatgagtggacctaaatatgttaattccttttcacctttcaaaacggacagccccttgaacattaaaaacttcgcagaccctaaaaaaaaaaaaaaaaaaa

SEQ ID NO: 1206 - DNA, 3360 bp, Homo sapiens
tttgggatggtgacttgacatttaaatgtattaccattaggccctatctgtcaaaaggtctttcaggacatcaaggcacgcaagtacacagcctctgtaaaccagaaccagtccattccatagtccatgatcttcttatcaggagaaagttgttgaaatcagtctcttgtctaatcaaagctgtagttatggcttttggctggattagtgtccgatgttggatgttccagttggaattggcaaagggcctcttggactcgtccccgactgtactgggcgttggcggcgagtccgcgaacactgcgcatgcgcgagccggaagctgccgcccgcggcggaaggggcggacccgggagactgaggacttggattgcttaaggacaccaggcaggcgcgacagccttcagcctctccctctgcagttttggccggttcctttaacttgccttcatctggggctgtttggtatttccacgtgccttgggcccgcccactgcagcctccatcttggaagcggccgccggcgcctagaactgtatttcagaaaaaagaaactacagttttagcatgcagaaaggaaaagggagaacaagccggatcagaagacgaaaactctgcggaagttctgaatcaagaggagtgaatgagagccacaagtctgaatttatagagctgaggaagtggctgaaagctaggaagtttcaagattcaaacttagcgcctgcttgttttccaggtacaggaagagggctgatgagtcaaacatccctgcaggagggacagatgattatttcgttgcctgagagttgcctgctcaccacggacacagtgattcgaagctacttaggggcatacattactaagtggaagcctcctccatctcctctgctggcgctgtgcacctttttagtttcagaaaagcatgctgggcaccgatctctttggaagccttacctggagattttacccaaggcgtatacctgccctgtttgtttggagccggaagtggtgaaccttcttcccaaatctttaaaagcaaaggctgaagagcagagagcccacgtgcaggagttctttgcttcctccagagactttttctcttctctgcagcctctgtttgcggaggctgttgacagcatcttcagctacagtgccctgctgtgggcttggtgcaccgtcaacaccagagccgtgtacctgaggcccaggcagcgggaatgcctttctgcagagccggacacctgtgcactcgctccgtacctggacctgctgaatcatagcccacatgtccaggtaaaagcagcgtttaatgaagaaactcattcttacgaaattagaacgacttcacgttggagaaagcatgaagaggtattcatctgttacggccctcacgataatcaacggctgttcctggaatacggatttgtttctgtccataatcctcatgcttgtgtttatgtctcaagagaaatacttgttaaatatcttccatcaacagataaacagatggacaaaaagatttctattttaaaggatcatggctatatagaaaatttgacatttggatgggatggaccatcttggaggctactcacagcccttaagttgttatgtctggaagctgagaaatttacatgctggaaaaaagtacttcttggggaggtaatttcagatacgaatgagaagacaagtttggacatagcccagaaaatatgctattatttcatagaagagactaatgctgtgcttcaaaaggtgtctcatatgaaggatgaaaaagaggccctgataaaccaactaactttggtggaatccttgtggacggaagagctaaagattctcagggcatctgccgagaccctgcacagtttgcaaacagcttttacctgatttcaccgaagcgcatttggtcacctcctctgaaacaaaagttaattttgaagagcatcatcatgggctggggtggtggctgcccccaggacatgcaggatttctgcagggggcagcacaggttctgggattgtgaggctgtgagtgaaggtggacaagctgtctggatggcaggtctaatgctcttccgaataaagtgctgaactgtgaggagagaggcggactgtgaggcagccaggagccagctgcgtccgtgtgtggtctgtcaccacggggcctgcttcttatctgacacagcagctatcagagtctagtggttgtgcttttaagatgctctgataccattgggttaaggggcagattggcggtgggtgtggggcagtgtgaggtagtcctggatccccgccagggtggcccagacgccagcccttccctgtgtggctgcactgaggtgggtgttgaagagccccctaggggacacacagcttccaggaggagggaatgtcctctaagcatgctcctggcctctcaaggtggcgcttgtctaattattcacttgggaagaatgactagctcagccagcggctctttctgctttgttctggcgactttcctgggcaggcctttccacctggggagctggctcatcctgcacagctgggccgtggtgggcctgtctgcttgattctggggttcagtgtaggtcagctgatggcgaaccatggtggtggtttggcttctgttcttattcttgagttttgataccacgcagaccttgggtggggagagcttcctgcacagctctcagcggcctgtggccttggaactgcctgcgtaagtaacggaggggctgctggtcctgttcaggcccgtgctggggacgccgcttagacaatgttgcccagagtcctgtttaccctcccagggttcattcttcccaagaactcaaattcctttctcattggagcctagtgaaaccaaatgaacgggacctgctggcctcaggaggcaggcagagtttaaaataaaactttctcatgatttcttgaacatctttccctgtttgtatatacactttgtgtttatttttcagtagctgcagtatattttttttcaatattcagtataatgcagtgtatttcatcatatgctgtatggagagtgggcagacttctgtggagggcccgatagtaaccatttgaagctttctggacctgtggtcttagtcccagcgattctgcagagcggccatcggcagcatgtcaaccatttgcatggctgggctccagggaaactactgacaacgacaggtggtgggccatagtttcctgacccctgtgctatgccagaatttctttttcctcttccctatgagtggacctaaatatgttaattccttttcacctttcaaaacggacagccccttgaacattaaaaacttcgcagaccctaaaaaaaaaaaaaaaaaaa

SEQ ID NO: 1207 - DNA, 2748 bp, Homo sapiens
aaaaatcgaggcggggctgagaggctgcggcggctgactaggttttcggaccgcggcgcggcggggaagagagactgcggcgggagggccaggccgtgggagagacgcgggaaagtgcgggtcgcagaggcacttgaccaccccgccctaggccgacccggcggacgcggcgtctggtgtgcgggcgctggggcgggtcccaggtctccccgctgcgctgcttgaggctcagccatggcccagcagagagccctgccccagagcaaggagacgctgctgcagtcctacaacaagcggctgaaggacgacattaagtccatcatggacaacttcaccgagatcatcaagaccgccaagattgaggacgagacgcaggtgtcacgggccactcagggtgaacaggacaattacgagatgcatgtgcgagccgccaacatcgtccgagccggcgagtccctgatgaagctggtgtccgacctcaagcagttcctgatcctcaatgacttcccctccgtgaacgaggccattgaccagcgcaaccagcagctgcgcacactgcaggaggagtgcgaccggaagctcatcacgctgcgagacgagatctccattgacctctacgagctggaggaggagtattactcgtccaggtataaatagcgctggactccccatgcagagcgggagcctgcctacctgggcctggccagcaggcagggctgccttctgctttttcaaattcttgctggtcttagcagtggagccatgcctgggtttcagagcagagctcctggccagagcgtttgaccgacagacaattcacatccatatgccagggccctgggcctttcccacagtgcaatgtgatgaaaaccacaggactcacgccagtcggataggccgagtctggagaagggaggcgcctggctgtatcccccgcaggccctcttccgagagccttcctcctcgggcagtgcgttctggggctgtgctgctcctgttaccttctgaatccatatgtagagatttcagccaaggctgggccagccttttttgggcagtcaggtccacacctatgtccagggcaccagggatgcaattccatgtggatgtcaccaaaccccagtgtggaggcagggacagtcatgggaatgtgggggatgaagcccaggcagggaatggccttgaaagccattggagctccaattcgtgacccactcagccttatccacggagctggagccaacctacgtgccaggccccgtgctgggtcccagggatgcagaagggtcaaaacccatcatcctgacccttgtggggctccgtaagaagctgaaaccttcgaccgtttgagctggaggggccctgagaaatcagagtctacgtatcatttacttagggggaaacttaggctggagacagggaggccttccactctgccccattagcttagaaaatcaagattcagtccagcagatgcagagtccatgtccatcttgtgccttctcctggacaaacctttccttcctggtggtggatttaaaatactcctttctgcccattggccatgctgggagccacagatatccagagccagcatgacctggggcttggtttccctgccctgggctcagtggcactgctgagctgcagcagtcctagagttttccagggggttctgagggaatctttggtccccagtactcattaactcagcagacatgaggcagcatttcctccacactagggtggctgagaggggtcctggggtgtttcagacccttctgggcatctccttccacagctgttcagtttgtcggtctctttgaggcagccaccgtccctgagggcccctgcacagagcagctgtgggcctgtaattcagcctgcctgccttgccttggggcagggagagagggaacctgctcacggccctgcagcagagcagggcgcaaacccaggacatctgtgccaggcttcccatgccctcccccaacagtccctcagcttcacccagcggggcttccaggccagcctgtgtcccctcccgcaggcctcctgtccacaccagcgccccctacaggtggcagcccctgcccactcccatgctggtggccctggccccactgagcacgcctgagcctccggggccacgcttcgttctcaggaacaaaacctgaggcagccctttggatgccctcacagccttgcttctctcagcctaggttcccatttggggacttcaggaccccagagccactaggacttccttgggaagcccgttagcccagggtgggtcccgccaggacagtagggaaacagttgtttccctagccatttccgaatagcccatcattccgagtcatcatctctgtttgctgccttcctggccagccaggtggaagaaagtttccaagctaggtctggcccgttggggatctcagcagtggggcaggagggtgcctgatttcggggagtcctgacccgagcctgttgtcagagttgggaggggctctgagcagtgttgggcaggccgggtctcccatcccgaggccagcgttcctgtgcagagccccatccactggttcttgccctgagccacatatgtctgtgccatgggctgagtgccacgacaggcccgtgtgacagctgctgcccacgcatgtggaagctaggtgggactcattcctaattctgccgttgtaatgagacttgattaaaacaccgccacttttttgcaaaaaaaaaaaa

SEQ ID NO: 1208 - DNA, 1448 bp, Homo sapiens
aaaaatcgaggcggggctgagaggctgcggcggctgactaggttttcggaccgcggcgcggcggggaagagagactgcggcgggagggccaggccgtgggagagacgcgggaaagtgcgggtcgcagaggcacttgaccaccccgccctaggccgacccggcggacgcggcgtctggtgtgcgggcgctggggcgggtcccaggtctccccgctgcgctgcttgaggctcagccatggcccagcagagagccctgccccagagcaaggagacgctgctgcagtcctacaacaagcggctgaaggacgacattaagtccatcatggacaacttcaccgagatcatcaagaccgccaagattgaggacgagacgcaggtgtcacgggccactcagggtgaacaggacaattacgagatgcatgtgcgagccgccaacatcgtccgagccggcgagtccctgatgaagctggtgtccgacctcaagcagttcctgatcctcaatgacttcccctccgtgaacgaggccattgaccagcgcaaccagcagctgcgcacactgcaggaggagtgcgaccggaagctcatcacgctgcgagacgagatctccattgacctctacgagctggaggaggagtattactcgtccagctcaagcctttgcgaagctaatgacctgcctctgtgcgaagcttacgggaggctggacctcgacacagactctgctgatggcctctcggcccctctgctggcgtccccggagcccagtgctggccccctacaggtggcagcccctgcccactcccatgctggtggccctggccccactgagcacgcctgagcctccggggccacgcttcgttctcaggaacaaaacctgaggcagccctttggatgccctcacagccttgcttctctcagcctaggttcccatttggggacttcaggaccccagagccactaggacttccttgggaagcccgttagcccagggtgggtcccgccaggacagtagggaaacagttgtttccctagccatttccgaatagcccatcattccgagtcatcatctctgtttgctgccttcctggccagccaggtggaagaaagtttccaagctaggtctggcccgttggggatctcagcagtggggcaggagggtgcctgatttcggggagtcctgacccgagcctgttgtcagagttgggaggggctctgagcagtgttgggcaggccgggtctcccatcccgaggccagcgttcctgtgcagagccccatccactggttcttgccctgagccacatatgtctgtgccatgggctgagtgccacgacaggcccgtgtgacagctgctgcccacgcatgtggaagctaggtgggactcattcctaattctgccgttgtaatgagacttgattaaaacaccgccacttttttgcaaaaaaaaaaaa

SEQ ID NO: 1209 - DNA, 3887 bp, Homo sapiens
aaaaatcgaggcggggctgagaggctgcggcggctgactaggttttcggaccgcggcgcggcggggaagagagactgcggcgggagggccaggccgtgggagagacgcgggaaagtgcgggtcgcagaggcacttgaccaccccgccctaggccgacccggcggacgcggcgtctggtgtgcgggcgctggggcgggtcccaggtctccccgctgcgctgcttgaggctcagccatggcccagcagagagccctgccccagagcaaggagacgctgctgcagtcctacaacaagcggctgaaggacgacattaagtccatcatggacaacttcaccgagatcatcaagaccgccaagattgaggacgagacgcaggtgtcacgggccactcagggtgaacaggacaattacgagatgcatgtgcgagccgccaacatcgtccgagccggcgagtccctgatgaagctggtgtccgacctcaagcagttcctgatcctcaatgacttcccctccgtgaacgaggccattgaccagcgcaaccagcagctgcgcacactgcaggaggagtgcgaccggaagctcatcacgctgcgagacgagatctccattgacctctacgagctggaggaggagtattactcgtccaggtataaatagcgctggactccccatgcagagcgggagcctgcctacctgggcctggccagcaggcagggctgccttctgctttttcaaattcttgctggtcttagcagtggagccatgcctgggtttcagagcagagctcctggccagagcgtttgaccgacagacaattcacatccatatgccagggccctgggcctttcccacagtgcaatgtgatgaaaaccacaggactcacgccagtcggataggccgagtctggagaagggaggcgcctggctgtatcccccgcaggccctcttccgagagccttcctcctcgggcagtgcgttctggggctgtgctgctcctgttaccttctgaatccatatgtagagatttcagccaaggctgggccagccttttttgggcagtcaggtccacacctatgtccagggcaccagggatgcaattccatgtggatgtcaccaaaccccagtgtggaggcagggacagtcatgggaatgtgggggatgaagcccaggcagggaatggccttgaaagccattggagctccaattcgtgacccactcagccttatccacggagctggagccaacctacgtgccaggccccgtgctgggtcccagggatgcagaagggtcaaaacccatcatcctgacccttgtggggctccgtaagaagctgaaaccttcgaccgtttgagctggaggggccctgagaaatcagagtctacgtatcatttacttagggggaaacttaggctggagacagggaggccttccactctgccccattagcttagaaaatcaagattcagtccagcagatgcagagtccatgtccatcttgtgccttctcctggacaaacctttccttcctggtggtggatttaaaatactcctttctgcccattggccatgctgggagccacagatatccagagccagcatgacctggggcttggtttccctgccctgggctcagtggcactgctgagctgcagcagtcctagagttttccagggggttctgagggaatctttggtccccagtactcattaactcagcagacatgaggcagcatttcctccacactagggtggctgagaggggtcctggggtgtttcagacccttctgggcatctccttccacagctgttcagtttgtcggtctctttgaggcagccaccgtccctgagggcccctgcacagagcagctgtgggcctgtaattcagcctgcctgccttgccttggggcagggagagagggaacctgctcacggccctgcagcagagcagggcgcaaacccaggacatctgtgccaggcttcccatgccctcccccaacagtccctcagcttcacccagcggggcttccaggccagcctgtgtcccctcccgcaggcctcctgtccacaccagcgccccctggggggcctcacacagcccctgtggcagaagcagttgccctcctctgtacattgcctttaagcgaccaggtcctggccgagtttcctctgccccttcttgctggtcccccaaagggcgctccgctccctgccctgccctgccctgccctgttccgcatgagctgcgcctctgtgctcgcctgccccctctctgcttgttagttgctctttctggctctgcctctcctttgctttcctcgggatgccactctgtgcccaggacggttctgagactgaacactgagggcaggagcaagggaggaagccaggggcgaggcaggccgcgggaaagccagggcccctgcctgcaggttagaaagaggcgagcgtggattgtcacagctgcgggcatgggaagggctagctgagctcttcacctgcatcctggctgccgtgaggattccccgtgttagaggtggggacgcctgctggaggccgcctggctgatgtagggctatcgggaagtgccagggcctgtgttcccaactgtcgcccccttcaggctaagtctcaggcagggacagacccagaaagaacacagtctgccctcagagagctctttgcagtgtagtgacactggggtttctgcagtcagggaggagggagggtggccaggctgacagctttttgcaagaggagggggaccagcaccagctgggaggcataggctaggacaggcccacgtggaggctgggcaggaagggcctgctgaggtcacacagctgttggtggttgggccagggcggcttcctcctttcagaatgctagggtggctctcaccactggccgcctctccttgccaggcctgccaactcaggggacagatggagcaggagtggagaaagggaaaggcaggtctggggtgtggtcgtgttttcttaactctgcttctgtcttgctctcccctcccctggctttcctctctgcctgctcctgtctctccctggggtttctggtggtggaaaagctcaagcctttgcgaagctaatgacctgcctctgtgcgaagcttacgggaggctggacctcgacacagactctgctgatggcctctcggcccctctgctggcgtccccggagcccagtgctggccccctacaggtggcagcccctgcccactcccatgctggtggccctggccccactgagcacgcctgagcctccggggccacgcttcgttctcaggaacaaaacctgaggcagccctttggatgccctcacagccttgcttctctcagcctaggttcccatttggggacttcaggaccccagagccactaggacttccttgggaagcccgttagcccagggtgggtcccgccaggacagtagggaaacagttgtttccctagccatttccgaatagcccatcattccgagtcatcatctctgtttgctgccttcctggccagccaggtggaagaaagtttccaagctaggtctggcccgttggggatctcagcagtggggcaggagggtgcctgatttcggggagtcctgacccgagcctgttgtcagagttgggaggggctctgagcagtgttgggcaggccgggtctcccatcccgaggccagcgttcctgtgcagagccccatccactggttcttgccctgagccacatatgtctgtgccatgggctgagtgccacgacaggcccgtgtgacagctgctgcccacgcatgtggaagctaggtgggactcattcctaattctgccgttgtaatgagacttgattaaaacaccgccacttttttgcaaaaaaaaaaaaaaaa

SEQ ID NO: 1210 - DNA, 2714 bp, Homo sapiens
ccgacatgttgagtcataagacgcgtcggtgttgcagtctgtgtccttggaggtgaccagggccactgcaggcatggtgctagcagagctgtacgtctctgaccgagagggaagcgatgccacgggagatggaaccaaggagaaaccatttaaaacaggtctaaaggctttgatgacagtagggaaagaaccatttcctaccatttacgtagattcacaaaaagaaaatgagaggtggaatgttatttctaaatcacagttgaagaacattaaaaagatgtggcatagggaacaaatgaagagtgaatcccgggaaaagaaagaggcagaagatagtttacgaagagaaaagaacctggaagaagcaaagaagattaccattaaaaatgatccaagtctcccagagccaaaatgtgtgaagattggtgcgttagaaggatatagaggccaaagagtaaaggtgtttggctgggtccacaggctgcgcaggcaaggaaagaatttaatgtttctggtgttgcgagatggtacaggttatcttcagtgtgtcttggcggatgagttgtgtcagtgctacaatggagttctcttgtccacggagagcagtgttgcagtgtatggaatgctaaatcttaccccaaagggcaagcaggctccaggtggccatgagctgagttgtgacttctgggaactaattgggttggcccctgctggaggagctgacaacctgatcaatgaggagtctgacgttgatgtccagctcaacaacagacacatgatgatccgaggagaaaacatgtccaaaatcctaaaagcacgatccatggtcaccaggtgctttagagatcacttctttgatagggggtactatgaagttactcctccaacattagtgcaaacacaagtagaaggtggtgccacactcttcaagcttgactattttggggaagaggcatttttgactcaatcctctcagttgtacttggagacctgcctcccagccctgggagatgttttttgtattgctcagtcataccgggcagagcagtccagaacacgaaggcacctggctgagtacactcacgtggaagctgagtgtcctttcctgacttttgacgacctcctgaaccggttggaggacttggtttgtgatgtggtagatcgaatattgaagtcacctgcagggagcatagtgcatgagctcaacccgaactttcagccccccaaacggcctttcaaacggatgaactattcagatgctatcgtttggctaaaagaacatgatgtaaagaaagaagatggaactttctatgaatttggagaagatatcccagaagctcctgagagactgatgacagacaccattaatgaaccaatcttgctgtgtcgatttcctgtggagatcaagtccttctacatgcagcgatgtcctgaggattcccgtcttactgaatctgtcgacgtgttgatgcccaatgttggtgagattgtgggaggctcaatgcgtatctttgatagtgaagaaatactggcaggttataaaagggaagggattgaccccactccctattactggtatacggatcagagaaaatacggtacatgtccccatggaggatatggcttgggcttggaacgattcttaacgtggattctgaataggtatcacatccgagacgtgtgcttataccctcgatttgtccagcgttgcacgccataaccattttctccagaagcgtggaggaaagattatgaaaggaacaggctctttaaaaaagaaaacaaaaagccagaatcttccttttttttgtttcattggggtttctctttctgtttttctttctactaccataaaaactatctcaaatcacctgaacatcaagtgatattaaggttgtcatcttaagaaaaaatatccatttttttcttaagttcgggaaacaaagttcggggaaaatacctggcatgaaactgtagttagggatacatttcagcattttactcactttatccaagttattcattttattcaagttatatgtatgtataattcaacaattttagattatggtgtaagatactccagtaacttatctttctgtccttttaagtgtacctggaattctttgatttattttattgcatcaatgaattaaaacaaaaatcttgggggaagaaattggcaatatcgtataaaaatctgctcatattagaacacagtataattcagcagtaaacactagaatcaaatgaatagccttttgtatcagttattaatcttttctaactctgcttagctgctaataatcctgaggcatagaaattgaagaatttgtaaaaatagaattgccttaaaggatttgaagtaagaacataattttggggagagttttttagtgattcacagtatccctcttagcattaatttaaggtaaagaggcagattgattttccctctttcctggtaattcctaagtaattaagaataaataagttccaaaagaaattgtagctggaatcttaataacaattgtgagtggctgtttgagttgcccccaccatgtccttagatctaatctgtgctaccttattaactcacagcaggcttactgaatggcttcatttcagatttagttgatttctccaccaaatgcatgtcatgtattctcaataggctgtattcccagcagtcaataaatgaacacccgtaaaaa

SEQ ID NO: 1211 - DNA, 2224 bp, Homo sapiens
cctacccggaccccgccggcctcacaccccggccagccagccgccagtagtgcgcaccgcctcctccccaagccccgccctgcgtccaccccaggggttaactcgcacgcgcgctcttgtggcggaggtagagtgcgccgtccagggctagagcaagcgcggccccgcggcccggagccatgctgaggagctgcgccgcgcgcctccgcacgctgggggctctgtgcctgccgccagtaggccggcgcctgccgggaagcgagccgcgacccgagctgaggtcattttcttctgaggaagtcattcttaaggactgttctgtccccaaccccagctggaacaaggacctaagactgctctttgaccagtttatgaagaaatgtgaagacggctcctggaaacgtttgccttcatataaacgtacacctactgaatggattcaagacttcaaaacccattttcttgacccaaagcttatgaaagaagaacaaatgtcacaggcccagctcttcaccagaagctttgatgatggcctgggctttgaatacgtgatgttctacaatgacattgagaaaaggatggtttgcttatttcaaggaggcccttacctggaaggaccacctggattcattcatggaggtgccattgcaaccatgattgatgctactgttggtatgtgtgcaatgatggctgggggaatcgtcatgactgccaatctcaacatcaattataaaagacctatccctctttgttctgttgttatgataaatagccaacttgataaagttgaaggaaggaaattttttgtttcctgtaatgttcagagtgttgatgagaagaccctatactcagaggcgacaagcttatttataaagctgaatcctgctaaaagtctgacataaagagctgctggtgaactccatctcattctcgcccctccagaagaagcagttgtcccccaaatactctgctccctcactgctgaatccctgtagggagaagcctgccaacagtgaccttccgaaacagccttctgaatacaaagaggattcagtttccatcttctcaactttttaacacagaaatacttcctgcgagcatatcgacaactctcgggccaggcgctgtggctcacacctataatcccagcactttaggaggccgaggcaggcggattgcctgagctcaggagttcaagatcagtctgggcaacacgatgaaactccgtctctactaaaatacaaaaaattatccaggcatggtggcgtacgcctgtagtcccagctactcaggaggctgaggcaggagaattgcttgaacccaggaggaagaggttgcagtgagccaagatcatgccacatcactccaacctgggcaacagaacaagaacccatctcaaacaaacaaacaaacaaaaaaaaaaaactcttgtctccttaggatatgttacctgctccactgcagactagagaaataaatgtgtattgaaccttttactgcaaacttgaaaatgctagaaaaccaagcatgaagaataaatacatggtgggaaacacacaggcatgtgcatatgcatatacattgtaagttagtaagttagaaagctagctttgttgtatctgaacacatgaatcttttttggtcagtgtaggaagcacagccagatcctataggaatgaatacctcaaatctgttgtctgagattctagagattaaaccactgtgccatttttaacccaggctgtactgttgtttcttaccaacagcataggttttcatcactggaaggagcctgtgttcatttcctagggctgctgtagcaaagtagtacaaactggattgtttaaaccaacaaaaactcattgtctctcagttctggaggccagaagttcaaaatcaaggtgttgaccaaggccattctcctgaaagtgctagggaaggagctgtccacgcctccctcctggcttctgggagcctcaggtgttccttggcttctagatgcatcattccagtcctccatcttcacatggcattccctctgtgtgtctccacagtgtcttccctctgtgcagatctatctctgtgtccaagtctcctctttttataaggaaaccagtcataatggacccacctgaatgacctcattttaacttgattacctctgtaaaaaatgtatttccaaataaagtgaccttatgaggtattgaaaaaaaaaaaaaaaaaa

SEQ ID NO: 1212 - DNA, 2456 bp, Homo sapiens
cctacccggaccccgccggcctcacaccccggccagccagccgccagtagtgcgcaccgcctcctccccaagccccgccctgcgtccaccccaggggttaactcgcacgcgcgctcttgtggcggaggtagagtgcgccgtccagggctagagcaagcgcggccccgcggcccggagccatgctgaggagctgcgccgcgcgcctccgcacgctgggggctctgtgcctgccgccagtaggccggcgcctgccgggaagcgagccgcgacccgagctgaggtcattttcttctgaggaagtcattcttaaggactgttctgtccccaaccccagctggaacaaggacctaagactgctctttgaccagtttatgaagaaatgtgaagacggctcctggaaacgtttgccttcatataaacgtacacctactgaatggattcaagacttcaaaacccattttcttgcctggttaatggccgggcgctgtggctcacgcctataatcccagcactttgggaggccaaggcaggcggatccctgagttcgggagttcaagaccagcctgaccaacacggagaaaccccgtctctactaaaaatacagaattagtcaggcgtggtggtgggcgcctgtaatcccagctactcaggaggctgaggcaggagaatcgcttgaacccgggaggcggaggttgcgacccaaagcttatgaaagaagaacaaatgtcacaggcccagctcttcaccagaagctttgatgatggcctgggctttgaatacgtgatgttctacaatgacattgagaaaaggatggtttgcttatttcaaggaggcccttacctggaaggaccacctggattcattcatggaggtgccattgcaaccatgattgatgctactgttggtatgtgtgcaatgatggctgggggaatcgtcatgactgccaatctcaacatcaattataaaagacctatccctctttgttctgttgttatgataaatagccaacttgataaagttgaaggaaggaaattttttgtttcctgtaatgttcagagtgttgatgagaagaccctatactcagaggcgacaagcttatttataaagctgaatcctgctaaaagtctgacataaagagctgctggtgaactccatctcattctcgcccctccagaagaagcagttgtcccccaaatactctgctccctcactgctgaatccctgtagggagaagcctgccaacagtgaccttccgaaacagccttctgaatacaaagaggattcagtttccatcttctcaactttttaacacagaaatacttcctgcgagcatatcgacaactctcgggccaggcgctgtggctcacacctataatcccagcactttaggaggccgaggcaggcggattgcctgagctcaggagttcaagatcagtctgggcaacacgatgaaactccgtctctactaaaatacaaaaaattatccaggcatggtggcgtacgcctgtagtcccagctactcaggaggctgaggcaggagaattgcttgaacccaggaggaagaggttgcagtgagccaagatcatgccacatcactccaacctgggcaacagaacaagaacccatctcaaacaaacaaacaaacaaaaaaaaaaaactcttgtctccttaggatatgttacctgctccactgcagactagagaaataaatgtgtattgaaccttttactgcaaacttgaaaatgctagaaaaccaagcatgaagaataaatacatggtgggaaacacacaggcatgtgcatatgcatatacattgtaagttagtaagttagaaagctagctttgttgtatctgaacacatgaatcttttttggtcagtgtaggaagcacagccagatcctataggaatgaatacctcaaatctgttgtctgagattctagagattaaaccactgtgccatttttaacccaggctgtactgttgtttcttaccaacagcataggttttcatcactggaaggagcctgtgttcatttcctagggctgctgtagcaaagtagtacaaactggattgtttaaaccaacaaaaactcattgtctctcagttctggaggccagaagttcaaaatcaaggtgttgaccaaggccattctcctgaaagtgctagggaaggagctgtccacgcctccctcctggcttctgggagcctcaggtgttccttggcttctagatgcatcattccagtcctccatcttcacatggcattccctctgtgtgtctccacagtgtcttccctctgtgcagatctatctctgtgtccaagtctcctctttttataaggaaaccagtcataatggacccacctgaatgacctcattttaacttgattacctctgtaaaaaatgtatttccaaataaagtgaccttatgaggtattgaaaaaaaaaaaaaaaaaa

SEQ ID NO: 1213 - DNA, 1613 bp, Homo sapiens
aagctactcagataagaggctccaagaggacatttttggatgtgaaaaacaatgagaaggaggacaacacacatttacaatcgtcttaattttgtactcagaaaaaggatgtgaagacaatgcacagggaatacaatagtttcagatctgtgtacagtttccttttgcttcatctcctgcaacaatgtaatgaagacaccatgatatcattaacatttcacacaaaaggaaaatgaggctgaaatggtgtgggcaaggcccaggaatctggagcatccctaaccaagcagcagagcacctgggatagagaaagtgctcaagaatgttcacttactgattactacaatcaaaaaaagatacgacactaatttaccacattcttcttacttattttatgagatactattcttccaaggtggagaaagtggagaaagtagagtgacgcagctaagggagtaaatcgaccctcagccaacaagtggcaaaagcctgaagaaagtgatcaagatcactgatgaccccgcggcccatctccaagggggcgggtatcacaaccccgacgccacaccacgtatcattccgcaaaactcccgcgcctcccacgcagaactggcaagagggaaggcgagacagcagtgaacagctggtacgcagcacccacagcaccgcggcagcagctagtgccgactcccgcctagctcttttgactctgttcgcgggaagaatggggaaacagtaaggttgcggcgcctcccgcgagacgaggtacctgaggctggccccgcagtcccccgccgcaccagcaccggagcttcacaccccacttccggggtcaagtcaccgccgggaatcctgtgatcgcagaaaggtagtctcaggttccgcccctatccaagtcccgcctccactgcctctcgccctgtatctgtcaacttccgggacgccgcgcgtcactaagcagccaatctccacttccggactcatccagccccttctccacccctttcagagacagcgcgattgcgatttaggtttccgcgcatttaattggcgaagctggagcgctagtcttcgctgattggtgccgagaaatctgccccatagacacccgcggggcgcacagtttcagtcgtccgtgggtttcccgccagccgcagtcttggaccataatcatggtggacatgatggacttgcccaggtcgcgcatcaacgccggcatgctagctcaattcatcgacaagcctgtctgcttcgtagggaggctggaaaagattcatcccaccggaaaaatgtttattctttcagatggagaaggaaaaaatggaaccatcgagttgatggaaccccttgatgaagaaatctctggaattgtggaagtggttggaagagtaaccgccaaggccaccatcttgtgtacatcttatgtccagtttaaagaagatagccatccttttgatcttggactttacaatgaagctgtgaaaattatccatgacttccctcagttttatcctttagggattgtgcaacatgattgatcttgatggattttcatacgattgtaaatgagctatattaaagtctattaaaggaaaaaaaaaaaaaaaaaaaaa

SEQ ID NO: 1214 - DNA, 2593 bp, Homo sapiens
gtcttctcggtcacgttttctgttatatttgcctatgtagctgatgtcactcaggagcacgagcgaagtacagcttatggatgggtctcagccacctttgcggctagtcttgtcagcagcccggccattggagcatatctttctgccagttacggagacagcctcgttgtgctggtggccacagtggtggctcttctggacatctgcttcatcttagtggctgttccagaatctctgcctgagaaaatgagaccggtttcctggggagctcagatttcttggaaacaagcagacccttttgcgtcgttgaagaaagttggaaaagattctactgtcttactaatctgcatcaccgtgtttctttcataccttcctgaagctggacagtattcaagtttttttctctatctcaggcaggtcataggttttggatctgttaaaattgcagcattcatagctatggtaggaattctgtctattgtggctcagacggcctttcttagcatcttgatgagatcattaggaaataagaatactgtcctccttggcttgggcttccagatgctccagttagcctggtacggttttggatcacaggcctggatgatgtgggcagcagggaccgtggctgccatgtccagcatcacgtttccggcaatcagtgccctcgtcactcggaatgcagagtcagatcagcaaggagttgcccaggggatcataactggaataagaggactatgcaatggcctggggccagcactgtatggcttcatattctacatgttccatgtggaactgactgagttgggcccgaaattgaattctaacaacgttcccctgcagggagctgtcatcccaggcccgccgtttttatttggggcatgtatagtccttatgtcttttctggttgccttattcattcctgaatacagtaaagccagtggagttcaaaaacacagtaacagcagcagcggcagcctgaccaacaccccagaacggggcagtgatgaggacattgagccactactgcaagacagcagcatctgggagctctcttcatttgaggagcctgggaatcagtgcactgagctgtaaactcggcagaaagtgggattctgcatacgccatctctgagagccatggagggagccacacccctggtgacttcatggtgctggatgggagacgctagcggcatccttcagggccaagtttgataaataccaccgccatcattctgctcatcctcctcctgtttttttttttctcttacattctttttttttttcctgtttatacattagaacaagataagatttgaaatacttccttgcaaataatgtgcaactcccaaggtgaaactcaaatagaaaaagtcatctctctggtagaaaggatggctttcctgtaatgactatagagtaagagtggcagcaatctttccatgcccttttcagcagaaggcacagaacagtagcgggactgccatctctggcaagatttcaggtaaagaatctcttcttaatttctaccttcctgtttctctgaatcagcccataggtgttgatgagtggccactcttaaagagtcactcagtatcagggatctactgtctttgttcaaaggtcaaataaaaacctagtctccttttattctactttctattcttagctagaatgaaactcagcatatatacacttctggacataataatattgaatagtaattacctttactagatgaaagaaattttcattacaaacttaaatcatgtaaaactcaacaactcagattcctggacctggtgtcctggttgggtccaaggtgattttacagaagaaaaaaacaactcaagcattctggtggcaacatagagattgtaggctgcttctaagaaagttattaacaatttggaaattcctaagtaggatgagagttagtaactggatacgagtgaagtttatatccaagttcagactcaaaggcattattatgatttgcttcttcccatgtcttccatgtcctgcttctcaaagtttttctcatccatcacactcctgccttaactgctctgagtatgcatttgttttcaattcatctttatttcaatctgtttaacttttgaatcgcatgggaatacgcacattaagttcctttctaaaataaggttttatgaagctgagtttcacgataagtgtcttgctattttttgagatgttttatggacaaagaaaactttacagatttatatgtattttgctgcaccagtaaatggaccattaactagggcccacctttaacagagcacccctttgaaagttttataggtatgaaatatatgtagatatttgtaaagggttttaattttttttttgatggggtgctgtgtaaatcttgtatttataaatgtaatgaaggtattgacagaaaaaaatatatacaacttttataaaggattgtgtactgactgaatacatttaaaagaaaatatattttgaaacctgttctgctatgaacagagataacatatctttttactatgctattggtttttaggttaagcttcctaatgcataataaatttacagtggtt

SEQ ID NO: 1215 - DNA, 1781 bp, Homo sapiens
ggcgggtccgcggccgcggcgggaacatggaggagctgctgaggcgcgagctgggctgcagctctgtcagggccacgggccactcggggggcgggtgcatcagccagggccggagctacgacacggatcaaggacgagtgttcgtgaaagtgaaccccaaggcggaggccagaagaatgtttgaaggtgagatggcaagtttaactgccatcctgaaaacaaacacggtgaaagtgcccaagcccatcaaggttctggatgccccaggcggcgggagcgtgctggtgatggagcacatggacatgaggcatctgagcagtcatgctgcaaagcttggagcccagctggccgatttacaccttgataacaagaagcttggagagatgcgcctgaaggaggcgggcacagtggggagaggaggtgggcaggaggaacggccctttgtggcccggtttggatttgacgtggtgacgtgctgtggatacctcccccaggtgaatgactggcaggaggactgggtcgtgttctatgcccggcagcgcattcagccccagatggacatggtggagaaggagtctggggacagggaggccctccagctttggtctgctctgcagttaaagatccctgacctgttccgtgacctggagatcatcccagccttactccacggggacctctggggtggaaacgtagcagaggattcctctgggccggtgatttttgacccagcttctttctacggccactcggaatatgagctggcaatagctggcatgtttgggggctttagcagctccttttactccgcctaccacggcaaaatccccaaggccccaggattcgagaagcgccttcagttgtatcagctctttcactacttgaaccactggaatcattttggatcggggtacagaggatcctccctgaacatcatgaggaatctggtcaagtgagcgggccttactctggaaggaggcctcagaggtttctccacagtcctcttctgggcaaattcttgtttcttcacatgccggactagcttaagaccaatgcagtagcttatttccaagccttgcaaagtatataatatctaagaggaaaggttttgtcatcccagcgttgtccactttgtggggctttgtaggtagacggagccacactacaggcagggtatgagcagagggatgtatggagtgtgggtgactctgagcctcactgctgctgcaaggtggggaaactgtaagtgaacccctgtgggtgcgggggagggtatccggtgcacagggaggtggccagcgcccccgggcactgctgctcataggtacctttccgctgcctcctccctgctctcctgtgcaggaatgtctctgagctgttcacgttgatgcttcttggttggcaagacttgggtgtagatatgaaaccatcttactaaaagcgtcttaaaatgaccaattccagaatcaagcgtattccgttttcttcctgcatgatcctgggccctcccgcaggctgagcaagtctgtaaactgattctgggagaaaccaagctgctggccgtagggtgtccttgggtacatccaggagtcttcattgcttctgttattaccccgtctcctctgccattttctacagcttgctgagttgtcattcctttgcaacattaaaatacatgctgaactcatatttttccttccttcactgttgtagtaaagagacatatttcatgaatggcattgatgctaataaatcctttgcacaaaaaaaaaaaaaaaaaa

SEQ ID NO: 1216 - DNA, 2568 bp, Homo sapiens
gcgaagctgagaggcctatggatgaggaggacgcggcggccccggtttgttctcatgaacaagatggatgacctcaacctgcactaccggtttctgaattggcgccggcggatccgggagattcgagaggtccgagctttccgatatcaggagaggttcaaacatatccttgtagatggagatactttaagttatcatggaaactctggtgaagttggctgctacgtggcttctcgacccctgaccaaggacagcaattattttgaggtgtctattgtggacagtggagtccggggcaccattgctgtggggctggtccctcagtactacagcttggatcaccagcctggctggttgcctgactctgtagcctaccatgctgatgatggcaagctgtacaatggccgagccaagggccgccagtttgggtcaaagtgcaactccggggaccggattggctgtggcattgagcctgtgtcctttgatgtgcagaccgcccagatcttcttcaccaaaaatgggaagcgggtgggctctaccatcatgcccatgtccccagatggactgttcccagcagtgggcatgcactccctgggtgaggaggtgcggctgcacctcaacgctgagctgggccgtgaggacgacagcgtcatgatggtggacagttacgaggatgaatggggccggctacatgatgtcagagtctgtgggactctgctggagtacttagggaagggcaaaagcatcgtggatgtggggctggcccaggcccggcacccactcagcacccgcagccactacttcgaggtggagatcgtggaccctggagagaaatgctacatcgccctggggctggcacggaaggactatcccaagaacaggcaccctggctggagcagagggtctgtggcttatcatgcagacgatgggaagatcttccatggcagtggtgtgggggacccctttgggccacgctgttacaaaggggacatcatgggctgtggaatcatgttcccccgggactacattttggacagtgagggggacagtgatgacagttgtgacacagtgatcctgtctccgactgcccgggccgtccggaacgtgcggaatgtcatgtacctgcaccaggaaggggaagaggaagaggaggaagaggaagaggaagaggatggggaagagatagagccggagcatgagggcaggaaggtggtggttttcttcactcggaatggcaagatcattgggaagaaggatgctgttgttccttctggaggcttcttccccaccattggaatgctgagctgcggggagaaagtcaaagtagatctgcaccccttgagtggctagggcctcccctccagacctgctccttctccctgctcaccctctgctgggccaggcacccagttcctgacttcccagaggcttcgtttacccagcaggcccctggaggtgtgtagtcactctgcccccactggctcaggcccctgtcacgcttctctgtgcccacgtttctgacctggtgctgccactgttgtcagtccctgggcctgagtccctggttggacaggaatggacccaaagaatggtgttggtatgtgggtggtcccactcgctttggtcagtgggcttctgggtccccctttccctcaccggccctgtgtgggtggagaggcgtgagcaccctatctcagctgctattcgggcatgatgctttgtagagggtagagtagacagccccctcccctactcaccatggtatttctccttgaattcctctttcttgttttctttcctggttgtgtgaaccagttgctgctgtcatacccctggcagggccaggggacctctctttggtcatctctgtcctttcactggctgctgccccaggaagactcctctaggctctccatctttcccttgagagctggctccccaccccaacctgctcaggcaccacagaggatctaggtctctggctccccatacctggacccacatgggtgggtgcctgttgcatgtttaagagagaggggctgtgaggtgacagggcactagggccttcactcctttctccccttccatcctttctttaccagtgccacccatgtccctagctcccgggtattggggctgaggctctggggcctgtctccctgccagcgtgagggcaagaccccagagccttagctgagcaagcccagaggggcagcgtggcccctccctccccttttcctgccccgtcccatgcctcagcttgctgcttgtgccagttgcctgtttcgcttcagtgtttgattctagcacttacatgtgtcctccccaccaagccctctatctccttctaatccttcaacccctggccccctccccgtaacagtgacttttccagggaggaagaggcagcaggagctgttggccttggtttgcacagagcgggtagggctgtagggaaagcgggtgagctgttgtgctgctgggcctccctttggccctcgcttcccaccctacgatgtatgaaatgtatgtacagaccagagatgtttatacagccgataaagatgg

SEQ ID NO: 1217 - DNA, 2081 bp, Homo sapiens
acagctcccattccccatgtagccgcgccctctccttcccctgggcgtctccggggcgtggacaggccgctgaaaggaaccggctgcggcctgtgtgaggctccgcgggccgctgcactgcgaggccgacgcagctggagagaagttaggcaggtcctagggagggcaggctcgagtgctgggcccgcctccccgcgggactgtaggcccgggggctccgcctcgtcgcagcggcaggtaggaggcggtgcgcgcggcccggcgacgggggatcctgaggcccgaagtgatgccaccaaaaagaaatgaaaaatacaaacttcctattccatttccagaaggcaaggttctggatgatatggaaggcaatcagtgggtactgggcaagaagattggctctggaggatttggattgatatatttagctttccccacaaataaaccagagaaagatgcaagacatgtagtaaaagtggaatatcaagaaaatggcccgttattttcagaacttaaattttatcagagagttgcaaaaaaagactgtatcaaaaagtggatagaacgcaaacaacttgattatttaggaattcctctgttttatggatctggtctgactgaattcaagggaagaagttacagatttatggtaatggaaagactaggaatagatttacagaagatctcaggccagaatggtacctttaaaaagtcaactgtcctgcaattaggtatccgaatgttggatgtactggaatatatacatgaaaatgaatatgttcatggtgatataaaagcagcaaatctacttttgggttacaaaaatccagaccaggtttatcttgcagattatggactttcctacagatattgtcccaatgggaaccacaaacagtatcaggaaaatcctagaaaaggccataatgggacaatagagtttaccagcttggatgcccacaagggagtagccttgtccagacgaagtgacgttgagatcctcggctactgcatgctgcggtggttgtgtgggaaacttccctgggaacagaacctgaaggaccctgtggctgtgcagactgctaaaacaaatctgttggacgagctcccccagtcagtgcttaaatgggctccttctggaagcagttgctgtgaaatagcccaatttttggtatgtgctcatagtttagcatatgatgaaaagccaaactatcaagccctcaagaaaattttgaaccctcatggaatacctttaggaccactggacttttccacaaaaggacagagtataaatgtccatactccaaacagtcaaaaagttgattcacaaaaggctgcaacaaagcaagtcaacaaggcacacaataggttaatcgaaaaaaaagtccacagtgagagaagcgctgagtcctgtgcaacatggaaagtgcagaaagaggagaaactgattggattgatgaacaatgaagcagctcaggaaagcacaaggagaagacagaaatatcaagagtctcaagaacctttgaatgaagtaaacagtttcccacaaaaaatcagctatacacaattcccaaactcattttatgagcctcatcaagattttaccagtccagatatattcaagaagtcaagatctccatcttggtataaatacacttccacagtcagcacggggatcacagacttagaaagttcaactggactttggcctacaatttcccagtttactcttagtgaagagacaaacgcagatgtttattattatcgcatcatcatacctgtccttttgatgttagtatttcttgctttattttttctctgaagatgataccaaaattccttttgataattttttaagtttccagctcttcaccgaaatgttgtattcttatttcagtgtttccttccagacatttttaaggtaattggctttaaaaagagaacatattttaacaaagtttgtggacactctaaaaaataaaattgctttgtactagaaaaaaaaaaaaaaaaaaaaaaaaaaaaaaaaaaaaaaaaaaaaaaaaaaaaaaaaaaaaaaaaaaaaaaaaaaaaaaaaaaaaaaaaaa

SEQ ID NO: 1218 - DNA, 1809 bp, Homo sapiens
aatagtgaggggcaccgggagcgaggtgcagggggcggggctcggcctggccgcagccattttggtgcgagagaaacaataggacggaaacgccgaggaacccggctgaggcggcagagcatcctggccagaacaagccaaggagccaagacgagagggacacacggacaaacaacagacagaagacgtactggccgctggactccgctgcctcccccatctccccgccatctgcgcccggaggatgagcccagccttcagggccatggatgtggagccccgcgccaaaggcgtccttctggagccctttgtccaccaggtcggggggcactcatgcgtgctccgcttcaatgagacaaccctgtgcaagcccctggtcccaagggaacatcagttctacgagaccctccctgctgagatgcgcaaattcactccccagtacaaaggtgtggtatctgtgcgctttgaagaagatgaagacaggaacttgtgtctaatagcatatccattgaaaggggaccatggaattgtggacattgtagataattcagactgtgaaccaaaaagtaagctcctaaggtggacaacaaacaaaaaacatcatgtcttagaaacagaaaagacccctaaggactgggtgcgtcagcaccgtaaagaggagaaaatgaagagccataagttagaagaagaatttgagtggctaaagaaatctgaagtcttgtactacactgtagagaagaaggggaatataagttcccagcttaaacactataacccttggagcatgaaatgtcaccagcaacagttacagagaatgaaggagaatgcaaagcatcggaaccagtacaaatttatcttactggaaaacctgacttcccgctacgaggtgccttgtgtccttgacctcaagatgggcacacgacaacatggtgatgatgcttcagaggagaaggcagccaaccagatccgaaaatgtcagcagagcacatctgcagtcattggtgtgcgtgtgtgtggcatgcaggtgtaccaagcaggcagtgggcagctcatgttcatgaacaagtaccatggacggaagctatcggtgcagggcttcaaggaggcacttttccagttcttccacaatgggcggtacctgcgccgtgaactcctgggccctgtgctcaagaagctgactgagctcaaggcagtgttggagcgacaggagtcctaccgcttctactcaagctccctgctggtcatttatgatggcaaggagcggcccgaagtggtcctggactcagatgctgaggatttggaggacctgtcagaggaatcagctgatgagtctgctggtgcctatgcctacaaacccatcggcgccagctctgtagatgtgcgcatgatcgactttgcacacaccacctgcaggctgtatggcgaggacaccgtggtgcatgagggccaggatgctggctatatcttcgggctccagagcctgatagacattgtcacagagataagtgaggagagtggggagtgagcttgctagctgctccagtacttgagagcgactctgtgtcccaggcacagctgtgctgcgtcagggaggaagccagtatggccaggtggtggctcctgcagcctggagctgatgtgcagtggcctctgtgagccccagcctgagccagtcccagctgtgcttggagtctttatttattttaactatttcttcaacattccacatttgatgatgatacctctttcttccctgagtgtatatgttctaatacaaatctttttgtttattgtaaaaaaaaaaaaaaa

SEQ ID NO: 1219 - DNA, 1257 bp, Homo sapiens
aatagtgaggggcaccgggagcgaggtgcagggggcggggctcggcctggccgcagccattttggtgcgagagaaacaataggacggaaacgccgaggaacccggctgaggcggcagcagagcatcctggccagaacaagccaaggagccaagacgagagggacacacggacaaacaacagacagaagacgtactggccgctggactccgctgcctcccccatctccccgccatctgcgcccggaggatgagcccagccttcagggccatggatgtggagccccgcgccaaaggcgtccttctggagccctttgtccaccaggtcggggggcactcatgcgtgctccgcttcaatgagacaaccctgtgcaagcccctggtcccaagggaacatcagttctacgagaccctccctgctgagatgcgcaaattcactccccagtacaaaggacaaagccaaaggccccttgttagctggccatccctgccccattttttcccctggtcctttcccctgtggccacagggaagtgtggcctgaataccccaccccggctcctctgcacccagagctgggggccacctcagaagtgtcatctctctctgagcacgcattcccctgcagcagtcgaggactgagcagattgagtgatgctggggcagagaggcctgggaggaaaggtgttcagccagtcgtttgtaaggcgctcgtcggcacctgctgaaacgcccccacctgacagccccatcctcaaagactgtcttaattactcatggcaggttctagagacttaaggggaaaagctgctttcaaggccaccacatgtctgtgctccccaaccagctctatctgccttgtgttcattttgttattttgtgacgtgagactgcaaagaccaataaaaacatattttataagaacaaaaggcctgggtgcctacccgtgtgggggcactgtgggaagcctttgctagggtgtcttgtgctgtgtggtttgttttgtttgcccctttattttgctttgcttacccagtcttcccttactcttggatgcttcttaaccctcaggcaaacctgtgttccccctgtattcaggctctgctttaaagcaagccatgaggctgttggagtttctgtttagggcattaaaaattcccgcaaactataaagagcaatgttttcagtcttttaggattagaagaattacataaaaattaataaacattttcaatgatggaaaaaaaaaaaaaaaaaaaa

SEQ ID NO: 1220 - DNA, 1254 bp, Homo sapiens
aatagtgaggggcaccgggagcgaggtgcagggggcggggctcggcctggccgcagccattttggtgcgagagaaacaataggacggaaacgccgaggaacccggctgaggcggcagagcatcctggccagaacaagccaaggagccaagacgagagggacacacggacaaacaacagacagaagacgtactggccgctggactccgctgcctcccccatctccccgccatctgcgcccggaggatgagcccagccttcagggccatggatgtggagccccgcgccaaaggcgtccttctggagccctttgtccaccaggtcggggggcactcatgcgtgctccgcttcaatgagacaaccctgtgcaagcccctggtcccaagggaacatcagttctacgagaccctccctgctgagatgcgcaaattcactccccagtacaaaggacaaagccaaaggccccttgttagctggccatccctgccccattttttcccctggtcctttcccctgtggccacagggaagtgtggcctgaataccccaccccggctcctctgcacccagagctgggggccacctcagaagtgtcatctctctctgagcacgcattcccctgcagcagtcgaggactgagcagattgagtgatgctggggcagagaggcctgggaggaaaggtgttcagccagtcgtttgtaaggcgctcgtcggcacctgctgaaacgcccccacctgacagccccatcctcaaagactgtcttaattactcatggcaggttctagagacttaaggggaaaagctgctttcaaggccaccacatgtctgtgctccccaaccagctctatctgccttgtgttcattttgttattttgtgacgtgagactgcaaagaccaataaaaacatattttataagaacaaaaggcctgggtgcctacccgtgtgggggcactgtgggaagcctttgctagggtgtcttgtgctgtgtggtttgttttgtttgcccctttattttgctttgcttacccagtcttcccttactcttggatgcttcttaaccctcaggcaaacctgtgttccccctgtattcaggctctgctttaaagcaagccatgaggctgttggagtttctgtttagggcattaaaaattcccgcaaactataaagagcaatgttttcagtcttttaggattagaagaattacataaaaattaataaacattttcaatgatggaaaaaaaaaaaaaaaaaaaa

SEQ ID NO: 1221 - DNA, 1388 bp, Homo sapiens
aatagtgaggggcaccgggagcgaggtgcagggggcggggctcggcctggccgcagccattttggtgcgagagaaacaataggacggaaacgccgaggaacccggctgaggcggcagcagagcatcctggccagaacaagccaaggagccaagacgagagggacacacggacaaacaacagacagaagacgtactggccgctggactccgctgcctcccccatctccccgccatctgcgcccggaggatgagcccagccttcagggccatggatgtggagccccgcgccaaaggcgtccttctggagccctttgtccaccaggtcggggggcactcatgcgtgctccgcttcaatgagacaaccctgtgcaagcccctggtcccaagggaacatcagttctacgagaccctccctgctgagatgcgcaaattcactccccagtacaaaggtgtctcttgatcacagtaacccatagtcccccactggggggacggtgggggaagactttgggaggattttacccagaatacttgccgcctgctttttgtcctccaggaaaccagaagcccgggtaattaggacaaagccaaaggccccttgttagctggccatccctgccccattttttcccctggtcctttcccctgtggccacagggaagtgtggcctgaataccccaccccggctcctctgcacccagagctgggggccacctcagaagtgtcatctctctctgagcacgcattcccctgcagcagtcgaggactgagcagattgagtgatgctggggcagagaggcctgggaggaaaggtgttcagccagtcgtttgtaaggcgctcgtcggcacctgctgaaacgcccccacctgacagccccatcctcaaagactgtcttaattactcatggcaggttctagagacttaaggggaaaagctgctttcaaggccaccacatgtctgtgctccccaaccagctctatctgccttgtgttcattttgttattttgtgacgtgagactgcaaagaccaataaaaacatattttataagaacaaaaggcctgggtgcctacccgtgtgggggcactgtgggaagcctttgctagggtgtcttgtgctgtgtggtttgttttgtttgcccctttattttgctttgcttacccagtcttcccttactcttggatgcttcttaaccctcaggcaaacctgtgttccccctgtattcaggctctgctttaaagcaagccatgaggctgttggagtttctgtttagggcattaaaaattcccgcaaactataaagagcaatgttttcagtcttttaggattagaagaattacataaaaattaataaacattttcaatgatggaaaaaaaaaaaaaaaaaaaa

SEQ ID NO: 1222 - DNA, 1385 bp, Homo sapiens
aatagtgaggggcaccgggagcgaggtgcagggggcggggctcggcctggccgcagccattttggtgcgagagaaacaataggacggaaacgccgaggaacccggctgaggcggcagagcatcctggccagaacaagccaaggagccaagacgagagggacacacggacaaacaacagacagaagacgtactggccgctggactccgctgcctcccccatctccccgccatctgcgcccggaggatgagcccagccttcagggccatggatgtggagccccgcgccaaaggcgtccttctggagccctttgtccaccaggtcggggggcactcatgcgtgctccgcttcaatgagacaaccctgtgcaagcccctggtcccaagggaacatcagttctacgagaccctccctgctgagatgcgcaaattcactccccagtacaaaggtgtctcttgatcacagtaacccatagtcccccactggggggacggtgggggaagactttgggaggattttacccagaatacttgccgcctgctttttgtcctccaggaaaccagaagcccgggtaattaggacaaagccaaaggccccttgttagctggccatccctgccccattttttcccctggtcctttcccctgtggccacagggaagtgtggcctgaataccccaccccggctcctctgcacccagagctgggggccacctcagaagtgtcatctctctctgagcacgcattcccctgcagcagtcgaggactgagcagattgagtgatgctggggcagagaggcctgggaggaaaggtgttcagccagtcgtttgtaaggcgctcgtcggcacctgctgaaacgcccccacctgacagccccatcctcaaagactgtcttaattactcatggcaggttctagagacttaaggggaaaagctgctttcaaggccaccacatgtctgtgctccccaaccagctctatctgccttgtgttcattttgttattttgtgacgtgagactgcaaagaccaataaaaacatattttataagaacaaaaggcctgggtgcctacccgtgtgggggcactgtgggaagcctttgctagggtgtcttgtgctgtgtggtttgttttgtttgcccctttattttgctttgcttacccagtcttcccttactcttggatgcttcttaaccctcaggcaaacctgtgttccccctgtattcaggctctgctttaaagcaagccatgaggctgttggagtttctgtttagggcattaaaaattcccgcaaactataaagagcaatgttttcagtcttttaggattagaagaattacataaaaattaataaacattttcaatgatggaaaaaaaaaaaaaaaaaaaa

SEQ ID NO: 1223 - DNA, 1812 bp, Homo sapiens
aatagtgaggggcaccgggagcgaggtgcagggggcggggctcggcctggccgcagccattttggtgcgagagaaacaataggacggaaacgccgaggaacccggctgaggcggcagcagagcatcctggccagaacaagccaaggagccaagacgagagggacacacggacaaacaacagacagaagacgtactggccgctggactccgctgcctcccccatctccccgccatctgcgcccggaggatgagcccagccttcagggccatggatgtggagccccgcgccaaaggcgtccttctggagccctttgtccaccaggtcggggggcactcatgcgtgctccgcttcaatgagacaaccctgtgcaagcccctggtcccaagggaacatcagttctacgagaccctccctgctgagatgcgcaaattcactccccagtacaaaggtgtggtatctgtgcgctttgaagaagatgaagacaggaacttgtgtctaatagcatatccattgaaaggggaccatggaattgtggacattgtagataattcagactgtgaaccaaaaagtaagctcctaaggtggacaacaaacaaaaaacatcatgtcttagaaacagaaaagacccctaaggactgggtgcgtcagcaccgtaaagaggagaaaatgaagagccataagttagaagaagaatttgagtggctaaagaaatctgaagtcttgtactacactgtagagaagaaggggaatataagttcccagcttaaacactataacccttggagcatgaaatgtcaccagcaacagttacagagaatgaaggagaatgcaaagcatcggaaccagtacaaatttatcttactggaaaacctgacttcccgctacgaggtgccttgtgtccttgacctcaagatgggcacacgacaacatggtgatgatgcttcagaggagaaggcagccaaccagatccgaaaatgtcagcagagcacatctgcagtcattggtgtgcgtgtgtgtggcatgcaggtgtaccaagcaggcagtgggcagctcatgttcatgaacaagtaccatggacggaagctatcggtgcagggcttcaaggaggcacttttccagttcttccacaatgggcggtacctgcgccgtgaactcctgggccctgtgctcaagaagctgactgagctcaaggcagtgttggagcgacaggagtcctaccgcttctactcaagctccctgctggtcatttatgatggcaaggagcggcccgaagtggtcctggactcagatgctgaggatttggaggacctgtcagaggaatcagctgatgagtctgctggtgcctatgcctacaaacccatcggcgccagctctgtagatgtgcgcatgatcgactttgcacacaccacctgcaggctgtatggcgaggacaccgtggtgcatgagggccaggatgctggctatatcttcgggctccagagcctgatagacattgtcacagagataagtgaggagagtggggagtgagcttgctagctgctccagtacttgagagcgactctgtgtcccaggcacagctgtgctgcgtcagggaggaagccagtatggccaggtggtggctcctgcagcctggagctgatgtgcagtggcctctgtgagccccagcctgagccagtcccagctgtgcttggagtctttatttattttaactatttcttcaacattccacatttgatgatgatacctctttcttccctgagtgtatatgttctaatacaaatctttttgtttattgtaaaaaaaaaaaaaaa

SEQ ID NO: 1224 - DNA, 1973 bp, Homo sapiens
gctcaggcggcgggcgcggctaggatggcgaagagcaacggagagaatgggccgcgcgcgcccgcggccggggaaagcctgtcgggaacccgggagagcctggcccagggccccgacgccgcaaccaccgacgaactcagctctctcgggtctgactcggaggccaacggcttcgccgagcgccgcatcgacaagttcggcttcatcgtgggctcgcagggcgccgagggcgcgctggaggaagtacccctggaggtgctgaggcagagggagtccaagtggctggacatgctcaacaactgggacaaatggatggccaagaagcacaaaaagattcgtctgcggtgccaaaagggcatcccgccttctctgcggggccgtgcttggcagtacctgtcaggaggcaaggtgaagttacagcagaaccctggaaagtttgacgagctggacatgtcccctggggaccccaagtggctggacgtgattgagcgtgacctgcaccggcagttcccattccatgagatgtttgtgtcccgggggggccacggccagcaggacctattccgtgtgctgaaggcctacacgctgtaccggcccgaggagggctactgccaggcccaggcgcccattgccgctgtcttgctcatgcatatgcctgctgagcaagccttctggtgcctggtacagatctgtgagaagtacctgcccggctactacagcgagaaactggaggcgatccagctggacggggagatccttttctcgctgttgcagaaggtgtcgccggtggcccacaagcacctcagccgtcagaagatcgacccgctcctctatatgacagaatggttcatgtgcgccttctcccgaaccttgccctggagctctgtgctgcgtgtctgggacatgttcttctgtgaaggggtcaagatcatcttccgggtggggctggtgctgctgaagcacgcgctgggctcccctgagaaggtcaaagcctgccagggccagtacgagaccatcgagcgactgcggagcctcagccccaagatcatgcaggaggcctttctggtccaggaggtagtggagttgcccgtgacagagcgccagattgagcgcgaacacctcattcagctgcggcgctggcaggagacccggggtgagctgcagtgccgctccccgcccaggctgcatggtgccaaggctatcttggatgcagaacctggtccccggcctgccctacaaccttcaccatccatccgcctgcccctagatgcccccctccctggctccaaagccaagcccaagccacccaagcaggcccagaaggagcagcggaaacagatgaaggggagagggcagctggagaagcccccagccccaaatcaagccatggtggtggccgctgcaggagatgcatgtcccccacagcatgtgcccccgaaggactcagcccccaaggactcagcccctcaggatttggctccccaggtctcagcccaccaccgctcccaggagagcttgacgtcccaagagagtgaggacacctacttgtaaccctggcagctaaggcctccagggcggggtctccatataactacacggttcatgaactgacattccacatcctgcccaccctctgagggccaagctgcctggccactgggctgggctggagtctggctggtccaacacagattctgcctggtccaacacagattctgcctgagcctccttatttattttctttacagtggcactcaggctggcccagccagggcaggcagaagctagggcctggggggtggggcctccttcagccccctcctcctgggggatgctccccagggttagggtgctggtgtgaggggaaagggtggggtgttctttgtgtaaaatagaaacatggttttgtacagaaataaacagccttgtatagagaaaaaaaaaaaaaaaaaaaaaaaaaaaaaaaaaaaaaa

SEQ ID NO: 1225 - DNA, 4113 bp, Homo sapiens
gggtactccttcctggaccgcgctggaagccctggcggcggcggcccatggggcccttggcgctgcccgcctggctgcagcccaggtataggaagaatgcgtatcttttcatctattacttaatccagttctgtggccactcttggatatttacaaatatgacagtcagattcttttcatttggaaatgattcaatggttgacactttttatgctattggacttgtgatgcgactttgccaatccgtatctctcctggaactgctgcacatatatgttggcattgagtcaaaccatcttctcccaaggtttttgcagctcacagaaagaataatcatcctttttgtggtgatcaccagtcaagaggaagtccaagagaaatatgtggtgtgtgttttattcgtcttttggaatctattggatatggttaggtacacttatagcatgttatcagtcataggaatatcctatgctgtcttgacatggctcagtcaaacactatggatgccaatttatcctttgtgtgttcttgctgaagcatttgccatctatcaatcgctgccttattttgaatcatttggcacttattccaccaagctgccctttgacttatccatctatttcccatatgtgctgaaaatatatctcatgatgctctttataggtatgtattttacctacagtcatctatactcagaaagaagagacatcctcggaatctttcccattaaaaaaaagaagatgtgaagtacagcattccagtgtgacacgagaaaagacaggctgtggattcagtgcagtaaataaaacacaggaagtattctggtggaaaaataccttgtatttgacaaaaatccattacatgaaataactgcacatacccccaaaactctagacataacaggctatgtttttcacacattgtatttttaagacatatatattctccataccctgcttcaccaaaattcctgcttcatttggattttatacaagttatacttacattgtatgaagtctgattattttcctgtaagtttaatgagaaataggagattagctgcaatagattcaattaaattaagaaaccaaacttgataacctaaattacatgtattctttttcacttccaagttcccaaatagatctgtaggagaagagggatggaaaatatattccacatttgcctagaataacatatttcatagacagatgtctgtcttcagatctaataatactcaccctaaacattagatatgtttagaaaattaaatatctttccaagccctatgtcttagctcaggttgctataatagaacaccataaaccgaatggcttaaacaacagcaaacgcttctcacagttctggaggctgggaattccgctcaggatcaaggcatcagctaatgcagtttctggtgagggccctcttcccagtttgcagatagatgtccttctttgtccccacatgagagagagatcaactctcttatgtctcttataatggcactaaccccattcatgagggctctaccctcatgatctaattacctcccaatggccccacctccaaataccatcatattggaggttagggcttaacacatgaattttgggggaacacaaagattcactccatagcattctgtacctggtcctacaaaattcatgtcctcctcacatgcaaaatacatacattccatctcgacagcctcaaaagtcttaactcattcctgcatcaactctaaagtccaaagtctcatctaaatcagatgtgggtgagattcaaggtagaattcatcctgaggtaaaattcctttccagctttgaacttgtgaaatgaaacaagttatgtgcttccacagtacaatggtgggacacacaaagggtggacattcctattcccaaagcaagaaacaggaaaaaaggaaggtgtaatgggtccccagcaagtgcaaaacctagcaaggcaaacaccatgagatcttcagtcttagtaataatcctctttggcctgatactctggcttcaggacccaatgaggcagaggtattgcccccaggactatgttggaggaggatgacccccatatcaccaggcggaagctgtcaggcctgttgaaaccaaggcaatgactgccccttttgaaactgagaaggtaccactgatgttctctgaatcattgttccgggtcagtttctccttttcttgaagaatagtgtacattcacagctgaatagctctatggtcccaaattcaagaagtccaacagtcttccctcattctgtcccatctccattcctttcaatacaaactagcagtgttcctgctggggtggctgattaggtctgtggttcacacccacataaatctaattggatgactggtctgctacactcttagtgttctctaccaaacgtgttttcttatctttttgtaatgcagacagactgataatttcccacatcttttaagttgtggttccgtttttgttaagaattctgtcttcattttttgtcacattttactttaagcagtcaaggtaaaccgaggcactccttcaacactggttggagatctcttcagttcaatatctaatttcatggctcacaattttactttccacaaaacactagaacatgaacacaatcatccaagttctttggcatattataacaaagatcacctttcttccagtttcccataacaggttcctcattttcatttgagacttcatcagaatggcctttattgtccatgtctaccaacattatcttcatggtgatttacgtgttctctatgaagatggaggctttctctcccaccctcttctctttgagccctcaccaaaatcacctctatcaatcccttcatggcaatactggctttttctagcaaaaaaactagtacctcaaaactcttccagtactcttccaggtactctagtacctcaaaactcttccagcttctatctgttacctaacgtcaaagctgcttccacatctttatatattcgttatagcatcaccacacttcttggtactaattgctgtcttagcttggctgctataacaaaataccataaactgggtggcttagacaacaaatatatttctcacagttctggaggcagggaagtccaagataaaggtgctagacaattaagttcctgatgaggttccaaggtgctagctgattcttcttcatggtttgcagatgaatgccttcttgctatatgttcacatggtggagggagaaaccatctctcccttatttcttattgtaaaggtactaatcccatttatgaaggttccagcttcaaatgccatcacactggagattagattttcaacatgtgaatttaatgggggacaccagcattcagtccctagtgctctgatagagtattcattaatgtcatgtatttgttaacatcttgtaagttatttgggctttgatgccttaaaagaagaccctgacctcatgatccacccgcctcggcctcccaaagtgctgggattacaggtgtgagccactgggcccagcccacctctgtagttctttggaataattttatgattaatttgattagaaactcagttctttggaataattttatgattaatttgattagaaactcagttttttttttttctttaatttttgagacagcctgggtgacagagtgagactctatctcaaaagagaagaccctaatgaaaatagtaaacctttagcaaatacacaaatgatgccccattctgtattctttttaattttaaaaataatgacacacacatacaggaagataaaaggtataaaaatatactaagtactttttaaaaaggaaaattcatgttttggattattactgaattgttgctaattactgtaatgtaagtcatatgtccttacatagttttgaaaaatgctttctttaaaaatctaaaaaaagtgtgaataactggtagtcattgctgtatcattgatgtatcactcaatttttggtaaagaattataaagatcttacctagaaactatgtaaaaaggtattaaatatattgtgatgtaagaataggataataaaaatgtaattttaaaaaaaaaaaaaaaa

SEQ ID NO: 1226 - DNA, 2491 bp, Homo sapiens
gtgagtcagcattggcggcggccccagcgcgtggcagccgtgcgccgccaaggtgcgggtctcgttactcggcggtcaggagcgggccctcccttaggtgcgccccccgccaggttctgcgttagacctgcatcttagcaatgtgaatattgcatccctagagaaggacctggaagagcaagacggccacgacctgggagcagcaggtcccaggtcgctggccggctctgcacctgtcgccatccccggctccctgcccagagcaccatcgctacactcgccatcctctgcgtccacctcgccgctcggttcgctgtcccagcccctcccagggccggtgggctcctcagccatgacgcctccccagcagccgccacccctgcgttcagagccgggcacactgggctctgcagcctcatcctacagccccctaggtgagtgccggctccctccatgctggcgttgccgtgaagcctccgtggggctccctcccagatgccgtcctgactgaggggcctcacacggaaccttgtgccctatctgtggtggcaaaccacatgacctgctgctcacaggttcccccacgccgcagaccgagtctcgctctgtcgcccaggctggactgcaatggtttgaacggtgtccccgggagcatctgggactttgtttccggcagcttctcccccagcccctcccccatcctgagtgccggccccccatcctcttcgagtgcaagtccaaacggagctgagctggcccgggtcaggcggcagctggacgaggccaagaggaagatccggcagtgggaggagtcctggcagcaggtgaagcaggtctgcgatgcctggcagcgagaggcgcaggaggccaaggagcgtgcccgtgtggccgatagcgaccggcagctggcgctgcagaagaaggaggaggtggaggcacaggtgaagcagctgcaggaggagctggagggcctgggcgtagcctccacactgccggggctgcggggctgtggggacatcggcaccattcccctgccgaagctgcactcgctgcagagtcagctgcgcctggacctggaggcggtggacggcgtgatcttccagctccgcgccaagcagtgtgtggcctgccgggagcgggcccacggtgctgtcctgcggccctgtcagcaccacatcctctgtgagccgtgtgcggccaccgcacctgagtgcccctactgcaagggccagcccctgcagtggtgacctcagcggggacagccacctcctgctgggcaccctggctccagcgctcctcctgaccacggacatgtcgtcactcgcttctggtgccaccgacgtgaggaccgaggctgggagcccttcctgttacacgttatcatgaggctgggagccccgcctgcgcttggcctgacagcctttcctgtcacacgttgtcacctatctagtcctaccgacggtttcaaggtattttcctcaaaaaccttaaatgcaaacccacagaacccgcctgcctgtccctgaggggcctggtgcctccgggatccacgcggcgctgtgatcacagcagtttgtggtcctgacactactgtgactaggccactgggagctggggtctttcaaagcactttgtaaaccgaggaatttagttagaggttataaattgctctaagctgctttctgtttttttttaatatgcgataatatgaagctttatatgtgtactgtgaacttaaatatttcatatcagtttattgtcaattcatagtatgctaaatatattagatttcatattctgaaactagtacttatgaaatgagtgtttatctagtagtaagacctaggatttttacattttccaattaagtgcaaatagtatttataagcagagtgattatggattgagatgtttttaacttgatggaaggagctagttttcctgagcctgtgtgtgcaccaggcactggggctgatgttccagcctcgtggcgtgggagcaggagagctccgtcctgcatttctgtggtccgtggccgctgtttctgtgcgcctgcgcctcggagagcaagtgaaggagcatcatgggttttgttttctcccttaaccctctgaaagacagtttgatactaacaaaaaacgcagcagaggggatccaacgtcagagcttttagaattacttttttaagcagctgtcttctggctgggtgcggtggctcatgcctgtgatcccagcactttgggaggcgggtggatcacctaaggtcaggagttcaagaccagcctggccaacatggtgcaaccccgtcttagtaaaaatacaaaaattggcctggcgtgagagcgggcacctgtagtcccagctactcgggaggctgaggcaggagaatcgcttgaacctgggaggcagaggttgcagtgagccgagatcgcgccaccgcactccagcccgggtgacagagcgagactctggctcaaaaaaaaaaaaaaaa

SEQ ID NO: 1227 - DNA, 2217 bp, Homo sapiens
ggggcggtgccgaggccgggccggagcggggcgaagggggccgagcggcgggccgggccgggccgggcagggccggggcgtgggccggcaggaagatggcgaacgtggggctgcagttccaggcgagcgcgggggactcggacccacagagccggcccctgctgctgctcgggcagctgcaccacctgcaccgcgtgccctggagccacgtccgcgggaagctgcagccccgggtcaccgaggagctctggcaggctgccctgagcacgctcaaccccaaccccacggacagctgtcccctctacctgaactacgccaccgtggctgccctgccctgcagggtgagccggcacaacagcccctcggccgcccacttcatcacgcggctggtgcggacctgcctgccgcccggagcgcatcgctgcattgtgatggtctgcgagcagccggaggtctttgcttccgcctgtgccctggcccgggccttcccgctgttcacccaccgctcaggtgcctctcggcgcttggagaagaagacggtcaccgtggagtttttcctggtgggacaagacaacgggccggtggaggtgtccacattgcagtgcttagcgaatgccacagacggcgtgcggctagcagcccgcatcgtggacacaccctgcaatgagatgaacaccgacaccttcctcgaggagattaacaaagttggaaaggagctggggatcatcccaaccatcatccgggatgaggaactgaagacgagaggatttggaggaatctatggggttggcaaagccgccctgcatcccccagccctggccgtcctcagccacaccccagatggagccacgcagaccatcgcctgggtgggcaaaggcatcgtctatgacactggaggcctcagcatcaaagggaagactaccatgccggggatgaagcgagactgcgggggtgctgcggccgtcctgggggccttcagagccgcaatcaagcagggtttcaaagacaacctccacgctgtgttctgcttggctgagaactcggtggggcccaatgcgacaaggccagatgacatccacctgctgtactcagggaagacggtggaaatcaacaacacggatgccgagggcaggctggtgctggcagatggcgtgtcctatgcttgcaaggacctgggggccgacatcatcctggacatggccaccctgaccggggctcagggcattgccacagggaagtaccacgccgcggtgctcaccaacagcgctgagtgggaggccgcctgtgtgaaggcgggcaggaagtgtggggacctggtgcacccgctggtctactgccccgagctgcacttcagcgagttcacctcagctgtggcggacatgaagaactcagtggcggaccgagacaacagccccagctcctgtgctggcctcttcatcgcctcacacatcggcttcgactggcccggagtctgggtccacctggacattgctgcaccggtgcatgctggtgagcgagccacaggcttcggtgtggccctcctgctggcgctcttcggccgtgcctctgaggaccctctgctgaacctggtgtccccactgggctgtgaggtggatgtcgaggagggggacctggggagggactccaagagacgcaggcttgtgtgagcctcctgcctcggccctgacaaacggggatcttttacctcactttgcactgattaattttaagcaattgaaagattgcccttcatatgggttttggtttgtctttctggtcgtcagcgtggtggtggaaacagctgaagttttaggagacagcttagggtttggtgcgggccacggggaggggaccgggaagcgctggggcttgtttctgtttgttacttacaggactgagacatcttctgtaaactgctacccctggggccttctgcaccccggggtgaggcctcctgcctgcctggtgccctgtcccagccccaggtcctgtgcagggcacctgcgtggctgacagccaggctcttactccagccggggctgccagcgcatccagccagcccagccctgtgaaagatggagctgacttgctgcaggggacctgatttatagggcaagagaagtcacactccggcctctcagaattcacttgaggttcaattaaatacagtcacaccgccccctcaaaaaaaaaaaaaaaaaaaaaaaaaaaaaaaaa

SEQ ID NO: 1228 - DNA, 4621 bp, Homo sapiens
atgcaccagaccctctgcctgaaccccgagagcctgaaaatgtctgcgtgcagtgactttgtggagcacatctggaaacccgggtcctgcaagaactgcttctgcctgcggagcgaccaccagctggtggccggccctccccagcccagagcgggcagcctgccccctccaccgcgcctgcctcccaggcctgagaactgccgcctggaagatgaaggtgtgaacagctcaccttactccaagcccacaattgccgtgaagcccaccatgatgagctccgaggcctctgatgtgtggacagaggccaacctgagtgccgaagtctcgcaggtcatctggagacgagcccctggcaagctccccctcccgaagcaggaggatgcccccgtcgtctacctgggcagcttccgaggtgtacagaagcctgctggtccctctacctcccctgatggcaattctcgctgtcccccagcttacaccatggtcggcctgcacaaccttgagccccgcggcgagaggaacattgccttccacccggtgagcttcccggaggagaaggctgtgcacaaagaaaaaccctcatttccttaccaagaccggccctccacccaggagagcttccgccagaaactggctgcctttgctgggaccacatctggctgtcaccagggccctgggcccctgcgggaatccctgccctcggaggatgacagtgatcaaaggtgctcgccctccggggacagcgagggtggagagtactgctccatcctggactgctgccctgggagccctgttgccaaggctgcctcccagactgcaggttcccggggcaggcatggtggcagggactgctcacccacgtgctgggagcaggggaagtgttccgggcccgcagagcaggagaagcggggcccgagcttccccaaggagtgctgtagccagggccccactgcccacccatcctgcctgggccccaagaaactgtccctcacctcggaggctgccatttcttccgacggcctctcttgtggcagcggcagcggcagcggcgccagtagccccttcgtcccccacctcgagagtgattactgctccctcatgaaggaacctgccccagagaagcagcaggaccctggctgcccaggggtgacccctagcagatgccttgggctgacgggggagccccagcccccggcccacccccgggaggctacacagcctgaacccatctatgctgagagcaccaagaggaagaaggcagctccggtgccttccaagtcacaggccaagatagaacatgcagctgctgcccagggccaaggccaggtatgcacaggtaatgcctgggcccagaaagcagcatctggctggggccgggacagcccagacccaactccccaggtgtcagccaccatcacagtcatggcggcccacccggaagaggaccatcggacgatctacctgagcagccctgactctgcagtgggggtgcagtggccacgagggcctgtgagccagaactccgaggtaggtgaagaggagacttcggctgggcaggggctgagctccagggaaagccatgctcacagtgccagcgagagcaagcccaaggagaggcccgccattccccccaagttgtccaagagtagccctgtagggtccccggtgtcaccgtctgctggagggcccccagtgtcaccgctggctgaccttagtgatgggagctctggcggcagcagcattgggccccagcctccatcccaaggtcctgctgaccccgctccttcctgccggaccaacggtgtcgctatcagtgacccatccaggtgtccccagcctgccgcctcgtcagcctcggaacagaggcggcccaggttccaggcaggcacctggagtcgtcagtgccggatagaggaagaagaggaggtggagcaggaattgctgagtcacagctggggaagagagaccaaaaatggccccacggaccattcaaactccacgacctggcaccgtctccaccccacagatggctcctctgggcagaacagcaaagttgggaccgggatgagcaaatccgcctcttttgcctttgagttccccaaggacagaagtgggattgagacattctcacctcctcctccgcctccaaagtcgcggcaccttctaaaaatgaacaagagcagctctgatttggaaaaagtgagccagggctctgcagaaagcctcagcccatccttcaggggtgtccacgtcagcttcaccaccggctccacggacagcctggcctcagactctaggacctgcagcgatggaggtccctcgtctgagctggctcactcgcccaccaacagcgggaagaagctctttgctcccgttccgtttccttcaggctccactgaggacgtgtcccccagtggcccccagcagccccctccactcccccagaaaaagatagtgagccgggcagcctcttcaccggatggcttcttctggacccaaggctcccccaagcccggaacagcaagccccaagctgaacctaagccactcggaaaccaacgtccacgacgaatctcactttagctattcgttgagccccgggaaccgccaccatcctgtcttctcctcttccgatcctctggagaaagctttcaaaggcagtggccactggcttccggcagcagggctggcgggcaacagaggcggctgcgggagccctggcctccagtgcaaaggggccccctccgcctcatcctcccagctgagcgtgtccagtcaagcctccaccgggagcacccagcttcagctgcacggtctcctgagcaacatcagcagcaaggagggcacctatgccaagctggggggactctacacccagtccctggcccgccttgtagccaaatgtgaggacctcttcatgggcggccagaaaaaggagctccacttcaatgagaataactggtcgctcttcaagctgacttgtaacaagccctgctgtgactcgggggatgccatttattactgtgccacctgctctgaggaccccggcagcacctatgctgtgaaaatctgcaaagcccctgagcccaaaacagtctcctactgcagcccgtccgtgcccgtgcactttaacatccagcaggactgcggccacttcgtcgcctcggtgccgtccagcatgctcagctcccccgacgcgcccaaggaccctgtgcctgccctgcccacacacccccctgcccaggagcaggactgcgtggtggtcatcacccgagaggtgccacatcagaccgcctccgacttcgtgcgggactcggcggccagccaccaggcggagcccgaggcgtacgagcggcgcgtgtgcttcctgcttctgcaactctgcaacgggctggagcacctgaaggagcacgggatcatccaccgggacctgtgcctggagaacctgctgctggtgcactgcaccctccaggccggccccgggcccgcccccgccccggctcccgcccccgccgccgccgcgcctccctgctcctctgccgccccgcctgctggtggcactctcagccccgcagccggccccgcctccccggaagggccccgggagaagcagctgccccggctcatcatcagcaactttttgaaggccaagcagaagccgggcggcaccccaaacctgcagcagaagaagagccaggcccggctggcccccgagatcgtgtctgcttcccagtaccgcaagttcgatgagttccagacaggcatcctcatctacgagctgctgcaccaacccaacccgttcgaggtgcgcgcccagctgcgggagagagactaccggcaggaggacctgccgccgctgcccgcgctgtccctctactcacccggcctgcagcagctggcacatctgctactggaggccgaccccatcaagcgtatccgcatcggcgaggccaagcgcgtgctgcagtgcctgctgtgggggcctcggcgcgagctggtgcagcagccgggcacctcggaggaggcgctgtgcggcacgctgcacaactggatcgacatgaagcgggccctgatgatgatgaagtttgcggagaaggcggtggatcgcaggcggggcgtggagctggaggactggctttgctgccagtacctggcgtctgcggagcccggggccctcttacagtcgctgaagctcctgcagcttctgtgagccaagccccagcctgcaccgtcgctgccccttccctgcctaaccctttcctgtctcgccttggaagcacccatgtctccctgggaaatggtacagatgactgggatacctggatgtaaaatatataaatatatatatagaaaatacatataccatatataaatatgaaagactaaggatgctgttgcccgtccacactcgtctcctctctgcactaagtcctccctgttttcttctgtaattatacacatttccagttccatgcaacgtcctgaggacagttctgtgaactgaatgcagcctggacactggcctcaataccttgtttaggatttcttcacccttttgtcaaattgttatttaaagaaaaaaaaaaaagaagaaaattccattaaaattttttttggttgag

SEQ ID NO: 1229 - DNA, 4627 bp, Homo sapiens
atgcaccagaccctctgcctgaaccccgagagcctgaaaatgtctgcgtgcagtgactttgtggagcacatctggaaacccgggtcctgcaagaactgcttctgcctgcggagcgaccaccagctggtggccggccctccccagcccagagcgggcagcctgccccctccaccgcgcctgcctcccaggcctgagaactgccgcctggaagatgaaggtgtgaacagctcaccttactccaagcccacaattgccgtgaagcccaccatgatgagctccgaggcctctgatgtgtggacagaggccaacctgagtgccgaagtctcgcaggtcatctggagacgagcccctggcaagctccccctcccgaagcaggaggatgcccccgtcgtctacctgggcagcttccgaggtgtacagaagcctgctggtccctctacctcccctgatggcaattctcgctgtcccccagcttacaccatggtcggcctgcacaaccttgagccccgcggcgagaggaacattgccttccacccggtgagcttcccggaggagaaggctgtgcacaaagaaaaaccctcatttccttaccaagaccggccctccacccaggagagcttccgccagaaactggctgcctttgctgggaccacatctggctgtcaccagggccctgggcccctgcgggaatccctgccctcggaggatgacagtgatcaaaggtgctcgccctccggggacagcgagggtggagagtactgctccatcctggactgctgccctgggagccctgttgccaaggctgcctcccagactgcaggttcccggggcaggcatggtggcagggactgctcacccacgtgctgggagcaggggaagtgttccgggcccgcagagcaggagaagcggggcccgagcttccccaaggagtgctgtagccagggccccactgcccacccatcctgcctgggccccaagaaactgtccctcacctcggaggctgccatttcttccgacggcctctcttgtggcagcggcagcggcagcggcagcggcgccagtagccccttcgtcccccacctcgagagtgattactgctccctcatgaaggaacctgccccagagaagcagcaggaccctggctgcccaggggtgacccctagcagatgccttgggctgacgggggagccccagcccccggcccacccccgggaggctacacagcctgaacccatctatgctgagagcaccaagaggaagaaggcagctccggtgccttccaagtcacaggccaagatagaacatgcagctgctgcccagggccaaggccaggtatgcacaggtaatgcctgggcccagaaagcagcatctggctggggccgggacagcccagacccaactccccaggtgtcagccaccatcacagtcatggcggcccacccggaagaggaccatcggacgatctacctgagcagccctgactctgcagtgggggtgcagtggccacgagggcctgtgagccagaactccgaggtaggtgaagaggagacttcggctgggcaggggctgagctccagggaaagccatgctcacagtgccagcgagagcaagcccaaggagaggcccgccattccccccaagttgtccaagagtagccctgtagggtccccggtgtcaccgtctgctggagggcccccagtgtcaccgctggctgaccttagtgatgggagctctggcggcagcagcattgggccccagcctccatcccaaggtcctgctgaccccgctccttcctgccggaccaacggtgtcgctatcagtgacccatccaggtgtccccagcctgccgcctcgtcagcctcggaacagaggcggcccaggttccaggcaggcacctggagtcgtcagtgccggatagaggaagaagaggaggtggagcaggaattgctgagtcacagctggggaagagagaccaaaaatggccccacggaccattcaaactccacgacctggcaccgtctccaccccacagatggctcctctgggcagaacagcaaagttgggaccgggatgagcaaatccgcctcttttgcctttgagttccccaaggacagaagtgggattgagacattctcacctcctcctccgcctccaaagtcgcggcaccttctaaaaatgaacaagagcagctctgatttggaaaaagtgagccagggctctgcagaaagcctcagcccatccttcaggggtgtccacgtcagcttcaccaccggctccacggacagcctggcctcagactctaggacctgcagcgatggaggtccctcgtctgagctggctcactcgcccaccaacagcgggaagaagctctttgctcccgttccgtttccttcaggctccactgaggacgtgtcccccagtggcccccagcagccccctccactcccccagaaaaagatagtgagccgggcagcctcttcaccggatggcttcttctggacccaaggctcccccaagcccggaacagcaagccccaagctgaacctaagccactcggaaaccaacgtccacgacgaatctcactttagctattcgttgagccccgggaaccgccaccatcctgtcttctcctcttccgatcctctggagaaagctttcaaaggcagtggccactggcttccggcagcagggctggcgggcaacagaggcggctgcgggagccctggcctccagtgcaaaggggccccctccgcctcatcctcccagctgagcgtgtccagtcaagcctccaccgggagcacccagcttcagctgcacggtctcctgagcaacatcagcagcaaggagggcacctatgccaagctggggggactctacacccagtccctggcccgccttgtagccaaatgtgaggacctcttcatgggcggccagaaaaaggagctccacttcaatgagaataactggtcgctcttcaagctgacttgtaacaagccctgctgtgactcgggggatgccatttattactgtgccacctgctctgaggaccccggcagcacctatgctgtgaaaatctgcaaagcccctgagcccaaaacagtctcctactgcagcccgtccgtgcccgtgcactttaacatccagcaggactgcggccacttcgtcgcctcggtgccgtccagcatgctcagctcccccgacgcgcccaaggaccctgtgcctgccctgcccacacacccccctgcccaggagcaggactgcgtggtggtcatcacccgagaggtgccacatcagaccgcctccgacttcgtgcgggactcggcggccagccaccaggcggagcccgaggcgtacgagcggcgcgtgtgcttcctgcttctgcaactctgcaacgggctggagcacctgaaggagcacgggatcatccaccgggacctgtgcctggagaacctgctgctggtgcactgcaccctccaggccggccccgggcccgcccccgccccggctcccgcccccgccgccgccgcgcctccctgctcctctgccgccccgcctgctggtggcactctcagccccgcagccggccccgcctccccggaagggccccgggagaagcagctgccccggctcatcatcagcaactttttgaaggccaagcagaagccgggcggcaccccaaacctgcagcagaagaagagccaggcccggctggcccccgagatcgtgtctgcttcccagtaccgcaagttcgatgagttccagacaggcatcctcatctacgagctgctgcaccaacccaacccgttcgaggtgcgcgcccagctgcgggagagagactaccggcaggaggacctgccgccgctgcccgcgctgtccctctactcacccggcctgcagcagctggcacatctgctactggaggccgaccccatcaagcgtatccgcatcggcgaggccaagcgcgtgctgcagtgcctgctgtgggggcctcggcgcgagctggtgcagcagccgggcacctcggaggaggcgctgtgcggcacgctgcacaactggatcgacatgaagcgggccctgatgatgatgaagtttgcggagaaggcggtggatcgcaggcggggcgtggagctggaggactggctttgctgccagtacctggcgtctgcggagcccggggccctcttacagtcgctgaagctcctgcagcttctgtgagccaagccccagcctgcaccgtcgctgccccttccctgcctaaccctttcctgtctcgccttggaagcacccatgtctccctgggaaatggtacagatgactgggatacctggatgtaaaatatataaatatatatatagaaaatacatataccatatataaatatgaaagactaaggatgctgttgcccgtccacactcgtctcctctctgcactaagtcctccctgttttcttctgtaattatacacatttccagttccatgcaacgtcctgaggacagttctgtgaactgaatgcagcctggacactggcctcaataccttgtttaggatttcttcacccttttgtcaaattgttatttaaagaaaaaaaaaaaagaagaaaattccattaaaattttttttggttgag

SEQ ID NO: 1230 - DNA, 3163 bp, Homo sapiens
cctttgccctgaagggggctggatgggcaaggcggccgcgatggctcgagctcgggcggtggcggcggtggccggaggcggcggtgcctcctcctcctcgccccggcgccggcggtgatccgagcgagcggccgcggcccccgatgagactgctggcgggctggctgtgcctgagcctggcgtccgtgtggctggcgcggaggatgtggacgctgcggagcccgctcacccgctccctgtacgtgaacatgactagcggcccgggtgggccggcggcggccgcgggcggcaggaaggagaaccaccagtggtatgtgtgcaacagagagaaattatgcgaatcactccaggctgtctttgttcagagttaccttgatcaaggaacacagatcttcttaaacaacagcattgagaaatcgggctggctatttatccaattatatcattcttttgtgtcatctgtttttagcctgtttatgtctagaacatctatcaatgggttgctaggaagaggctcaatgtttgtgttttcaccagatcagtttcagagactgcttaaaattaatccagactggaaaacccacagacttcttgatttaggtgctggagatggagaagtcacaaaaatcatgagccctcattttgaagaaatctatgccactgagctttctgaaactatgatatggcagcttcagaaaaagaaatacagagtccttggtataaatgaatggcagaatacggggttccagtatgatgtcatcagctgcctgaacttgctggaccgctgtgatcagcccctgactttgttaaaagatatcagaagtgtcttggagccaactagaggcagggtcatccttgcccttgtcctcccctttcatccctatgtggaaaacgtaggtggcaagtgggagaaaccatcagaaattttggaaatcaaaggacagaactgggaagaacaagtgaatagtctgcctgaagttttcagaaaagctggttttgttatcgaagctttcaccagactaccatacctgtgtgaaggcgacatgtataatgactactacgttctggatgacgctgtctttgttctcaaaccagtataaacacgtggaggtcgaagtcttcagagtccgcaccctccgggatgtgcccttggaagagggtctgtgttcacaattacgtgaagggaggacccttggggaccgccattctaaatatcatgtaggaatttaaaaagccaaaatactaattatttctttgtagtgtgtaaaggaatgtttttaaaagacaaaaacccaactctttgtggatttttatcaactctttactcagagccactctccaatgcaggtcacactccaattatgatggaagatattttttatacttaattgcagtagggactcattcccagacaaagcaatagtcacgacttcatggaaccaatcaatggattgttttttgaagactggcaataaagctgtccattcaattccaaatactggttttaaggtatagccactgatattctttcatgtttagaaattctttctgttattattcaagaaaatgtttttaatcatgctaataaacttttttggagatgactttggcatcatgtttgaattcatataaagctcccctagcattttttattggtttggcttcaggagtacccaaatagtagcattatgagaatgacgcagacaatttgaataggggggaaggaaggcttcagacttgggggaaggggagattattgcaaattgcagtgaacactgagtcagtaaaaaaaaaaaacagaaacaaaaacccagcctcattcagatacagaacttcagggacccctccccccacccccccagttaatgctgctgtgaaaaatgcaaaataacctggttctgactttgtgatcactcatgtcccatacactgaactttgtttttttctggacaatctcaggttctcagaattgaaacattcagttttgtctactgacaaaatgcaactaaaaatgttttaattcaacttcttactctacacttatatacctctctcccagagcttggctcttccctgaaatccttaaaggagtttattatttgccaagaatatggtttgatgaagaccgtgtcagactcatgcattctggaatccgtgagtgcctccaaccataaacccagaaatgctgccatagaggaacccattagcaagatcaataaccatcgtggatattccaaagagcagagcatttaacccagaatctgaaatctcagtaataacagaaatgtcaatatgagattgtggttattaacaatatgttatcctcactactttatttcttttttcatccaggtgtttcattaagtattctcatttatatgctcatagaagtcatcagatcaacacattcactccaacacctgggtataaaggcgaattaaaacctgaagaattactttattattcattaagaactgcattcccacatcctcacaccaatatcttccactgttactgtgcagtcataataagagttgggttatgtgatttatgcaaaattgttattggtgtgttctaatgatttttttccaggaattcaagtaagtgaagtacaaatacttagcaccatagattgtaaaaatagaaagaggaaatgagaaaacttaatgtcgttcttgtacagttgagttttgcttctttataaactgtctgttaaaatcaggggttgctgttagactgtcaagcagaagtgatggatgttcaaggaggcaggttgccccaaagtgttttctaactttcaagtagagaactttatgctctaataagaaaaatacaactcattcttaaccacccccccaaaacagagaaaacacatacatttatgcattttaaagataaaaagtagtttctcaaaaaaatctgaagttctctgaaaaccagcttattaaaagtgctgttttgtggtgaaaattgaaaccaaatccactcacatttcctatcgggtcttgaaattcttggtggtgtgtcaccattccactagatggcagtgttgcttactgagtgtcaatggcttttttccccgtaaatggaatcatgtttttctcccccaaagtacaataaagctgccttgtctgcaccaaaaacaaaaaaaaaaaaaaaaaaa

SEQ ID NO: 1231 - DNA, 3954 bp, Homo sapiens
agggtctgtgtcaagagcggcaggggctgcaggagataagagaaacgggctgccgtggggtgtgtgtaggcttcagagacatgggatcacggaagactgaagcagaaacagtggattaagacttcctgagcgatagctggcactgccttccccacaatggcagaggtggtggctgaggtggccgagatgccaacacagatgtcaccaggggcagtggagatgtcaacacctatgtcggcagagatgatggagatgtcaacagaagtgactgagatgacacctggggaggcccttgcctcatccctcttcttccagcatcaccagttcatgtgctctgagtgtggcagcctctataacacactggaggaagtcctctcacaccaggagcagcacatgcttgctgtctcagaggaggaggcactgaccacacagaatgttggcctggagccggagctggtgccgggtgctgaggggcccttccagtgtggtgaatgcagccagctcatcctctcccctggggagctcctggcccaccaggatgcccacctccgagagtctgcaaaccagatccaataccagtgctgggactgccaggagctgttcccctcgcccgagctgtgggtggctcatcgaaaggcccagcacctttctgctacggtagctgagccaccagtgccacctcctttgcctcccccaacaccactgcctccaccttctcccccatccgaagtcaagatggagccctatgagtgtcctgagtgctctaccctctgcgccacccctgaggagttcttggagcatcagggcacccactttgactccctagagaaagaggagcgcaatgggttggaggaggaggaagaggacgatgaggaggatgaagaagatgatgaagagatggaggatgaggaggccatggcagaggtcggtgatgatgctgtgggaggtgacgagtccacagctggctgggctcagggctgcggggactgtccccagcaccagccctcagcaggggctcgccggcaacaccggcggacggctcacagcccggcatctgccacccaccccttccactgcagccagtgtcagcgcagtttcagctccgccaaccggctgcaggctcatgggcgggcccatgttggtggcacacatgagtgtacaacctgctccaaggtcttcaagaaagcagcatcgcttgagcagcacttgcggctgcatcgcggggaagcccgctacctctgtgtagactgtggccgcggctttggcacagaactcacgttggtggctcaccggcgggcccacactgccaacccattgcatcgctgtcgttgcggcaagacgttcagcaacatgaccaagttcctctaccaccggcgcactcacgccggcaaaagcggggcacctcccacaggagcaacagctcccccagctccagcggagcccacccctccaccaccaccccctgccccacctgcccagctgccctgcccacagtgctccaagtcctttgcctcagcttcccggctgtcccggcaccggcgtgcagtacacgggccccctgaacggcgtcaccgctgtggggtttgtggcaagggcttcaagaagctgatccacgtgcgcaaccacctgcggacacacacgggtgagaggcccttccagtgccactcatgtggcaagacctttgcttctttggccaacctcagccgccaccagctgacccatacgggtgcacgtccctaccaatgcctggactgtggcaagcgcttcacacagagctccaacctgcagcagcaccggcggttgcacttgcggccagtcgcctttgcccgcgccccccgcctccccatcactggtctctacaacaagagtccctactactgcgggacttgtggccgctggttccgcgccatggcgggcttgcgactgcatcagcgggtccatgcccgagctcggactttgacgctacagcctcccagatcaccatctcctgccccacccccacctccagagcctcaacagactatcatgtgcacagagctgggggagaccatcgccatcattgagacatcccagccactggcgcttgaggacaccctgcagctgtgccaggctgcactgggggccagtgaagcaggcgggctcttgcagttggacacggccttcgtgtgacgcagctgaaaagcaacaacaaaagggtttggttgcaacagccagtgtgggtacctctggggagagaggacctcctctgacaaactggtctggtacccaccatgtgccaggatccaccctggcctctttttacccactgactccccagaacaacccttccaggcttctcttgtcatctttctctgcctgaggggaaactgaagctctgaaatgcgatgtgatctgtaccaggtcacccagctatgctgcaaagtgggttggccaaggccctttgcactgcatcaccctggtgcccagcaacatcaggtaaccttcactgagcaccaagcttatgccaggtctgtgctggccactctcatatacctcttcagatcctctgcttgtacccccagcccttgccttccctggattttgggcacccaggactttgctctgcctggtggagggtacttgatttctctgggcttccttcatctcaattctgacagtgtggaaggaaatctgtaggtacccaggtcctcagctccagactgggtgatgctggagacccaggagcaagtcagcacaggctctgcccacaggaggcatgcacaatctggtaggagaaacgcacaagtacagatagcttgctctctgagtgtgtctcattgattcattcagcctgtgtgtcctaaagcctcccttctcccatactgggtgatgctgggggcagagatgagtcaggcctaaggcttctctgggctgtgatggggatgtgcagggacagtgggatcccaggaaacagacctccatggtgggagatcaggagttaaggacttcctagagaaggtagtccctgaaggaaaagtaggaatctggcagtgaaagaggaaaagaacattccaggcagacagcactgcaagagggtgagctcttggtgtatttggagaccatccagttattcatctgactgcctacctgaggcaagcaccacacttaccactgtatgtgtactatgatcccaacaggcttgtgacatagatttcatattatccctgttgtatagatttttaaaactggtggctgggcgtggtggctcacgcctgtaatcccagcactttgggaggccgaggcgggcagatcacgaggtcgggagatcgagaccatcctggctaacacggtgaaaccccgtctctactaaaaatacaaaaaattggccaggagtggtggcgggcgcctgtggtggccagctactcaggaggctgaggcaggagaatggcgtgaacccgggaggcggagcttgcagtgagccgagatcgcgccactgcactccagcctgggcgacagagtgagactccctctcaaaagaaaataaaaataaaaataaactggccaggtgcggtggctcacgcttgcaatcccagtgctttgggagactgaggcaggaggatcacttaaggccaggagttcgagaccagcctgggcaacagcaagacctcatctctacaaaacttaaaagttagccaggcctggtggcacatgcctgtaatccgagtgctttgggaggctgaggcaggaggatcactcgagctcaagaattcaagacctgggcaagagagagagactttgtctctattaaaaataaaaatgattggccgagcatggtggtgcacaccagtattcccagctactctggaggctgaggcggaggcaggattgcttgatatgagggagattgaggctgcagtgagctgtgttcacaccactgcactccagtctgggcaacagtgcaagaccctgtcactt

SEQ ID NO: 1232 - DNA, 1685 bp, Homo sapiens
gccgggcccagctgcggggcggaggcggaggcggaggagaggcctgcggcggcagggagcggcgggactgggagcgggcgccggagccgacccgagccgagccgagccgagccgagccggagcgggcggcgaaggccggcgcggcgagcagcaaccatgtcggtgttcgggaagctgttcggggctggagggggtaaggccggcaagggcggcccgaccccccaggaggccatccagcggctgcgggacacggaagagatgttaagcaagaaacaggagttcctggagaagaaaatcgagcaggagctgacggccgccaagaagcacggcaccaaaaacaagcgcgcggccctccaggcactgaagcgtaagaagaggtatgagaagcagctggcgcagatcgacggcacattatcaaccatcgagttccagcgggaggccctggagaatgccaacaccaacaccgaggtgctcaagaacatgggctatgccgccaaggccatgaaggcggcccatgacaacatggacatcgataaagttgatgagttaatgcaggacattgctgaccagcaagaacttgcagaggagatttcaacagcaatttcgaaacctgtagggtttggagaagagtttgacgaggatgagctcatggcggaattagaagaactagaacaggaggaactagacaagaatttgctggaaatcagtggacccgaaacagtccctctaccaaatgttccctctatagccctaccatcaaaacccgccaagaagaaagaagaggaggacgacgacatgaaggaattggagaactgggctggatccatgtaatggggtccagcgctggctgggcccagacagactgtggtggcctgcgcagcgagcaggcgtgtgcgtgtgtggggcaggcaggatgtggtgcaggcaggttccatcgctttcgactctcactccaaagcagtagggccgcgttgctgctcactctctgcatagcatggtctgcacctgggagatgggcggggggaggggggcgggcggggtgggaagtgcctgctgtttataatgttgaatttctgtaaaataaactgtatttgcaaatccaacattgagcttctggactacgctgactccactgctgaatcctcaatggaaagggtcgactggttgcagttgaaatgacctgaaatgtagcctctgtccttgtaagtcagttgacttgccgcacatctctttgtgtacttgtacggtactggcagaaaagtcatttttcaaaagccataggcttttccttgcccttagctgtaataatgcatctgattttgatttcctccagagctgtgtttctgtccatcacctgtgtattggccctgtgtttaccactctggcccactcctcacccccttgctcccctggtcttctggagtttgtgacattgatttgaaatggatggtgttctcttgagagcaagtgagattgttagaattaagttccaactatacagttttctaacatagctataaggtccttgttgctgtttgtgataactgatagataactcattggaaacgtgcatacatttatattcagatgaaattatggtttgcactgtctattaaatatctcgattaattttcaaaaaaaaaaaaaaaaaaaaaaaaaaaaaaaaaaaaaaaaaaaaaaaaaaa

SEQ ID NO: 1233 - DNA, 5334 bp, Homo sapiens
cccacgccgcgccttccggttggtccttgaggcgacgggtgaggcacagctgagcgccaaagccacaggctggggcgctaacgcccccgctcagcgctctgcgctccagacagctgcgagctggagtaggaaggttcaggcggtggcggagagtgcgctggaggctggagggccaggaggcgggaagcttcccgcacgggggcgctgtcacctgcctgtgggaggagccagagagggacctggctctgctgctctgaagcaccggagtcgggagaacccatccagacatgaagagcgccaaaggtattgagaacttggcttttgtcccctccagcccagacatcctgcgccgcttgtctgcgtcgccctcccaaatcgaagtctctgccttgtcctctgacccccaaagagagaattctcagccacaggagcttcagaagccccaggagccccagaagtcaccagagccatctctgccttcagcccctcccaatgtctccgaagagaagctccggtcactgtcgctgtccgagtttgaggaggggtcttacggctggaggaacttccatcctcaatgtctccagcgctgcaacacacctggaggctttctgcttcactactgcctcttggccgtcacgcaaggtattgtagttaatggcctagtaaatattagcatttccactgttgagaagcgttatgaaatgaagagttccctgactggcctgatttcatcaagctacgatatttcattctgtttgttgtctttatttgtatcattctttggtgaaagaggacataagccgagatggcttgcatttgcagcctttatgattggactgggagcacttgtattctcattgccacaatttttcagtggagaatataaattggggtctctttttgaagacacttgtgtaacaacaaggaatagcaccagttgtacatcttcaacttcttcactttctaactacttgtatgtcttcatcttgggacaactattgctgggggcaggaggaactcctctttatactctgggaacagcctttcttgatgattctgtgcccacacacaagtcttctctctatataggaaccggttatgctatgtcaatcttaggccctgctattggctatgtattgggaggacaactgctaaccatatacattgatgttgctatgggagaaagcactgatgtcactgaggatgatccgcgatggttgggagcttggtggattgggtttcttctatcatggatctttgcttggtctttaataatacctttttcttgctttccaaaacatttaccaggtacagcagaaattcaagctggaaaaacttcccaggctcatcagagtaatagtaatgcagatgtgaaatttggaaaaagtattaaagattttccagctgctctaaagaatttgatgaagaatgctgtctttatgtgtttagttctatcaacttcttcagaagccttaattactactggatttgctacatttttacctaaatttatagaaaatcaattcggattgacatccagcttcgcagctactcttggaggggctgttttaattcctggagctgctctcggtcaaattttaggtggcttccttgtttcaaaattcagaatgacatgtaaaaacacaatgaagtttgcactgttcacatctggagttgcacttacgctgagttttgtatttatgtatgccaaatgtgaaaatgagccatttgctggtgtatctgaatcatataatgggactggagaattgggaaacttgatagccccttgtaatgccaattgtaactgttcgcgatcatattattatcctgtctgtggagatggagtccaatatttttctccctgctttgcaggctgttcaaacccagttgcacacaggaagccaaaggtatattacaactgttcctgtattgaaaggaaaacagaaataacatccactgcagaaacttttggttttgaagctaaagctggaaaatgtgaaactcattgtgcgaaactgcccatattcctttgcattttctttattgtaattatttttacctttatggccggtactcctataactgtgtctatcctaaggtgtgttaatcacagacaacggtccctagccttgggaatacaatttatggtccttcgattattagggacaattcctggaccaattatatttggtttcacaatagacagcacatgtattctttgggatataaatgattgtggaattaaaggagcttgctggatttatgataacatcaagatggcccatatgctagtagccataagtgttacttgtaaagttatcaccatgttcttcaatggatttgcaatctttttgtataaaccacctccatcagccacagatgtgtcatttcataaagagaatgcagttgtgactaatgttttagcagaacaggatctcaacaaaatagtaaaagaagggtgaaatgggaaaagagaagactgttttacacctggaaaatttacctcgatttttaagaacacacattgccatggcaggattatctatccaatatggacaatcatatttacaaaattgatgtttttataatcaaatgtatttttttacttatgtagtttttgttttatgcaagaaacagacctgtgccttcaaagcccacgtaaagcctcaaaacacagcacacacacacacgagcacacacacacacacacacacgaacacacacacacacacacacacgcacacatacacacttatttcctattcccattgtctaggtatgaaatcctcaagcaataacaagaaaaaaggcccacaattagaaaaatttacatttaaaaaaaatgttgtttctatccccattacaacttgtttaattttaattttcattgtcaatattttgagcttagaacatttatggtataaaaatttaaactaatcaaagttgtgtgatgatttccgggaattattattgaaagcctatgaatttaaaaccaggtttaccatgtaatttgtttttaaatttatgtatactagcctggcctttctccaagcaaattattgaactattagaatatgttagttatcatccttgtgtcttagtatatagtgaatacagaaacatcagcattgtatacacatattttcactttaactcaagaattccaggaggtaatttgttgatattacaatttttaacacatttatgattctgtgataatattattcaattgcatatatttcagaggaaagtaccagtcagtaaagaaaaatgccaactaaacatgaaactattgatcaatacttatatacctttaatttttcctatttgaaaagccaaccacttaacacattactcatagcacctaagacagtgccttgcatagtgtagtcatctattattattgtttaattagaatattaaaccctaccctttaactcagcagtccccaaccttttttgcatcagggaccatttttgtggaagacaatttttccatgggggaagaaggtatggttttgagatgaaactgctccacctcagaccatcaggcattagttagattctcataaggagagtgcaacctagatcccttgcatgtgcagttcccaatggagtgtgcactcctatgagaatctaatgccactactgatctaacaagaggtggagctcaggcagtaatgctcactcacctgcctctcagctcaccaactgtgtggcccgattcctaacaggccacacacagcccagggctggggacccctgctttaactgatgcattgatttgataaagtattttacaagcctgataatgttataaccctgtttattcaggtcagatttatgccaactttgctgagaatatggagggtatagatgagtgaacatcaacaaacataacttctaccatggttaagaattttacttaggaaaagtattgaagttcaaatccagatagtattacatttgaaattgttataagggttattaatttaataaaattcatcatcaggtttcccctataagctttctcctaggttaattttccacaagcattgttttatatacactgtaatcaggataacacaagcttagtgttagatcttgtaggaaaccaagattagaaacattagaaatttgcagaatttaagaaattatgttttgtggtaatctatggccaacgatgttagaacctagcgcaattgtaaagtgaaattcaaggagaaggaatgaggagttagggaagcagcatacttgaatattagagaaggagaggagctgtgggtcaggaatcagagagacctgctaaaaccagacagatataaacaccaaagacggaagccaaataggtagccaaaaatccagatatttgagaagcaggaaatttatagcaaccaaagaaatagggcaagagaggcaggtgaacacacatgatacctcaattgacaatcttcctcccaccaagccagacacgttgtaaatgctgcttcctattggagcccagaaaaaaggaaaaggaaagtttaggctttctttgtcctttgtgtggaagcagggaattggattgaagactttcatagttgtaacataaaggcaaatcctgaggaactcactgatggagatgtgaaatggcagtaaggaagaaaacagaataactgaacaaatatattagtctagggccacttaatttagaggaagaaaaaaaatcaacccatccatagaaatagtttgataaacaggtcactaaatcattggcgtttataaagattcttagctatcaagggctgcattgtattttatatactcagttttataaggtgatactttttaaataagcgctttaatgaaaatggttagactgaaaataattttggtccttaaaaggagtcaggagcttttatatataaggtacatattttaaaagaatacctcctttataacagggttttacagacactaccataatttataatcattattttttacttttgggttcacctagatcatatgagttgatgtgatacttctagaacaaaattattcatagtgcgttttttgtaatttatgattgttaagtaagcttgacttataaattgacattgtaattgtgtacataattggatatatgtgttaaaatttaacatttagatttacttaattgtagaaaatacaaatgtaaaacttacacatggaaagaactgtatgcagttgactttactatgtaaattggagggaaacaaagttttagatccattttctttcaaaattttctttattgtaaagtatgcaaaatatatattcataccatttattaaatcagaatgtttatacaaaa

SEQ ID NO: 1234 - DNA, 2712 bp, Homo sapiens
ggcggaagcccctgcctagcgtctccccatggcccttggtacatcctccccttctccacccgcacctccgtcttccccgcaacacatatacacaaacacccggaccctaggtcccccagagcccgaaggccacgcagggggcgtccagcgacctgcactactgggtcgggaagcaggcgggtgcggaagcgcagggcgctgcggaggccttccagcagcgcctacaggacgagctggggggccagaccgtgctgcaccgcgaggcgcagggccacgagtccgactgcttctgcagctacttccgcccgggaatcatctacaggaagggaggcctagcatctgacctcaagcatgtggagaccaacttgttcaacatccagcgactgctgcacatcaaagggaggaagcacgtgtctgccactgaggtggagctctcctggaacagctttaataagggtgacatcttcctgctggacctaggcaagatgatgattcagtggaatgggcccaagaccagcatttctgagaaggctcgggggctggctttgacctacagcctccgggacagggaacgtggtggtggtcgtgcacagattggtgtggtggatgatgaggccaaagccccggacctcatgcagatcatggaggctgtgctgggccgcagggtgggcagcctgcgtgccgccacgcccagcaaggatatcaaccagctgcagaaggccaatgttcgcctgtaccatgtctatgagaagggcaaagacctggtggtcctggagttggcgacccccccactgacccaggacctgctgcaggaggaggacttctacatcctggaccagggtggcttcaagatctatgtgtggcagggacgcatgtctagcctccaggagagaaaggctgccttcagccgggctgtgggcttcatccaggccaagggctacccgacctacaccaacgtggaggtggtgaacgacggcgccgagtcggccgcgttcaagcagctcttccggacttggtctgagaagcggcgcaggaaccagaagctcggcgggagggataaatcgattcatgtaaagctggacgtgggcaagctgcacacccagcctaagttagcggcccagctcaggatggtggacgacggctctgggaaggtggaggtgtggtgcatccaggacttacacaggcagcccgtggaccccaagcgtcatggacagctgtgtgcaggcaactgctaccttgtgctctacacataccagaggctgggccgtgtccagtacatcctgtacctatggcagggccaccaggccactgcggatgagattgaggccctgaacagcaacgctgaggaactagatgtcatgtatggtggcgtcctagtacaggagcatgtgaccatgggcagcgagcccccccacttcctcgccatcttccagggccagctggtgatcttccaggagagagctgggcaccatggaaaggggcagtcagcatccaccacaaggcttttccaagtgcaaggcactgacagccacaacaccaggaccatggaggtgccagcccgtgcctcatccctcaactccagtgacatcttcttgctggtcacagccagcgtctgctacctctggtttgggaagggctgtaatggtgatcagcgtgagatggcacgggtggtggtcactgtcatttccaggaagaatgaggaaacggtgctggagggtcaggagcctccccacttctgggaggccctgggaggccgggccccctaccccagcaacaagaggctccctgaggaggtccccagcttccagccacgactgtttgagtgctccagccacatgggctgcctggtcctcgcagaagtggggttcttcagccaggaggacctggacaagtatgacatcatgttactggacacctggcaggagatcttcctgtggcttggggaagctgcaagtgagtggaaggaggcggtggcctggggccaggagtacctgaagactcacccagcagggaggagcccggccacacccatcgtgctggtcaagcagggccatgagcctcccaccttcattggatggttcttcacttgggacccctacaagtggactagccacccgtcccacaaggaagtggtggatggcagcccggcagcagcatcaaccatctctgagataacagcagaagtcaacaacttgcggctatccagatggccgggcaatggcagggcaggtgccgtggccctgcaggccctcaagggctcccaggacagctcagagaatgatctggtgcgaagccccaagtcggctggcagcagaaccagcagctccgtcagcagcaccagcgccacgatcaacgggggcctgcgccgggaacaactgatgcaccaggctgttgaggacctgccagagggcgtggaccctgcccgcagggagttctatctctcagactctgacttccaagatatctttgggaaatccaaggaggaattctacagcatggccacgtggaggcagcggcaggagaaaaagcagctgggcttcttctgaacccaagccctctcgactgcccctatcccctggaccccaacatacctacaatgctggggaggccctgcttccactcccctcagaggcttttggtcatcctctgcgtgtcagtaaaagcaggcagcccataaaaaaaaaaaaaaaaaaaaaaaaaaaaaaaaaaaaa

SEQ ID NO: 1235 - DNA, 951 bp, Homo sapiens
cccgccccgccccgcccggctgctccatggcgctgtgcgaggccgcgggctgcgggagtgccctgctctggcctcgcttgttgctcttcggggactccatcacccagttttccttccagcagggtggatggggagcatcgctggctgacaggctggtcagaaaatgtgatgttctgaatcgtggattttcaggttacaataccaggtgggccaaaattatccttccaagattaatcaggaaaggaaacagtttggacatcccagtagcagttacaattttctttggggccaatgacagtgcactaaaagatgagaatcccaagcagcacattcccctggaggagtacgctgcgaacctaaagagcatggtgcagtacctgaagtccgtggacatccctgagaatcgagtcattctcatcacgccgaccccactttgtgaaacagcctgggaagaacagtgcatcatacaaggttgcaaactaaatcgcctgaactctgttgttggtgaatatgccaatgcgtgtttacaagtggcccaagactgtgggactgacgtacttgacctgtggaccctgatgcaggacagccaggacttctcatcttatttatcagatggactacatttgtctccaaaggggaatgaatttttgttctcgcatctctggcctttgatagagaaaaaggtctcttctctacctttgctgcttccttactggcgggatgtagcagaagcaaaacctgaattaagtctgctgggagatggagaccattagccaatcacaggagacccaaatctgcttgttatctacagaactcaaagttgtcaatacgtagaggtacgcttttttcctcaggcttaaacctttgccactgatattaataataaaagtattagatgatttttcaaaaaaaaaaaaaaaaaaaaaaaaaaaaaaaaaaaaaaaaaaaaaa

SEQ ID NO: 1236 - DNA, 4757 bp, Homo sapiens
ccgggtccctccccatcccgcgacccaacggtcgttccccgccgccggccccgcccctccctggccgcccgcggcgcgccggcgcctgcgcagtcgccccagagcgccccgaccgggatggcggccgttttggagtcgctgctgcgagaagaggtgtcggtcgcagccgtcgtgcggtggatcgcgcgcagcacccagggttcggaggataacgctggggaggcggccgcgctgagctcactccgggccctgcggaaagaattcgtaccgttcctgttgaacttcctgagggagcagagcagccgcgtcctcccgcaggggcccccgacccccgccaagaccccgggcgcctcggcagccttgccagggaggccgggaggcccgccgcggggtagccgcggggcgcgcagccagcttttccctccgaccgaggcccagagcaccgctgccgaggcccctctggcccgccgcgggggcaggaggcggggcccggggccggcccgcgagcgtggaggccgcggcctggaggagggggtcagcggggagagcctgcccggagccgggggccggaggcttaggggctctggcagccccagccgccccagcctcacgctgtctgatccgccaaacctcagcaacctggaggagttccctcccgtaggctcggttccccccggccctacagggacgaagccttctcgcaggatcaacccaactccggtgagcgaagagcggtcactctccaagcccaagacctgcttcacctcacccccaatcagctgtgtccccagttcccaaccctcagccctggacactagcccttggggccttggccttcccccagggtgcagaagtctgcaagaggagcgagagatgctcaggaaggagcgctctaagcagctgcagcagtcacctacccccacctgtcccaccccagaattggggtcgcccctccccagccggacaggaagcctcacagatgaacctgcagaccctgccagagtgtcttcccgccagcgcctggagcttgtagcccttgtttactcctcgtgcattgctgagaacctggtaccaaacctcttcttggagcttttcttcgtctttcagctcctcactgcccggaggatggtgactgccaaggacagcgaccctgaactaagtccagctgtcctagattccctggaaagtccactgttccaaagcatccacgattgtgtcttctttgcagtgcaggttttggagtgtcactttcaggttctttccaacctggacaaagggaccttgaagctgctggctgagaatgagcggctgctgtgcttctcaccagctctgcaaggccgccttcgagctgcctatgagggcagtgttgccaaggtctctctggtgatgcctccctctactcaagctgtctcctttcagccagagactgacaatcgtgccaacttctccagtgaccgagcctttcatacttttaagaaacagagggatgtgttttatgaggtgctgcgagagtgggaagatcaccatgaggagcctggctgggattttgagaagggcttgggcagcagaatcagggccatgatgggtcagctctccgcagcctgcagccacagccactttgttcggcttttccaaaaacaactactccagatgtgtcagagccctggtggtgctgggggcaccgtcttgggcgaggccccagatgtgttgagtatgctgggagctgacaagctggggcggttgtggcgcctacaggaacggcttatggctcctcagagcagtggggggccctgcccaccccccaccttcccaggctgtcaaggcttctttagggacttcatccttagtgccagcagcttccagtttaaccagcatctcatggacagtctgagcttgaagatccaggagctcaatggtcttgccctgccccagcatgagcccaatgatgaagacggggagtcagacgtagactggcagggtgagcggaagcaatttgctgtggtgcttcttagcctgagacttttggctaaattcctgggctttgtggctttcctgccataccgggggcctgaacctcccccgaccggtgagcttcaggactccattctggccctcaggagccaggtccctccggtcctggatgtgcggactctgctgcagcgagggctgcaggcccgccgggcggtgctcaccgtgccctggctggtggagtttctctcctttgctgaccatgttgttcccttgctggaatattaccgggacatcttcactctcctgctgcgcctgcaccggagcttggtgttgtcgcaggagagtgaggggaagatgtgtttcctgaacaagctgctgctacttgctgtcctgggctggcttttccagattcccacagtccctgaggacttgttctttctggaagagggtccctcatatgcctttgaggtggacacagtagccccagagcatggcttggacaatgcgcctgtggtggaccagcagctgctctacacctgctgcccctacatcggagagctccggaaactgctcgcttcgtgggtgtcaggcagtagtggacggagtgggggcttcatgaggaaaatcacccccaccactaccaccagcctgggagcccagccttcccagaccagccaggggctgcaggcacagctcgcccaggcctttttccacaaccagccgccctccttgcgccggaccgtagagttcgtggcagaaagaattggatcaaactgtgtcaaacatatcaaggctacactggtggcagatctggtgcgccaggcagagtcacttctccaagagcagctggtgacacagggagaggaagggggagacccagcccagctgttggagatcttgtgttcccagctgtgccctcacggggcccaggcattggccctggggcgggagttctgtcaaaggaagagccctggggctgtgcgggcgctgcttccagaggagaccccggcagccgttctgagcagtgcagagaacattgctgtggggcttgcaacagagaaagcctgtgcttggctgtcagccaacatcacagcactgatcaggagggaggtgaaagcagcagtgagtcgcacacttcgagcccagggtcctgaacctgctgcccggggggagcggaggggctgctcccgcgcctgtgagcaccatgctcccctcccctcccacctcatctccgagataaaagacgtgctctccttggccgtggggccacgggaccctgacgagggagtctccccagagcatctggaacagctcctaggccagctgggccagacgctgcggtgccgccagttcctgtgcccacctgctgagcagcatctggcaaagtgctctgtggagttagcttccctcctcgttgcagatcaaattcctatcctagggcccccggcacagtacaggctggagagagggcaggctcgaaggcttctgcacatgctgctttccttgtggaaggaagactttcaggggccggttccgctgcagctgctgctgagcccaagaaatgtggggcttctggcagacacaaggccaagggagtgggacttgctgctattcttgctacgggagctggtggagaagggtctgatgggacggatggagatagaggcctgcctgggcagcctccaccaggcccagtggccaggggactttgctgaagaattagcaacactgtctaatctgtttctagccgagccccacctgccagaaccccagctaagagcctgtgagttggtgcagccaaaccggggcactgtgctggcccagagctagggctgagaagtggccctgccttgggcattgcaccagaaccctggacccccgcctcacgaggaggcccaagtgcccaatgcagaccctcactggttggggtgtagctgggtctacagtcagacttcctgctctaagggtgtcactgcctggcatcccaccacgcgaatcctagaggaaggagagttggcctgatttgggattatggcagaaaagtccagagatgccagtcctggagtagaagaggtggtgtttgtttatctcttggatactaaatgaaatgaggtgtgtgggcttgtcaacacagaattcaagcctcatttgctatcccagcatctcttaaaactttgtagtcttggaattcatgacagaggcaaatgactcctgcttaacttatgaagaaagttaaaacatgaatcttgggagtctacattttcttatcaccaggagctggactgccatctccttataaatgcctaacacaggccgggtctggtggctcatgcctgtaatcccagcactttgagaggcctgaggtcggcggactgcctgaggtcaggaattcaagaccagcctggccaacatggcaaaaccccatctctactaaaaataaaaaaattattagctgggcatggtggtgtgtgcctgtaatcccagctactcaggaggatgaggcaggagacctgcttgaacctggaggtggaggttgcagtgagccgaggtcgcaccactgcactccagtctgggtaacagagcgagactttctagaaaaagcctaacaaacagataaggtaggactcaaccaactgaaacctgactttccccctgtaccttcagcccctgtgcaggtagtaacctcttgagacctctccctgaccagggaccaagcacagggcatttagagctttttagaataaactggttttctttaaaaaaaaaaaaaaaaaaaaaaaaaaaaa

SEQ ID NO: 1237 - DNA, 1835 bp, Homo sapiens
ggtgaccaagatggcggcggagctggtggaggccaaaaacatggtgatgagttttcgagtctccgaccttcagatgctcctgggtttcgtgggccggagtaagagtggactgaagcacgagctcgtcaccagggccctccagctggtgcagtttgactgtagccctgagctgttcaagaagatcaaggagctgtacgagacccgctacgccaagaagaactcggagcctgccccacagccgcaccggcccctggaccccctgaccatgcactccacctacgaccgggccggcgctgtgcccaggactccgctggcaggccccaatattgactaccccgtgctctacggaaagtacttaaacggactgggacggttgcccgccaagaccctcaagccagaagtccgcctggtgaagctgccgttctttaatatgctggatgagctgctgaagcccaccgaattagtcccacagaacaacgagaagcttcaggagagcccgtgcatcttcgcattgacgccaagacaggtggagttgatccggaactccagggaactgcagcccggagttaaagccgtgcaggtcgtcctgagaatctgttactcagacaccagctgccctcaggaggaccagtacccgcccaacatcgctgtgaaggtcaaccacagctactgctccgtcccgggctactacccctccaataagcccggggtggagcccaagaggccgtgccgccccatcaacctcactcacctcatgtacctgtcctcggccaccaaccgcatcactgtcacctgggggaactacggcaagagctactcggtggccctgtacctggtgcggcagctgacctcatcggagctgctgcagaggctgaagaccattggggtaaagcacccggagctgtgcaaggcactggtcaaggagaagctgcgccttgatcctgacagcgagatcgccaccaccggtgtgcgggtgtccctcatctgtccgctggtgaagatgcggctctccgtgccctgccgggcagagacctgcgcccacctgcagtgcttcgacgccgtcttctacctgcagatgaacgagaagaagcccacctggatgtgccccgtgtgcgacaagccagccccctacgaccagctcatcatcgacgggctcctctcgaagatcctgagcgagtgtgaggacgccgacgagatcgagtacctggtggacggctcgtggtgcccgatccgcgccgaaaaggagcgcagctgcagcccgcagggcgccatcctcgtgctgggcccctcggacgccaatgggctcctgcccgcccccagcgtcaacgggagcggtgccctgggcagcacgggtggcggcggcccggtgggcagcatggagaatgggaagccgggcgccgatgtggtggacctcacgctggacagctcatcgtcctcggaggatgaggaggaggaggaagaggaggaggaagacgaggacgaagaggggccccggcccaagcgccgctgccccttccagaagggcctggtgccggcctgctgaccccggccgcacactcgactttcctggtgctcaccacgcagaggggcacgggccagcctcgggcgcagagggaggagtgacctttctttttctttttattgtcgttcgttttgtttttccacccttttgcctggctcctggcacctgtacctctggactctcctatcgggggattaaaaaaaaaagtaaaatgaaaaaaaaaaaaaaaaaaaaaaaaaaaaaaaaaaaaaaaaaaaaaaaaaaaaaaaaaaaaaaaaaaaaaaaaaaaaaaaaaaaaaaaaaaaaaaaaaaa

SEQ ID NO: 1238 - DNA, 1416 bp, Homo sapiens
ggaggggaggggcgcggccgccggacgcgccctcgcagcttccgccgggcccctccggaaatcccgtatcgtagggcgacggcggcttagaaagtgcttcctggagcgcagacgaggtcatgaatcatgtgacggtggcttgaggaggaacctgtctttaaagctgtccctgaagtgacagcggagagaaccaggcagcccagaaaccccaggcgtggagattgatcctgcgagagaagggggttcatcatggcggatgacctaaagcgattcttgtataaaaagttaccaagtgttgaagggctccatgccattgttgtgtcagatagagatggagtacctgttattaaagtggcaaatgacaatgctccagagcatgctttgcgacctggtttcttatccacttttgcccttgcaacagaccaaggaagcaaacttggactttccaaaaataaaagtatcatctgttactataacacctaccaggtggttcaatttaatcgtttacctttggtggtgagtttcatagccagcagcagtgccaatacaggactaattgtcagcctagaaaaggaacttgctccattgtttgaagaactgagacaagttgtggaagtttcttaatctgacagtggtttcagtgtgtaccttatcttcattataacaacacaatatcaatccagcaatctttagactacaataatacttttatccatgtgctcaagaaagggcccctttttccaacttatactaaagagctagcatatagatgtaatttatagatagatcagttgctatattttctggtgtagggtctttcttatttagtgagatctagggataccacagaaatggttcagtctatcacagctcccatggagttagtctggtcaccagatatggatgagagattctattcagtggatcagaatcaaactggtacattgatccacttgagccgttaagtgctgccaattgtacaatatgcccaggcttgcagaataaagccaactttttattgtgaataataataaggacatatttttcttcagattatgttttatttctttgcattgagtgaggaacataaaatggcttggtaaaagtaataaaatcagtacaatcactaactttcctttgtacatattattttgcagtatagatgaatattactaatcagtttgattattctcagagggtgctgctctttaatgaaaatgaaaattatagctaatgttttttcctcaaactctgctttctgtaaccaatcagtgttttaatgtttgtgtgttcttcataaaatttaaatacaattcgttattctgtttccaatgttagtatgtatgtaaacatgatagtacagccatttttttcatatgtgagtaaaaataaaatagtatttttaaaaataaaaaa

SEQ ID NO: 1239 - DNA, 540 bp, Homo sapiens
gtccgcgtcgctagctagtcgttctgaagcggcggccagagaagagtcaagggcacgagcatcgggtagccatgcctttcttggacatccagaaaaggttcggccttaacatagatcgatggttgacaatccagagtggtgaacagccctacaagatggctggtcgatgccatgcttttgaaaaagaatggatagaatgtgcacatggaatcggttatactcgggcagagaaagagtgcaagatagaatatgatgatttcgtagagtgtttgcttcggcagaaaacgatgagacgtgcaggtaccatcaggaagcagcgggataagctgataaaggaaggaaagtacacccctccacctcaccacattggcaagggggagcctcggccctgaacagagcagctgctgatgtctggaggctgattttcctgttctctgttctccactggaaaggttgtttacgacaaacctccttgtcaaagtgtgtaaaaataaaggattgctccatcctaaaaaaaaaaaaaaaaaaaaaaaaaaaaaa

SEQ ID NO: 1240 - DNA, 6799 bp, Homo sapiens
gatggcttcccctctgagggacgaggaggaggaggaggaggagatggtggtgtcggaggaggaagaagaggaggaagaagagggcgacgaggaggaggaggaggaggtggaggcggccgacgaggacgatgaggaggacgacgacgagggagtactcgggcgcgggccgggccacgaccggggccgcgaccgccacagcccccccggctgccacctcttcccgccgccgccgccgccgccgccaccgctgcccccgccgccgccgcccccgccgccagataaggatgacattcggctgctgccgtcagcattgggtgtgaagaagagaaaacgaggacccaagaagcagaaggagaacaagccaggaaaaccccgaaaacgcaagaagcgtgacagtgaggaggaatttggttctgagcgagatgagtaccgggagaagtcagagagtgggggcagtgaatatggaaccggaccgggtcggaaacgaagaaggaagcaccgagaaaaaaaggagaagaagacaaagcggcggaaaaagggggagggagatggggggcaaaagcaagtggaacagaagtcatcagcaactctgcttctgacctggggcctggaggatgtggagcatgtgttctctgaggaggattaccacacgctcaccaactacaaagccttcagccagttcatgaggcccctaattgctaagaagaatcctaagatcccaatgtctaagatgatgaccatccttggggccaaatggagagagttcagtgccaacaaccccttcaaggggtcagcagctgctgtggcggcggcagcggcagcagcagcagcagctgtagctgagcaggtgtcagctgctgtctcgtcggccacccccatagcaccctccggaccccccgcccttccaccaccccctgctgctgatatccagcccccacccatccgaagagccaaaaccaaagagggcaaaggtccaggccataagaggcggagtaagagcccccgagtgcctgatggacgcaagaagcttcggggaaagaaaatggcaccactcaaaataaaactagggcttctgggtggcaagaggaagaaaggaggctcgtatgtttttcagagcgacgaaggtcctgaaccagaggctgaggaatcagacctggacagtggcagtgtccacagtgcctcaggccggcctgatggccctgtccgcaccaagaaactaaagagaggccggccaggaaggaagaagaagaaggtcctgggctgtcctgcagtggccggggaggaggaggttgatggctacgagacggatcaccaggattactgtgaggtgtgccagcagggtggggaaattattctgtgtgacacctgccctcgtgcctaccacctcgtctgccttgatcctgagcttgaccgggctccagagggcaaatggagctgccctcactgtgagaaggagggggtccagtgggaggccaaggaggaagaagaagaatacgaagaggagggagaggaagaaggggagaaggaggaggaggatgatcacatggagtactgccgcgtatgcaaggacggcggggagctcctgtgctgtgacgcgtgcatctcctcctaccacattcattgtctaaaccctcccctgcctgacattcccaatggtgaatggctgtgtccccgatgcacatgccccgtgctgaagggtcgagtgcagaagatcctacattggcggtggggggagccacctgtagcagtgccagcccctcaacaggcagatggaaatccagatgtcccacccccccgtcctcttcaaggcagatcagagcgagagttctttgtcaagtgggtaggactatcctactggcactgctcctgggccaaggagcttcagctggaaatcttccatttggttatgtatcgaaactaccagcggaagaatgacatggatgagcccccacccctggactatggctccggcgaggatgatgggaagagcgacaagcgtaaagtgaaagacccgcactatgctgagatggaggagaagtactatcgttttggcatcaagccagagtggatgaccgtccaccgcatcatcaaccacagtgtggataaaaaggggaattaccactatctagtaaaatggagggacttaccatatgaccagtccacgtgggaggaagatgaaatgaatatccctgaatacgaagaacataagcaaagctactggagacaccgagaactaattatgggggaagaccctgcccagccccgcaagtataagaagaagaagaaggagctacagggtgatgggcctcccagttctcccactaatgatcctaccgtgaaatatgagactcagccacggtttatcacagccactggaggcaccctgcacatgtatcagttggaagggctgaactggctacgcttctcctgggcccagggcactgacaccattctagctgatgagatggggctaggcaagaccatacaaaccatcgtcttcctctactcactctacaaggagggccacacaaaaggtcccttcctggtgagtgccccactctctaccatcattaactgggagcgggagttccagatgtgggcacccaaattctatgtggtgacatacacgggtgacaaggacagccgggccatcattcgtgagaatgaattctcctttgaggacaatgccatcaaagggggcaagaaagcttttaagatgaagagggaggcacaggtgaagttccatgttctcctgacatcgtatgagctgatcaccattgatcaggcagcacttggttccatccgctgggcctgtcttgtggtagatgaggcccatcgactcaagaacaaccagtccaagtttttcagggttctcaatggttacaagatagatcataagttgctgctgacaggaaccccattgcagaataatctggaggagctcttccatctcctgaacttcctcaccccagagagatttaacaacttggagggcttcctggaggagtttgctgacatatccaaagaggaccagatcaagaaactgcatgatttgctggggccacacatgctgcggagactcaaggcagatgtctttaagaacatgccagccaagacagagctcatcgttcgggtggagctaagccccatgcagaagaaatactacaaatacatcctgactcgaaattttgaggccttgaattcacgaggtggtgggaaccaggtgtcgctgcttaatatcatgatggatcttaagaagtgctgcaaccatccatacctttttcccgtggctgctatggagtcccccaaactccccagtggggcttatgagggtggggcacttattaagtcgtctgggaagctcatgctgctccagaagatgctgcgaaagctgaaggagcaaggacaccgagtgctcatcttctcgcagatgaccaaaatgttagacttgcttgaggacttcttagactatgaaggctacaagtatgagcgcatcgatggtggtatcacgggtgccctgaggcaggaggccatcgatcggtttaatgctcctggggcccaacaattctgcttcctcctgtccacccgagctgggggcctgggcatcaatctggccactgctgacactgtcatcatctttgattctgactggaacccccataatgacatccaggcctttagccgggctcatcggattggccaggccaacaaagtgatgatttaccggtttgtgactcgcgcgtcagtggaagagcgaatcacacaagtggccaagagaaagatgatgctgacacacctggttgtgcggcctgggctgggctccaaggcaggctccatgtccaagcaggagcttgacgacattctcaaatttggcactgaagagctattcaaggatgaaaacgagggggagaacaaggaggaggacagcagtgtgattcattatgacaatgaggccatcgctcggctgttggaccggaaccaggatgcaactgaggacactgacgtgcagaacatgaatgagtatctcagctccttcaaggtggcacagtacgtcgtgcgggaagaagacaagattgaggaaattgagcgagagatcatcaagcaggaggagaatgtggaccctgactactgggagaagctgctgaggcatcactatgagcaacagcaggaagacctagcccggaatctaggcaagggcaagcgggttcgcaagcaagttaactacaatgatgctgctcaggaagaccaagacaaccagtcagagtactcggtgggttcagaggaggaggatgaagacttcgatgaacgtcctgaagggcgtagacagtcaaagaggcagctccggaatgagaaagataagccactgcctccactgctggcccgagtcgggggcaacattgaggtgctgggcttcaacacccgtcagcggaaggctttcctcaatgctgtgatgcgctgggggatgccaccacaggatgccttcaccacacagtggctggtgcgggacctgaggggcaagactgagaaggagtttaaggcctatgtgtctttgttcatgcgccatctgtgtgagcctggggcagacggctctgaaacctttgccgatggggtccctcgggagggactgagtcgccagcaggtgttgacccgcattggagtcatgtctctcgtcaaaaagaaggtgcaggagtttgagcacatcaatgggcgttggtcaatgccggaactgatgcctgaccccagcgccgattctaagcgctcctccagagcctcctctcctaccaaaacgtctcccaccactcctgaggcttctgctaccaacagtccctgcacctctaaacctgctactccagctccaagtgagaaaggagaaggcataaggacacctcttgagaaggaggaagctgaaaaccaggaggaaaagccagagaagaacagcagaattggggagaagatggagacagaggctgatgcccccagcccagccccatcacttggggagcggctggagccaaggaagattcctctagaggatgaggtgccaggggtgcctggagagatggagcctgaacctgggtaccgtggggacagagagaagtcagccacagagtcgacgccaggagaaaggggggaggagaagccgttggatggacaggaacacagggagaggccggagggggaaacaggggatttgggcaagagagaagatgtaaaaggtgaccgggagcttcgaccagggcctcgagatgagccacggtccaatgggcgacgagaggaaaagacagagaagccccggttcatgttcaatatcgccgatggtggcttcacagagcttcacacactgtggcagaatgaggaacgggcagctatttcctcggggaaactcaatgagatctggcacagaagacatgactattggcttctggctgggattgtcctccatggctatgcacggtggcaggacatccagaatgatgctcaatttgccattatcaacgagccatttaaaactgaagccaataaggggaactttctggagatgaaaaataagttcctggcccggaggttcaagctcctggagcaggcgctggtgattgaggagcagctgcggcgggcggcctacctgaacctgtcgcaggagccggcgcaccccgccatggccctccacgcccgcttcgccgaggccgagtgcctggccgagagccaccagcacctctccaaggagtcgctggcggggaacaagccggccaacgccgtcctgcacaaggttctgaaccagctggaggagttgctgagcgacatgaaggcggacgtgacccgcctgccagccacgctgtcccgaataccccccatcgcagcccgccttcagatgtccgagcgcagcatcctcagccggctggccagcaagggcacggagcctcaccccacaccggcctacccgccgggtccctacgctacacctccggggtacggggcggccttcagcgccgcacccgtaggggccctggccgccgcaggcgccaattacagccagatgcctgcagggtccttcatcacagccgccaccaacggccctccagtgcttgtgaagaaggagaaggaaatggtgggggcattggtgtcagacgggctggatcggaaggagccccgagccggggaggtgatctgtatagacgactgactggatcccaggcctgcccttcacccaggccccgtccccgaggccgacccccagctcaagcgctggggcctgctgccagccctccaccttccccaccccttgggccatcactgggctaggaacccctttgcccctctctgcagctcctctcttcaagaagggccctttgtctttctccactcccacacacctttcccaccaagccttgaagactgtgctggtgagaagaagtctgggtgggagatggctggcagggtcttccaagtaccttcctcccacactgccaagtatacacaacttcccagtaaatggttgtggggaggaaagaggtggagcctccccagccgtttccctgcagaatcagctctgtctcatgtggaagtggagaatcagccttgcctggcctttaggaacttttgtggggaagagagctttgaagagaggagggggactttagagagggatgaaaatgagccctgggagggaggaagggacgaggaggggtggctgcatgttaccgtcccctacctctccccacgtggagggtggagcagttatgagggaggaagtcaactgctgttcagcctcagaataaaggtgccgttcactggctcagtt

SEQ ID NO: 1241 - DNA, 6831 bp, Homo sapiens
atctttgtttgggtctcccatactgcgtatagatgaatgggtcaggatatctggaacaaaatatggaggtgaagggtgagatcgggaaacaaagggtatggccccctagttcccaaagggagcagggagatgggaatagaattgaaggtaggttttaggctacttgggaggaggaatatttaggtaattgtggagactttctcctgtgtgatgaaggcggcagacactgtgatcctgtgggcaagaagtaaaaatgaccagctgaggatttcttttcctccaggactgtgttggggtgacaggatgcctgataaggatgacattcggctgctgccgtcagcattgggtgtgaagaagagaaaacgaggacccaagaagcagaaggagaacaagccaggaaaaccccgaaaacgcaagaagcgtgacagtgaggaggaatttggttctgagcgagatgagtaccgggagaagtcagagagtgggggcagtgaatatggaaccggaccgggtcggaaacgaagaaggaagcaccgagaaaaaaaggagaagaagacaaagcggcggaaaaagggggagggagatggggggcaaaagcaagtggaacagaagtcatcagcaactctgcttctgacctggggcctggaggatgtggagcatgtgttctctgaggaggattaccacacgctcaccaactacaaagccttcagccagttcatgaggcccctaattgctaagaagaatcctaagatcccaatgtctaagatgatgaccatccttggggccaaatggagagagttcagtgccaacaaccccttcaaggggtcagcagctgctgtggcggcggcagcggcagcagcagcagcagctgtagctgagcaggtgtcagctgctgtctcgtcggccacccccatagcaccctccggaccccccgcccttccaccaccccctgctgctgatatccagcccccacccatccgaagagccaaaaccaaagagggcaaaggtccaggccataagaggcggagtaagagcccccgagtgcctgatggacgcaagaagcttcggggaaagaaaatggcaccactcaaaataaaactagggcttctgggtggcaagaggaagaaaggaggctcgtatgtttttcagagcgacgaaggtcctgaaccagaggctgaggaatcagacctggacagtggcagtgtccacagtgcctcaggccggcctgatggccctgtccgcaccaagaaactaaagagaggccggccaggaaggaagaagaagaaggtcctgggctgtcctgcagtggccggggaggaggaggttgatggctacgagacggatcaccaggattactgtgaggtgtgccagcagggtggggaaattattctgtgtgacacctgccctcgtgcctaccacctcgtctgccttgatcctgagcttgaccgggctccagagggcaaatggagctgccctcactgtgagaaggagggggtccagtgggaggccaaggaggaagaagaagaatacgaagaggagggagaggaagaaggggagaaggaggaggaggatgatcacatggagtactgccgcgtatgcaaggacggcggggagctcctgtgctgtgacgcgtgcatctcctcctaccacattcattgtctaaaccctcccctgcctgacattcccaatggtgaatggctgtgtccccgatgcacatgccccgtgctgaagggtcgagtgcagaagatcctacattggcggtggggggagccacctgtagcagtgccagcccctcaacaggcagatggaaatccagatgtcccacccccccgtcctcttcaaggcagatcagagcgagagttctttgtcaagtgggtaggactatcctactggcactgctcctgggccaaggagcttcagctggaaatcttccatttggttatgtatcgaaactaccagcggaagaatgacatggatgagcccccacccctggactatggctccggcgaggatgatgggaagagcgacaagcgtaaagtgaaagacccgcactatgctgagatggaggagaagtactatcgttttggcatcaagccagagtggatgaccgtccaccgcatcatcaaccacagtgtggataaaaaggggaattaccactatctagtaaaatggagggacttaccatatgaccagtccacgtgggaggaagatgaaatgaatatccctgaatacgaagaacataagcaaagctactggagacaccgagaactaattatgggggaagaccctgcccagccccgcaagtataagaagaagaagaaggagctacagggtgatgggcctcccagttctcccactaatgatcctaccgtgaaatatgagactcagccacggtttatcacagccactggaggcaccctgcacatgtatcagttggaagggctgaactggctacgcttctcctgggcccagggcactgacaccattctagctgatgagatggggctaggcaagaccatacaaaccatcgtcttcctctactcactctacaaggagggccacacaaaaggtcccttcctggtgagtgccccactctctaccatcattaactgggagcgggagttccagatgtgggcacccaaattctatgtggtgacatacacgggtgacaaggacagccgggccatcattcgtgagaatgaattctcctttgaggacaatgccatcaaagggggcaagaaagcttttaagatgaagagggaggcacaggtgaagttccatgttctcctgacatcgtatgagctgatcaccattgatcaggcagcacttggttccatccgctgggcctgtcttgtggtagatgaggcccatcgactcaagaacaaccagtccaagtttttcagggttctcaatggttacaagatagatcataagttgctgctgacaggaaccccattgcagaataatctggaggagctcttccatctcctgaacttcctcaccccagagagatttaacaacttggagggcttcctggaggagtttgctgacatatccaaagaggaccagatcaagaaactgcatgatttgctggggccacacatgctgcggagactcaaggcagatgtctttaagaacatgccagccaagacagagctcatcgttcgggtggagctaagccccatgcagaagaaatactacaaatacatcctgactcgaaattttgaggccttgaattcacgaggtggtgggaaccaggtgtcgctgcttaatatcatgatggatcttaagaagtgctgcaaccatccatacctttttcccgtggctgctatggagtcccccaaactccccagtggggcttatgagggtggggcacttattaagtcgtctgggaagctcatgctgctccagaagatgctgcgaaagctgaaggagcaaggacaccgagtgctcatcttctcgcagatgaccaaaatgttagacttgcttgaggacttcttagactatgaaggctacaagtatgagcgcatcgatggtggtatcacgggtgccctgaggcaggaggccatcgatcggtttaatgctcctggggcccaacaattctgcttcctcctgtccacccgagctgggggcctgggcatcaatctggccactgctgacactgtcatcatctttgattctgactggaacccccataatgacatccaggcctttagccgggctcatcggattggccaggccaacaaagtgatgatttaccggtttgtgactcgcgcgtcagtggaagagcgaatcacacaagtggccaagagaaagatgatgctgacacacctggttgtgcggcctgggctgggctccaaggcaggctccatgtccaagcaggagcttgacgacattctcaaatttggcactgaagagctattcaaggatgaaaacgagggggagaacaaggaggaggacagcagtgtgattcattatgacaatgaggccatcgctcggctgttggaccggaaccaggatgcaactgaggacactgacgtgcagaacatgaatgagtatctcagctccttcaaggtggcacagtacgtcgtgcgggaagaagacaagattgaggaaattgagcgagagatcatcaagcaggaggagaatgtggaccctgactactgggagaagctgctgaggcatcactatgagcaacagcaggaagacctagcccggaatctaggcaagggcaagcgggttcgcaagcaagttaactacaatgatgctgctcaggaagaccaagacaaccagtcagagtactcggtgggttcagaggaggaggatgaagacttcgatgaacgtcctgaagggcgtagacagtcaaagaggcagctccggaatgagaaagataagccactgcctccactgctggcccgagtcgggggcaacattgaggtgctgggcttcaacacccgtcagcggaaggctttcctcaatgctgtgatgcgctgggggatgccaccacaggatgccttcaccacacagtggctggtgcgggacctgaggggcaagactgagaaggagtttaaggcctatgtgtctttgttcatgcgccatctgtgtgagcctggggcagacggctctgaaacctttgccgatggggtccctcgggagggactgagtcgccagcaggtgttgacccgcattggagtcatgtctctcgtcaaaaagaaggtgcaggagtttgagcacatcaatgggcgttggtcaatgccggaactgatgcctgaccccagcgccgattctaagcgctcctccagagcctcctctcctaccaaaacgtctcccaccactcctgaggcttctgctaccaacagtccctgcacctctaaacctgctactccagctccaagtgagaaaggagaaggcataaggacacctcttgagaaggaggaagctgaaaaccaggaggaaaagccagagaagaacagcagaattggggagaagatggagacagaggctgatgcccccagcccagccccatcacttggggagcggctggagccaaggaagattcctctagaggatgaggtgccaggggtgcctggagagatggagcctgaacctgggtaccgtggggacagagagaagtcagccacagagtcgacgccaggagaaaggggggaggagaagccgttggatggacaggaacacagggagaggccggagggggaaacaggggatttgggcaagagagaagatgtaaaaggtgaccgggagcttcgaccagggcctcgagatgagccacggtccaatgggcgacgagaggaaaagacagagaagccccggttcatgttcaatatcgccgatggtggcttcacagagcttcacacactgtggcagaatgaggaacgggcagctatttcctcggggaaactcaatgagatctggcacagaagacatgactattggcttctggctgggattgtcctccatggctatgcacggtggcaggacatccagaatgatgctcaatttgccattatcaacgagccatttaaaactgaagccaataaggggaactttctggagatgaaaaataagttcctggcccggaggttcaagctcctggagcaggcgctggtgattgaggagcagctgcggcgggcggcctacctgaacctgtcgcaggagccggcgcaccccgccatggccctccacgcccgcttcgccgaggccgagtgcctggccgagagccaccagcacctctccaaggagtcgctggcggggaacaagccggccaacgccgtcctgcacaaggttctgaaccagctggaggagttgctgagcgacatgaaggcggacgtgacccgcctgccagccacgctgtcccgaataccccccatcgcagcccgccttcagatgtccgagcgcagcatcctcagccggctggccagcaagggcacggagcctcaccccacaccggcctacccgccgggtccctacgctacacctccggggtacggggcggccttcagcgccgcacccgtaggggccctggccgccgcaggcgccaattacagccagatgcctgcagggtccttcatcacagccgccaccaacggccctccagtgcttgtgaagaaggagaaggaaatggtgggggcattggtgtcagacgggctggatcggaaggagccccgagccggggaggtgatctgtatagacgactgactggatcccaggcctgcccttcacccaggccccgtccccgaggccgacccccagctcaagcgctggggcctgctgccagccctccaccttccccaccccttgggccatcactgggctaggaacccctttgcccctctctgcagctcctctcttcaagaagggccctttgtctttctccactcccacacacctttcccaccaagccttgaagactgtgctggtgagaagaagtctgggtgggagatggctggcagggtcttccaagtaccttcctcccacactgccaagtatacacaacttcccagtaaatggttgtggggaggaaagaggtggagcctccccagccgtttccctgcagaatcagctctgtctcatgtggaagtggagaatcagccttgcctggcctttaggaacttttgtggggaagagagctttgaagagaggagggggactttagagagggatgaaaatgagccctgggagggaggaagggacgaggaggggtggctgcatgttaccgtcccctacctctccccacgtggagggtggagcagttatgagggaggaagtcaactgctgttcagcctcagaataaaggtgccgttcactggctcagtt

SEQ ID NO: 1242 - DNA, 6729 bp, Homo sapiens
atctttgtttgggtctcccatactgcgtatagatgaatgggtcaggatatctggaacaaaatatggaggtgaagggtgagatcgggaaacaaagggtatggccccctagttcccaaagggagcagggagatgggaatagaattgaaggtaggttttaggctacttgggaggaggaatatttaggtaattgtggagactttctcctgtgtgatgaaggcggcagacactgtgatcctgtgggcaagaagtaaaaatgaccagctgaggatttcttttcctccaggactgtgttggggtgacaggatgcctgataaggatgacattcggctgctgccgtcagcattgggtgtgaagaagagaaaacgaggacccaagaagcagaaggagaacaagccaggaaaaccccgaaaacgcaagaagcgtgacagtgaggaggaatttggttctgagcgagatgagtaccgggagaagtcagagagtgggggcagtgaatatggaaccggaccgggtcggaaacgaagaaggaagcaccgagaaaaaaaggagaagaagacaaagcggcggaaaaagggggagggagatggggggcaaaagcaagtggaacagaagtcatcagcaactctgcttctgacctggggcctggaggatgtggagcatgtgttctctgaggaggattaccacacgctcaccaactacaaagccttcagccagttcatgaggcccctaattgctaagaagaatcctaagatcccaatgtctaagatgatgaccatccttggggccaaatggagagagttcagtgccaacaaccccttcaaggggtcagcagctgctgtggcggcggcagcggcagcagcagcagcagctgtagctgagcaggtgtcagctgctgtctcgtcggccacccccatagcaccctccggaccccccgcccttccaccaccccctgctgctgatatccagcccccacccatccgaagagccaaaaccaaagagggcaaaggtccaggccataagaggcggagtaagagcccccgagtgcctgatggacgcaagaagcttcggggaaagaaaatggcaccactcaaaataaaactagggcttctgggtggcaagaggaagaaaggaggctcgtatgtttttcagagcgacgaaggtcctgaaccagaggctgaggaatcagacctggacagtggcagtgtccacagtgcctcaggccggcctgatggccctgtccgcaccaagaaactaaagagaggccggccaggaaggaagaagaagaaggtcctgggctgtcctgcagtggccggggaggaggaggttgatggctacgagacggatcaccaggattactgtgaggtgtgccagcagggtggggaaattattctgtgtgacacctgccctcgtgcctaccacctcgtctgccttgatcctgagcttgaccgggctccagagggcaaatggagctgccctcactgtgagaaggagggggtccagtgggaggccaaggaggaagaagaagaatacgaagaggagggagaggaagaaggggagaaggaggaggaggatgatcacatggagtactgccgcgtatgcaaggacggcggggagctcctgtgctgtgacgcgtgcatctcctcctaccacattcattgtctaaaccctcccctgcctgacattcccaatggtgaatggctgtgtccccgatgcacatgccccgtgctgaagggtcgagtgcagaagatcctacattggcggtggggggagccacctgtagcagtgccagcccctcaacaggcagatggaaatccagatgtcccacccccccgtcctcttcaaggcagatcagagcgagagttctttgtcaagtgggtaggactatcctactggcactgctcctgggccaaggagcttcagctggaaatcttccatttggttatgtatcgaaactaccagcggaagaatgacatggatgagcccccacccctggactatggctccggcgaggatgatgggaagagcgacaagcgtaaagtgaaagacccgcactatgctgagatggaggagaagtactatcgttttggcatcaagccagagtggatgaccgtccaccgcatcatcaaccacagtgtggataaaaaggggaattaccactatctagtaaaatggagggacttaccatatgaccagtccacgtgggaggaagatgaaatgaatatccctgaatacgaagaacataagcaaagctactggagacaccgagaactaattatgggggaagaccctgcccagccccgcaagtataagaagaagaagaaggagctacagggtgatgggcctcccagttctcccactaatgatcctaccgtgaaatatgagactcagccacggtttatcacagccactggaggcaccctgcacatgtatcagttggaagggctgaactggctacgcttctcctgggcccagggcactgacaccattctagctgatgagatggggctaggcaagaccatacaaaccatcgtcttcctctactcactctacaaggagggccacacaaaaggtcccttcctggtgagtgccccactctctaccatcattaactgggagcgggagttccagatgtgggcacccaaattctatgtggtgacatacacgggtgacaaggacagccgggccatcattcgtgagaatgaattctcctttgaggacaatgccatcaaagggggcaagaaagcttttaagatgaagagggaggcacaggtgaagttccatgttctcctgacatcgtatgagctgatcaccattgatcaggcagcacttggttccatccgctgggcctgtcttgtggtagatgaggcccatcgactcaagaacaaccagtccaagtttttcagggttctcaatggttacaagatagatcataagttgctgctgacaggaaccccattgcagaataatctggaggagctcttccatctcctgaacttcctcaccccagagagatttaacaacttggagggcttcctggaggagtttgctgacatatccaaagaggaccagatcaagaaactgcatgatttgctggggccacacatgctgcggagactcaaggcagatgtctttaagaacatgccagccaagacagagctcatcgttcgggtggagctaagccccatgcagaagaaatactacaaatacatcctgactcgaaattttgaggccttgaattcacgaggtggtgggaaccaggtgtcgctgcttaatatcatgatggatcttaagaagtgctgcaaccatccatacctttttcccgtggctgctatggagtcccccaaactccccagtggggcttatgagggtggggcacttattaagtcgtctgggaagctcatgctgctccagaagatgctgcgaaagctgaaggagcaaggacaccgagtgctcatcttctcgcagatgaccaaaatgttagacttgcttgaggacttcttagactatgaaggctacaagtatgagcgcatcgatggtggtatcacgggtgccctgaggcaggaggccatcgatcggtttaatgctcctggggcccaacaattctgcttcctcctgtccacccgagctgggggcctgggcatcaatctggccactgctgacactgtcatcatctttgattctgactggaacccccataatgacatccaggcctttagccgggctcatcggattggccaggccaacaaagtgatgatttaccggtttgtgactcgcgcgtcagtggaagagcgaatcacacaagtggccaagagaaagatgatgctgacacacctggttgtgcggcctgggctgggctccaaggcaggctccatgtccaagcaggagcttgacgacattctcaaatttggcactgaagagctattcaaggatgaaaacgagggggagaacaaggaggaggacagcagtgtgattcattatgacaatgaggccatcgctcggctgttggaccggaaccaggatgcaactgaggacactgacgtgcagaacatgaatgagtatctcagctccttcaaggtggcacagtacgtcgtgcgggaagaagacaagattgaggaaattgagcgagagatcatcaagcaggaggagaatgtggaccctgactactgggagaagctgctgaggcatcactatgagcaacagcaggaagacctagcccggaatctaggcaagggcaagcgggttcgcaagcaagttaactacaatgatgctgctcaggaagaccaagacaaccagtcagagtactcggtgggttcagaggaggaggatgaagacttcgatgaacgtcctgaagggcgtagacagtcaaagaggcagctccggaatgagaaagataagccactgcctccactgctggcccgagtcgggggcaacattgaggtgctgggcttcaacacccgtcagcggaaggctttcctcaatgctgtgatgcgctgggggatgccaccacaggatgccttcaccacacagtggctggtgcgggacctgaggggcaagactgagaaggagtttaaggcctatgtgtctttgttcatgcgccatctgtgtgagcctggggcagacggctctgaaacctttgccgatggggtccctcgggagggactgagtcgccagcaggtgttgacccgcattggagtcatgtctctcgtcaaaaagaaggtgcaggagtttgagcacatcaatgggcgttggtcaatgccggaactgatgcctgaccccagcgccgattctaagcgctcctccagagcctcctctcctaccaaaacgtctcccaccactcctgaggcttctgctaccaacagtccctgcacctctaaacctgctactccagctccaagtgagaaaggagaaggcataaggacacctcttgagaaggaggaagctgaaaaccaggaggaaaagccagagaagaacagcagaattggggagaagatggagacagaggctgatgcccccagcccagccccatcacttggggagcggctggagccaaggaagattcctctagaggatgaggtgccaggggtgcctggagagatggagcctgaacctgggtaccgtggggacagagagaagtcagaagatgtaaaaggtgaccgggagcttcgaccagggcctcgagatgagccacggtccaatgggcgacgagaggaaaagacagagaagccccggttcatgttcaatatcgccgatggtggcttcacagagcttcacacactgtggcagaatgaggaacgggcagctatttcctcggggaaactcaatgagatctggcacagaagacatgactattggcttctggctgggattgtcctccatggctatgcacggtggcaggacatccagaatgatgctcaatttgccattatcaacgagccatttaaaactgaagccaataaggggaactttctggagatgaaaaataagttcctggcccggaggttcaagctcctggagcaggcgctggtgattgaggagcagctgcggcgggcggcctacctgaacctgtcgcaggagccggcgcaccccgccatggccctccacgcccgcttcgccgaggccgagtgcctggccgagagccaccagcacctctccaaggagtcgctggcggggaacaagccggccaacgccgtcctgcacaaggttctgaaccagctggaggagttgctgagcgacatgaaggcggacgtgacccgcctgccagccacgctgtcccgaataccccccatcgcagcccgccttcagatgtccgagcgcagcatcctcagccggctggccagcaagggcacggagcctcaccccacaccggcctacccgccgggtccctacgctacacctccggggtacggggcggccttcagcgccgcacccgtaggggccctggccgccgcaggcgccaattacagccagatgcctgcagggtccttcatcacagccgccaccaacggccctccagtgcttgtgaagaaggagaaggaaatggtgggggcattggtgtcagacgggctggatcggaaggagccccgagccggggaggtgatctgtatagacgactgactggatcccaggcctgcccttcacccaggccccgtccccgaggccgacccccagctcaagcgctggggcctgctgccagccctccaccttccccaccccttgggccatcactgggctaggaacccctttgcccctctctgcagctcctctcttcaagaagggccctttgtctttctccactcccacacacctttcccaccaagccttgaagactgtgctggtgagaagaagtctgggtgggagatggctggcagggtcttccaagtaccttcctcccacactgccaagtatacacaacttcccagtaaatggttgtggggaggaaagaggtggagcctccccagccgtttccctgcagaatcagctctgtctcatgtggaagtggagaatcagccttgcctggcctttaggaacttttgtggggaagagagctttgaagagaggagggggactttagagagggatgaaaatgagccctgggagggaggaagggacgaggaggggtggctgcatgttaccgtcccctacctctccccacgtggagggtggagcagttatgagggaggaagtcaactgctgttcagcctcagaataaaggtgccgttcactggctcagtt

SEQ ID NO: 1243 - DNA, 2862 bp, Homo sapiens
cggcggcggcggccggagcgggccatggacgcgctcaagtcggcggggcgggcgctgatccggagccccagcttggccaagcagagctgggggggcggtggccggcaccgcaagctgcctgagaactggacagacacgcgggagacgctgctggaggggatgctgttcagcctcaagtacctgggcatgacgctagtggagcagcccaagggtgaggagctgtcggccgccgccatcaagaggatcgtggctacagctaaggccagtgggaagaagctgcagaaggtgactctgaaggtgtcgccacggggaattatcctgacagacaacctcaccaaccagctcattgagaacgtgtccatatacaggatctcctattgcacagcagacaagatgcacgacaaggtgtttgcatacatcgcccagagccagcacaaccagagcctcgagtgccacgccttcctctgcaccaagcggaagatggcacaggctgttaccctcaccgtagcccaggccttcaaagtcgcctttgagttttggcaggtgtccaaggaagagaaagagaagagggacaaagccagccaagagggaggggacgtcctgggggcccgccaagactgcaccccccccttgaagagcttggtcgccactgggaacctgctggacttagaggagacggctaaggccccgctgtccacggtcagcgccaacaccaccaacatggacgaggtgccgcggccacaagccttgagtggcagcagtgttgtctgggagctggatgatggcctggatgaagcgttttcgaggcttgcccagtctcggacaaaccctcaggtcctggacactggcctgacagcccaggacatgcattacgcccagtgcctctcgcctgtcgactgggacaagcctgacagcagcggcacagagcaggatgacctcttcagcttctgagggcccggggccagccggacacaagcggccctgacacgtgatggaccaaagccacctgctgcgggggagccagttctggggcccgcctgccacctctcccagccctcagcattgtcagcctgaagatcagagctgcagccagtcaggcaggggagagatttttcttttaagccctgctctttctctgagaaccaaaagatgccttgaatatttattcagtgacttctggcttatgctcagaagccagtctgcgtcaggcacgtctcctgctgcgtgacatgtgcagtgctgtaatcggctcccgcttgctctcctggagcaagctctgccctggctgtgggtatcaggactgtgaccaaagcatttctagtcccttctctctttctaaggacccaaatttccctgggggcatcctgcttcctgaaagctgttggatttcagtgatttttccccccaccccccagcacaggagagcacccacagccgcagaaggggaatgtgtcctcctgctctgcttcctcagggcccagcaggcgggggtttgagccctggaccccaggctcttagagactaaggggcagctcctgaccaaagacgatacagcttggcactttaaagcattaacagcaggtgtgaccctgagggctcctccatggtgctgcattgagtccagctttccttctgcccttcctccaggagaaggggcccaaggtccccgtggatggtctccacctgtgcttggaaccagtgtaactggctgctccctgctcccagggactgacacggggatcatctctgtgaccgccctccgtcgggcccctgcctgccttctcccctccacgcaaggctgtgctcttcctctggtttctgtgtgtccgtttgagtgtctgcgccccgcctccccatacttcctgggatgatgtgtgaaacctgacacctagatttatttggaaatattctatgaccactttacagatgaggaaactgaggcctcaagcgtggaggggtagagtgaagagtagaacccaggtctgatgccaaagctgctttcttctctgcctcctcctcacgcaactcacacctccttttcttctagctttgttgtcctcccaggaaccaaaaaaccccagctattttctgaccaaaatgtgtttcataacaaaccatctggtgcctttccacacagaactggcaggagcctcgtgtcctgctagctgtctctcttgttgatttccgtgaaaatgcaagtgtttgaagtctgctcattccgagggtgaaacaaaatccaaccctgtcagaatcatgctgttctctttgctgacactgtgaccctgggtcgggacagaccagcagcaatctgtctttagaatcgctttccttcctccccttttgcccccgtggggctcccggcatcctgaaagccagcaaagcctccagcatcttttccatcctgaggtgcctcccagtggcctggcttgtcggagcaagtttcatcagccctagggaaaacacggccctcctgggaacctccttacctggagtaaccggacaccttagacggaggtgcctgagggtggggtgggatttgcagggtcattatcagaacatgaggataacttccttgcccctgctctgtagccacctccttggcaccggcctctatttgtcataaggcggcgtgggcgaggcctgacacaggccagccttggcacgaggggggccaggggttctgagaagcgctgccctgtgagagccacgctggccttcgtctccatctctggttgacgggctgtccgtgtgcctcctgtgtgtctgcagacaagtcttgctgtgctttatttgtgaaactttaatgaggaaaaaacaaataataaatgttctcgttttgaaactcaaaaaaaaaaaaaaaaa

SEQ ID NO: 1244 - DNA, 2608 bp, Homo sapiens
actcggagcagcgcgcgccccgcaatcgccgcagccgcccccgccgtcggccgccgcaccccaagcgactgcccaaactaagcctccgtggctgggtacgggagcgctttggggacaaaaattctccctcaactgtggtctgcattccttcggcccgtgggctgatctggggcgggaagtattagcgtctcagttgcgctgcagccggggaggaaggaggaggccgagcctggggcggagtttgggctgactggggctggaccgggcaagacgccgccgctgcccggatgttgcgatggctgatcgggggaggccgagaaccgcagggactggccgagaaatctcctttacagacaataggtgaagaacaaacccagaatccctacactgaactgctagtactgaaggctcatcatgatattgtacgatttctggtacagttagatgactacagatttgcatctgctggtgatgatggaattgtagttgtgtggaatgcccagacaggggaaaaacttttagaactgaatggacacactcaaaagataacagctattattacatttccttccttggaatcttgtgaagagaaaaatcaactcatcttgacagcctctgctgatagaacagttattgtgtgggatggtgatactaccagacaagttcagagaatatcatgcttccagtctactgtaaagtgtttaactgttcttcagagactagatgtttggctttctggtgggaatgacctgtgtgtgtggaaccgaaaattagatctcctgtgtaagactagccacctttctgatacaggtattagtgctttggttgaaatacctaagaactgtgttgtggcagcagttggcaaagaactgataattttcaggttggtagcacccacagaaggatcactagaatgggatattcttgaagttaagcgcctccttgatcaccaggataatattctctcattgattaatgtcaatgatttgagttttgtcaccggctcccacgtcggagagctgatcatctgggatgccctggactggaccatgcaggcctatgaacgcaacttctgggacccatctccacaactggacacccaacaagaaataaaactctgtcaaaaatcaaatgacatttctattcatcatttcacatgtgatgaagagaatgtatttgctgcagttggaaggggtttatacgtgtatagccttcaaatgaagcgtgtgattgcctgccagaaaactgcacatgactccaatgtcctgcacgttgccagacttccaaacaggcagttaatctcatgctcagaagatggcagtgtacgcatttgggagttaagagaaaaacagcagcttgcagctgagcctgtaccaacaggtttttttaacatgtggggatttggaagagtcagcaaacaagccagccaacctgttaaaaagcagcaagaaaatgctacttcatgttcactggagcttattggagatttgattggacactcatcatctgtggagatgtttctatactttgaagatcatggactagtgacgtgctccgctgatcatctcattattttgtggaaaaatggagagcgagaatctggattgcgcagtttaagattatttcaaaaattagaggagaatggtgacttataccttgctgtctagtttaaggaattaaaaatacacatgcatgaaccttgaacatcaaatatcgggtactactctgaaaaccattaatatattgatcacttaaattggtaattttttttgtcagtccataaaattctacatgtttaaattttttgtggacctaccaaccaggaacatgttgcttctcaggtcctagtatatcctccaaagaatataccacaagtttttccatttgactttgagctgctgttgaagtggtgagtgctgtgttttgagcttattttgaacctagatccttgtgaaaggtacaaatagaggtaatagttaagttatggcatttattagaagttttattatttggcttcctttagaattattgtgaagtttaaaaatagcctttctcctgcaaattttcctagtctttagtaactgttagtgttctatatagcacaaacttgaatctctcagccaaaaaagggaacatatatactgtttaagtatggcaagttttctttggtaccaatttgtttagataattttaaaaatgttttttagttctagctactaaaacctgtatgaactcaaatggataggcatcttgtgagggtgtgtttttcccagtgtgaattggcttgaagagccatgggctaaatgggtactagaacaacaactgcccctcatgtacgccaaggatgagctctagatcatttgagaggcacagtgtttccggagtcagggactgcagctgagcgcaactgccccatctgaccactgactcaaatacgaactgcttgagacagacttcttttatgtagttctttgcagtgtccattgagacactataaccagccttgtaacaatatgttttctccttttggtgctaaaaaataaaaatattagaaagtaaaaaaaaaaaaaaaaaaaaaaaaaaaaaaaaaaaaaaaaaaaaaaaaaaa

SEQ ID NO: 1245 - DNA, 847 bp, Homo sapiens
acagcgagcggagccgcggtccggacggcagcgcgtgccccgagctctccgcctccccccgcccgccagccgaggcagctcgagcccagtccgcggccccagcagcagcgccgagagcagccccagtagcagcgccatggccgggtggaacgcctacatcgacaacctcatggcggacgggacctgtcaggacgcggccatcgtgggctacaaggactcgccctccgtctgggccgccgtccccgggaaaacgttcgtcaacatcacgccagctgaggtgggtgtcctggttggcaaagaccggtcaagtttttacgtgaatgggctgacacttgggggccagaaatgttcggtgatccgggactcactgctgcaggatggggaatttagcatggatcttcgtaccaagagcaccggtggggcccccaccttcaatgtcactgtcaccaagactgacaagacgctagtcctgctgatgggcaaagaaggtgtccacggtggtttgatcaacaagaaatgttatgaaatggcctcccaccttcggcgttcccagtactgacctcgtctgtcccttccccttcaccgctccccacagctttgcacccctttcctccccatacacacacaaaccattttattttttgggccattaccccataccccttattgctgccaaaaccacatgggctgggggccagggctggatggacagacacctccccctacccatatccctcccgtgtgtggttggaaaacttttgttttttggggttttttttttctgaataaaaaagattctactaacaaaaaaaaaaaaaaaaaaaaaaaaaaaaaaaaaaaaaaaaaa

SEQ ID NO: 1246 - DNA, 2602 bp, Homo sapiens
gaagtcggcgtcttgagtcataggagtgagccacgcccgggctgtgggaataagatggcggggaagaagaatgttctgtcgtctctcgcagtttacgcggaagattcagagcccgagtctgatggcgaggctggaatcgaggcggtgggcagcgcggctgaggagaaaggcggattggtatctgatgcctatggggaggatgacttttctcgtctagggggtgatgaagatggttatgaagaagaagaagatgagaacagtagacagtcggaagatgacgattcagagactgaaaaacctgaggctgatgacccaaaggataatacagaagcagaaaagcgagacccccaggaactcgtggcctccttttctgaaagagttcggaacatgtcgcctgatgaaatcaagatcccgccagaaccccctggcagatgttcaaatcacttgcaagacaagatccagaagctttatgaacgaaagataaaggagggaatggatatgaactacattatccaaaggaagaaagaatttcggaaccctagcatctacgagaagctgatccagttctgtgccattgacgagcttggcaccaactacccaaaggatatgtttgatccccatggctggtctgaggactcctactatgaggcattagccaaggcccagaaaattgagatggacaaattggaaaaggccaaaaaggagcgaacaaaaattgagtttgtgacgggcaccaaaaaaggcaccacgaccaacgccacgtccaccaccactaccactgccagcacagctgttgcagatgctcagaagagaaagagcaagtgggattcggctatcccagtgacaacgatagcccagcccaccatcctcaccaccacagccaccctgccagctgttgtcacggtcaccaccagcgccagcggctccaagaccaccgtcatctctgctgtgggcaccattgtgaagaaggccaagcagtgacctgaggggccaccctaggacttgaaaggaccgtgcagcccagtgaccactgcccagtgggaggcgccactttgtatatttcaggactgggacctactccccagatgccacctgagaggagcttctgtttggcattccagatggaaggacaggcagcacgggagccaggcgctgtggacagggtctgtccacgcaccacctggggtctgccgcctattaaaagtgccgtattcttacctcttggcatctcagatgcactggcctctcctgcattctgtttgcaggcaaatgcttcagctcacatgtcccccaagactcaatagtcttggttgggactattgcctcagggttgacaacagggtgatggaggcctgggacgctgttcagaggggtgacccaagaagtcaccgttgttatccgtgtatgcctctgggcatggacaggcgggagtccccgagccccacgtatgccccatctgccgccttgatcccaaaacccagccagttctcgggtgatggtggagctgtgctcccttgagtgcacttgagcactccccagaccagatcactttttggacacacccaggaaggcttttgaagtcaagccagtttccagaagggctggggtgagatcctgacctgtgcagagagtggggaggcgtcagcgcctggccagggctgccccagtcctttggtgcccggtgagcgcagccagcaggagctgagcagcgggggagatgaatcacctcctgccttggcgaggcggcagctcattgtttacaggcaagccctgctcctgggagggctcctgccaccccacccttcctctgtgtgttatctctgccccacagcagcccctgggcagcaccagtggccactgggctccccccggggttgaaacgggtttcccagaccaggggttcagaggagactatttacccttcatgatctttggcgattctccactggagcggaagggctgtgtgtcaaaagaaggaagccaggctgtgaagggccgtgttgctttcagtgggtgggcagaggtttagaaaggtggttctgaaatggcacctggtactcttgtgggacctggggaatataaggaactctgtgcatgaggtttcaaaaataaaaattgagtccactctccccgtacacacacactcgggcacttcaggaggtcagttctcaccccttcctcgatggggctttaaagctctggggagaagagctgctccccactcatgccccagagggactgtgaaaaggcttcctgtgacctccgatggcggcccctcattggccaagggcactgtggatgttttgtgggaggcagcatggcaccgtggaaagggcagtagacgtggagccggcacctctggtctggattccacttaaaaccagttgagtggtctcaagcccttaacctctgtaagcctgtttcttctctgaaatcacagtaataaagcgtcgtaagatggttgggaagaaccagaggtgacttatgcaaaagctttataaactgtaaagttcctgccaaaaaaaaaaaaaaaaaaaaaaaaaaaaaaaaaaaaaaaaaaaaaaaaaaaaaaaaaaaaaaaaaaaaaaaaaaaaaaaaaaaa

SEQ ID NO: 1247 - DNA, 1680 bp, Homo sapiens
caggcgggcgggagggcgggcacggagaggcgggcgccgaggaggggcaggtagggctgggacgcaggggtaactggatcccccgacttcagcccaggccctggtctgaccaccctgggagcagggactttccacagtcagctggacgcacactcagcccagtaaaagaggggacccatcccgggagccccggggagggcacagctgcctcctcccgggctcccctgccacctggtgcctacctgccccctgctccctgccgggtccggtcctcaccccatcttcatctggccttgactctgcccttgaggggcctaggggtgcagccagcctgctccgagctcccctgcagatggaggaggccatcctggtcccctgcgtgctggggctcctgctgctgcccatcctggccatgttgatggcactgtgtgtgcactgccacagactgccaggctcctacgacagcacatcctcagatagtttgtatccaaggggcatccagttcaaacggcctcacacggttgccccctggccacctgcctacccacctgtcacctcctacccacccctgagccagccagacctgctccccatcccaagatccccgcagccccttgggggctcccaccggacgccatcttcccggcgggattctgatggtgccaacagtgtggcgagctacgagaacgaggaaccagcctgtgaggatgcggatgaggatgaggacgactatcacaacccaggctacctggtggtgcttcctgacagcaccccggccactagcactgctgccccatcagctcctgcactcagcacccctggcatccgagacagtgccttctccatggagtccattgatgattacgtgaacgttccggagagcggggagagcgcagaagcgtctctggatggcagccgggagtatgtgaatgtgtcccaggaactgcatcctggagcggctaagactgagcctgccgccctgagttcccaggaggcagaggaagtggaggaagagggggctccagattacgagaatctgcaggagctgaactgagggcctgtggaggccgagtctgtcctggaaccaggcttgcctgggacggctgagctgggcagctggaagtggctctggggtcctcacatggcgtcctgcccttgctccagcctgacaacagcctgagaaatccccccgtaacttattatcactttggggttcggcctgtgtcccccgaacgctctgcaccttctgacgcagcctgagaatgacctgccctggccccagccctactctgtgtaatagaataaaggcctgcgtgtgtctgtgttgagcgtgcgtctgtgtgtgcctgtgtgcgagtctgagtcagagatttggagatgtctctgtgtgtttgtgtgtatctgtgggtctccatcctccatgggggctcagccaggtgctgtgacaccccccttctgaatgaagccttctgacctgggctggcactgctgggggtgaggacacattgccccatgagacagtcccagaacacggcagctgctggctgtgacaatggtttcaccatccttagaccaagggatgggacctgatgacctgggaggactctcttagttcttaccttttgtggttctcaataaaacagaacttaaaaaattaaaaaaaaaaaaaaaaaaaaaaaa

SEQ ID NO: 1248 - DNA, 1677 bp, Homo sapiens
caggcgggcgggagggcgggcacggagaggcgggcgccgaggaggggcaggtagggctgggacgcaggggtaactggatcccccgacttcagcccaggccctggtctgaccaccctgggagcagggactttccacagtcagctggacgcacactcagcccagtaaaagaggggacccatcccgggagccccggggagggcacagctgcctcctcccgggctcccctgccacctggtgcctacctgccccctgctccctgccgggtccggtcctcaccccatcttcatctggccttgactctgcccttgaggggcctaggggtgcagccagcctgctccgagctcccctgcagatggaggaggccatcctggtcccctgcgtgctggggctcctgctgctgcccatcctggccatgttgatggcactgtgtgtgcactgccacagactgccaggctcctacgacagcacatcctcagatagtttgtatccaaggggcatccagttcaaacggcctcacacggttgccccctggccacctgcctacccacctgtcacctcctacccacccctgagccagccagacctgctccccatcccatccccgcagccccttgggggctcccaccggacgccatcttcccggcgggattctgatggtgccaacagtgtggcgagctacgagaacgaggaaccagcctgtgaggatgcggatgaggatgaggacgactatcacaacccaggctacctggtggtgcttcctgacagcaccccggccactagcactgctgccccatcagctcctgcactcagcacccctggcatccgagacagtgccttctccatggagtccattgatgattacgtgaacgttccggagagcggggagagcgcagaagcgtctctggatggcagccgggagtatgtgaatgtgtcccaggaactgcatcctggagcggctaagactgagcctgccgccctgagttcccaggaggcagaggaagtggaggaagagggggctccagattacgagaatctgcaggagctgaactgagggcctgtggaggccgagtctgtcctggaaccaggcttgcctgggacggctgagctgggcagctggaagtggctctggggtcctcacatggcgtcctgcccttgctccagcctgacaacagcctgagaaatccccccgtaacttattatcactttggggttcggcctgtgtcccccgaacgctctgcaccttctgacgcagcctgagaatgacctgccctggccccagccctactctgtgtaatagaataaaggcctgcgtgtgtctgtgttgagcgtgcgtctgtgtgtgcctgtgtgcgagtctgagtcagagatttggagatgtctctgtgtgtttgtgtgtatctgtgggtctccatcctccatgggggctcagccaggtgctgtgacaccccccttctgaatgaagccttctgacctgggctggcactgctgggggtgaggacacattgccccatgagacagtcccagaacacggcagctgctggctgtgacaatggtttcaccatccttagaccaagggatgggacctgatgacctgggaggactctcttagttcttaccttttgtggttctcaataaaacagaacttaaaaaattaaaaaaaaaaaaaaaaaaaaaaaa

SEQ ID NO: 1249 - DNA, 1472 bp, Homo sapiens
gggcctccctgctcgctgcctccccgggtcctggatatggaggccacggctgccagctggcaggtggctgtccccgtcttggggggggccagcagacccttggggcctaggggtgcagccagcctgctccgagctcccctgcagatggaggaggccatcctggtcccctgcgtgctggggctcctgctgctgcccatcctggccatgttgatggcactgtgtgtgcactgccacagactgccaggctcctacgacagcacatcctcagatagtttgtatccaaggggcatccagttcaaacggcctcacacggttgccccctggccacctgcctacccacctgtcacctcctacccacccctgagccagccagacctgctccccatcccaagatccccgcagccccttgggggctcccaccggacgccatcttcccggcgggattctgatggtgccaacagtgtggcgagctacgagaacgaggaaccagcctgtgaggatgcggatgaggatgaggacgactatcacaacccaggctacctggtggtgcttcctgacagcaccccggccactagcactgctgccccatcagctcctgcactcagcacccctggcatccgagacagtgccttctccatggagtccattgatgattacgtgaacgttccggagagcggggagagcgcagaagcgtctctggatggcagccgggagtatgtgaatgtgtcccaggaactgcatcctggagcggctaagactgagcctgccgccctgagttcccaggaggcagaggaagtggaggaagagggggctccagattacgagaatctgcaggagctgaactgagggcctgtggaggccgagtctgtcctggaaccaggcttgcctgggacggctgagctgggcagctggaagtggctctggggtcctcacatggcgtcctgcccttgctccagcctgacaacagcctgagaaatccccccgtaacttattatcactttggggttcggcctgtgtcccccgaacgctctgcaccttctgacgcagcctgagaatgacctgccctggccccagccctactctgtgtaatagaataaaggcctgcgtgtgtctgtgttgagcgtgcgtctgtgtgtgcctgtgtgcgagtctgagtcagagatttggagatgtctctgtgtgtttgtgtgtatctgtgggtctccatcctccatgggggctcagccaggtgctgtgacaccccccttctgaatgaagccttctgacctgggctggcactgctgggggtgaggacacattgccccatgagacagtcccagaacacggcagctgctggctgtgacaatggtttcaccatccttagaccaagggatgggacctgatgacctgggaggactctcttagttcttaccttttgtggttctcaataaaacagaacttaaaaaattaaaaaaaaaaaaaaaaaaaaaaaa

SEQ ID NO: 1250 - DNA, 1767 bp, Homo sapiens
caggcgggcgggagggcgggcacggagaggcgggcgccgaggaggggcaggtagggctgggacgcaggggtaactggatcccccgacttcagcccaggccctggtctgaccaccctgggagcagggactttccacagtcagctggacgcacactcagcccagtaaaagaggggacccatcccgggagccccggggagggcacagctgcctcctcccgggctcccctgccacctggtgcctacctgccccctgctccctgccgggtccggtcctcaccccatcttcatctggccttgactctgcccttgaggggcctaggggtgcagccagcctgctccgagctcccctgcagatggaggaggccatcctggtcccctgcgtgctggggctcctgctgctgcccatcctggccatgttgatggcactgtgtgtgcactgccacagactgccaggctcctacgacagcacatcctcagatagtttgtatccaaggggcatccagttcaaacggcctcacacggttgccccctggccacctgcctacccacctgtcacctcctacccacccctgagccagccagacctgctccccatcccaagatccccgcagccccttgggggctcccaccggacgccatcttcccggcgggattctgatggtgccaacagtgtggcgagctacgagaacgagggtgcgtctgggatccgaggtgcccaggctgggtggggagtctggggtccgtcctggactaggctgacccctgtgtcgttacccccagaaccagcctgtgaggatgcggatgaggatgaggacgactatcacaacccaggctacctggtggtgcttcctgacagcaccccggccactagcactgctgccccatcagctcctgcactcagcacccctggcatccgagacagtgccttctccatggagtccattgatgattacgtgaacgttccggagagcggggagagcgcagaagcgtctctggatggcagccgggagtatgtgaatgtgtcccaggaactgcatcctggagcggctaagactgagcctgccgccctgagttcccaggaggcagaggaagtggaggaagagggggctccagattacgagaatctgcaggagctgaactgagggcctgtggaggccgagtctgtcctggaaccaggcttgcctgggacggctgagctgggcagctggaagtggctctggggtcctcacatggcgtcctgcccttgctccagcctgacaacagcctgagaaatccccccgtaacttattatcactttggggttcggcctgtgtcccccgaacgctctgcaccttctgacgcagcctgagaatgacctgccctggccccagccctactctgtgtaatagaataaaggcctgcgtgtgtctgtgttgagcgtgcgtctgtgtgtgcctgtgtgcgagtctgagtcagagatttggagatgtctctgtgtgtttgtgtgtatctgtgggtctccatcctccatgggggctcagccaggtgctgtgacaccccccttctgaatgaagccttctgacctgggctggcactgctgggggtgaggacacattgccccatgagacagtcccagaacacggcagctgctggctgtgacaatggtttcaccatccttagaccaagggatgggacctgatgacctgggaggactctcttagttcttaccttttgtggttctcaataaaacagaacttaaaaaattaaaaaaaaaaaaaaaaaaaaaaaa

SEQ ID NO: 1251 - DNA, 3330 bp, Homo sapiens
gcgacggcggcggctccaagatggcgcaggcgatctttgaggccctggagggaatggacaatcagaccgttctggctgtccagtcattattggatggccaaggagcagtccctgatccgacaggccagagtgtcaatgcgccccctgctatccagccattggatgacgaggatgtatttctctgcgggaagtgtaagaagcaattcaactcgctgccagcgtttatgacccacaagcgggaacagtgccaggggaatgcccccgccctggccacagtctcactggccaccaacagcatctacccaccttcggcagcacccacagcggtccagcaggccccaactcctgccaatcgccagatctccacatacatcacagtgcccccgtccccactgatccagaccctggtgcaggggaacatcttggtgagcgatgatgtgctcatgtctgccatgtcagccttcacatccctggaccagcccatgccccagggccccccacctgtgcagagcagcctgaacatgcattccgtgcccagctacctcacccagcctccacctcctcctccacctcctccaccactgcccccaccgccaccacctcagcctccaccacctccaccccagagcctgggcccccctgggcgtcccaaccctggtgggaacggtgtggtggaggtgtacagtgctgctgcgcccctggctgggagtggaacggtggagatccaggcactggggatgcagccctacccacccctagaggtgccaaaccagtgtgtggagcctccagtatatcccacccccacagtgtacagccctggcaaacagggattcaaacccaaaggaccaaaccccgccgcccccatgaccagcgccaccgggggcacggtggccacctttgactctccagcaacgctgaagacccgacgagctaaagctgcagggaagccaaaggctcagaaactcaagtgctcatactgtgacaagtcattcaccaaaaactttgacctgcagcagcacatccgaagccacaccggtgagaagcccttccagtgcattgcatgtggccgtgcctttgcccagaagtctaatgttaagaaacacatgcagacccacaaggtgtggcctccaggacacagtggtggcaccgtgtctcgaaactctgtgaccgtacaggtcatggccctgaaccccagcaggcaggaggacgaggaaagcacagggttgggccagcccctgccgggtgcgccacagccccaggccttgtccacagctggtgaggaagagggggacaagccggagtccaagcaggtggtcctcatcgacagctcctacctgtgccaattctgccccagcaaattcagcacctacttccagctcaagtctcacatgacccagcataagaatgagcaggtgtacaagtgtgtggtcaaaagctgtgcccagacgttcccaaagctcgacacatttctggagcacatcaagagccaccaggaggagctgagctaccgctgccacctctgcggcaaggacttcccctcgctgtacgacctgggcgtgcaccagtactcccacagcctcctgccacagcacagccccaagaaggacaatgccgtctacaagtgtgtcaaatgtgtcaacaaatactccacccctgaggccctggagcaccacctgcagaccgccactcacaacttcccctgcccacactgccagaaggtgtttccttgtgaacgctacctgcggcgtcatctgcccacccacggcagcgggggcaggttcaagtgccaagtgtgcaagaagttcttccggcgggagcattatctcaaactgcatgctcacatccactcgggtgagaagccctacaaatgctcagtgtgcgagtctgcgttcaaccgcaaggacaaactgaagagacacatgttgatccacgagcccttcaagaaatacaaatgccctttctcgacgcacacaggctgcagtaaggagttcaaccggccggacaagctgaaggcccacatcctctcccactctggcatgaagctccacaaatgcgccctgtgcagcaagtccttcagccgccgtgcccacctcgccgagcatcagcgcgcccacacgggcaactacaagttccgctgtgctggctgcgccaagggcttttcccgccacaaatacctcaaagatcaccgctgtcgtctcggcccccaaaaggacaaggacctgcaaacccggcggcccccccagaggagggcagccccccgcagttgcggcagtggtgggcgcaaggtgctgacccccttgcctgacccgctggggctggaggagctgaaggacacaggggctgggctggtgcccgaggctgtccccggcaagccgcccttcgcagagccggacgcggtgctgtccatcgttgtgggtggtgcggtgggcgcggaaactgagctggtggtacctggacacgctgaggggctgggctccaacctggctctggcggagctgcaggctggggccgagggcccatgtgccatgctcgctgtgcccgtctacatccaggcctccgagtgacggacctgaggtgtctgtttcctgggcaggcctgatgctcctgtttgggtccagggcccctgggggcagaccggtgatccttaccagtggaagcgagccatcgagccattggcagaaatcctgctgaatgtcattcagaaacctcagcccatggtcgccctcctgtgcccctctcctgccggaaagccctgcaacattctagggttgggggcagggccatccacggtttctgggcagagccatggtggcaggagagagatggctgaagcctgagcagcccagagtcccgctggtctaggctggtggtcggggcccctgggagaggagacagggcattcctccccactctgtctccaggctgcctctgggtagcctctagtctgctgttcttcaggaggcctgccataaactcttcggagtttacgtgttgcaccttttcacagacggttccccacagcatcctcagacagctctgtgatgtagcttttaggaggcactcaggtgtcacggctagactgcagctatgagacagatctggcttcaaatccaagagttgccatgcacttgctgtgtgaccttgggcaagtcacttcacttctctgagccccgtgttcctcatctgtacaatggggcttacgatactactacctcatagggttgtcctggggatccagtatgatgaagtgcgccaggggcttggcatggtgcccggcacgcagaaagtgctcaataaatgtttttgtcataacgtgaaaaaaaaaaaaaa

SEQ ID NO: 1252 - DNA, 5203 bp, Homo sapiens
gcagaggagagcgccaggacgctacagcagctgaagaggcagtggcgcccgcggccgcagcgtcggggctggagcgatggcggcgaccgcggtggcggcggctgtggcgggaaccgagtcggcccagggtcccccgggcccggcagcgtcgctggagctgtggctcaacaaagccacagacccaagcatgtcggaacaggattggtcagctatccagaatttctgtgagcaggtgaacactgaccccaatggccccacacatgcgccctggctactggcccacaagatccagtctccgcaagagaaggaagctctttatgccttaacggtgctggagatgtgcatgaaccactgtggggagaagttccacagcgaggtggccaaatttcgtttcctgaacgaactgatcaaagtgttgtccccaaagtacctggggtcctgggccacaggaaaagttaaaggaagagtcattgaaatactcttcagttggacagtctggtttccggaagacatcaagattcgagacgcttatcagatgctgaagaaacaaggaattataaaacaagaccctaaactaccagtggataaaatcttacccccaccatctccctggcccaagagctccatctttgatgctgatgaagaaaagtccaagcttctgacaaggcttctaaagagcaaccaccccgaggaccttcaggctgcaaaccggttaatcaagaatttggtcaaggaggaacaagaaaaatcggagaaggtgtccaagagggtcagtgcggtggaggaagtgcgaagccatgtgaaggtgctgcaggagatgctgagcatgtaccgcaggccagggcaggccccgcccgaccaggaggccctgcaggtcgtgtatgagaggtgtgaaaagctgcggcccacgctgttccggttggcgagtgacaccactgatgacgatgatgcactcgcggaaattctccaggcaaatgacctcctcacccaaggagttctgctgtacaaacaggtgatggagggccgggtcacctttggaaacagagtgaccagctcattgggagacatccctgtctccagagtctttcagaatccagcaggctgcatgaagacctgccccctgattgacttggaggtggacaatggacctgcgcagatggggactgtggtgccatctttgcttcatcaggacctggcagccttgggaatcagtgatgctcctgttacaggcatggtttctggtcagaattgctgtgaggaaaagaggaatccctcctccagcacgctgccaggcggtggtgttcagaacccttctgcagacaggaatttgctggacctcctctcagcacagccagctccgtgccctctgaattatgtttcgcagaaaagtgtccccaaggaagtgccaccaggtactaagtcctctccaggttggtcctgggaggctggcccgttggctccttccccatcttcacagaatacacctctggctcaagtgtttgtccctttggagtctgttaagcccagcagcctgccgcctctcattgtgtatgaccggaatggattcagaattctgctccacttctcccagacgggagcccctgggcacccagaggtacaggtgctgctcttgaccatgatgagcacggctccccagcctgtctgggatatcatgtttcaagtggctgtgccaaagtcaatgagagtgaagctgcagccggcatccagctccaagcttcctgcattcagtcctttgatgcctccagctgtgatatctcagatgctgctgcttgacaatccacacaaagaacctatccgcttacggtacaagctgacattcaaccaaggtggacagcctttcagcgaagtaggagaagtgaaagacttcccagacctggctgtcttgggcgcagcctaacttttcacaagatggacccttcatttcaagcttaggctggcgttacttttgctgtctagtcaggactaatcacggtgtttcagtgcggagtgccaagagtcctatcctgacgtcaggctctgggtgtcaacctctgacttattctgcagatgctctgtgtgtgtgtgtgtgtgtgtgtgtgtgtgtgtgtgtgtgtgtgtgttcggggagagggtggtagcacagggcttgggatatcggcagtgtgggaaatgcgaagcatttctcatcatcatcatctctgctacagtcatgtttctgcatgtcagcgagcgacactgtccctgcctcaggttggaggttttatcagccaaagtgtttttttcatgtatcgttcgttccattcatccactctgtgccttgtcagcctttgaaaggcttggttgctcccaggctgctgttctcagggaccttaaaagggacctggttagtcttggggcagagagtatctacttgggcactctcttccaagaaagaccttgtctccattttcattagacaatgcttcttgtgtgtgttctggaagatcttctaaatggaatgcttgttgcactgttcccaggcgagtggctgccatgagacctgaggaccacacttgggggaccaatcatgtccttcaccactgtgccttagaatcgcccctggacagagttcctgggcagaggggaaagcagctcccaggccttactcaggcctcaggtccatgggttgggcagccagtctgggcccttctcaggatcctcatctccatcctcatcctcttccttcacagcatttacttggagctctttgtgacacaccatgtcagtcatgatgaatcggccaacagccagcccttgccagctgacgtcacagtctaagatgggaaactgtggtacagatagacatgaagagagcttagcagtgattgaggtggtgactaaatatacagtcattgaataaataccatgtagcaagtgtactttgtggagtgttgagtaagtggaaaatggaaagccagttgcatttagagatgataggcctaaagggaactgtcttctgtcgagaagtaaaggaaacttcatgaaggatgtagaagcttagctgcctcagagaagagagaacctgaagatctgaggcaagctggacaggagaggtggatatttgttgatggaagaattcaagtttataatcaattcccacttagcacctactgtgtgctaggaacttgaatgtgtatgtttgacaagtcctgcttggcctgatgggtgggagaaggaacctgagcctggctgagatggctaggcggagggctttgaagtccaagcagctgaactggctgggtgggtttctacctttgaaactgcaagacttgtttggagctcttaattacaatatctgatatttttacagtctgatcttttgacttctacatatagtggaaatctgccaatactaattggtggagatgggaactgtaaaagatcaagtatgctaattttaagcaaatgtaaaaactcataaaacaggtaaacagtggggtgatttcatttgccataattcacataagacgaattttaatctaaaagtactttcttgcttgtattctgtgtggcttttttttgttttttgaggccatatctcactctgtcactcaggctggagtgcggtggtataatctcagctcactgcaatctctgcctaccaggttcaagcgattctcgtgcctcagcctctcgagtagctgggactacaggcgtgagccagcacgcccagctaatttttgtatttttagtagagacaggatttcaccatgttggccaggctggtctcgaactcctgacctcaggtgatccgcctgccttggcctcccagagtgctgggattacaggcgtgagccaccgcacccggcctctgtgtagcttttataggctctgttactgttgcgtagtcttgaagaggtacccatcataatgacagcatctccctctgaagggttttggtcaaaatgggtgaatgagacttatacataaagacaggctttctcccctatagttaggaggtgaactcacacatgtgtacctgaacattcttgcttttgaggagacagactcccagtggtactactatgcttaggtgttggacaggataggggtaggaggagaggaggcaggctgctgtcctgaaagtggctgtggtttatggcatcactcccttctaatcagcaagtccagtggccacttagagcccagctcctacctcttcattcacttaacaagtagttattggctgtgcacagtggctcacgcctataatcccagcattttgggaggctgagtgggatgaccgcttgagcccaggatttcaagtccagcctgggctacatagtgagaccgtgtctctgtttttttaaaagctagttgttgaccagctaccctgagccaggcaccaccctgaaggagcttcttttcctctggggagaagcaaattcatgatgtgtgtgctggagatctggcactcatggccagtgctttccagtatcttgaactcttcgggggtcctgttgacccatttcgtgacctacctccgtgactgctctttttcctctgtctcttaagtgtgatggttttccagagtccaatcctcaggactttcccgtccacacacaggcctggtagtcaggtggctctaaaccattaggtgggttgtagacctctctcaagctgccacctccttgctgtcgccagatcgtatttcagtctgtcaggggttatctgtatctggaggttccactgttgcttcagtctcagttacttagaatggaacccagagtcctgcccctttccacctacatgctcttacttgaaagcacctgagacttattgggtccctgattcctgcttcgtctgtatccgcagagtagttgcatgtcatttggcctgttttctaaataatcccacatcatgtcctccctgcacttacattgccactgctctgatttgggcttttttttttttgggacaatgcctctgtcccaattctgagtaacagctctggttcttgccactaccagagttctctagcaaatctgagcatctgacagggtgaaaaattctgaatggcttcctgatgcctgactttatgggatcaaattcaagttgcacgctggcactcagtgcccttctggtatcatctgccaagaccagggcctgcttcaccacagccacaataaagtcctttcaagccctgaaaaaaaaaaaaaaaaaa

SEQ ID NO: 1253 - DNA, 2034 bp, Homo sapiens
atcacgctgaggtccgcgcgcccccggagtctggggagcagggctccgccaatccgaggggagggcgaaggaagtaccatttatttagcgctgtgtgtgtgctcttatttccactggccttacaagaccgtgcactgtgtagatgaggaaactgagtcataataaatatgtgctgaaccgttcgggggtcacacggtgctgaaatggtttcgagtcaactcgctcggacggcactcggcctcagcctccggccctggaaccctctccagggacgggaccagcccttgttctgttccctaccggtaccacaggaatcttgacgaacggcccaaatgcctggccgctgtcagagtgacgccgcgatgagagtaaacgggccagcatcccgtgcaccagcggggtggaccagcgggagtctgcacacaggcccccgagcaggacgccctcgtgcgcaggcgcggggtgtacgtgggcggggcctcctcctccggccccgcccagcgaaggagcttcctcttccgaggaaaggcggggcctgggcgcccgcgggaaacccgggcccgttgcatccgctgggtgtagccgtggggatggcaggttcggggaggctggtcctacggccctggattcgggagctgattctggggtcagagacaccctccagtccacgagccgggcagctgcttgaggacgccgaggccgcggtcgcgggcccatcccacgcccctgatacgtccgacgtcggggccacgctgcttgtgtctgacgggacccacagtgtccgatgcctggtgacgcgggaggccctggacacctcggactgggaggagaaggagttcggcttccgcgggacagagggccggctgctgctgctgcaggactgcggggttcatgtccaggtcgctgagggcggcgcgcccgcagagttctatctccaggtggaccgcttcagcctgctgcccacggagcagccccggctacgggtgcctggtcgcaaccaagacttagatgttcagaaaaagctctatgactgccttgaggagcacctttcagagtccacctcgtccaatgcaggcctatcactgtcccagcttctggatgaaatgcgggaggaccaggagcatcagggggcactcgtgtgcctggctgaaagctgcctgacactggagggcccttgcacagcaccccctgtcacccactgggctgcctcacgatgcaaggccacgggagaagctgtgtacactgtccccagctcaatgctgtgcatctctgagaatgaccagctaattctgagctctctaggcccctgtcagaggacacagggccctgagctgcccccaccagacccggctctgcaggacctatctctgaccctcatagcctctcctccttcctcacccagttcctcaggaaccccggccttacccggccacatgtcatccgaggaaagtggtaccagcatcagccttctgcctgccctgtccttggctgctccagacccagggcagagaagcagctcccagccctcaccagccatctgctcagcccctgccaccctgacccccaggtccccacacgccagccgtacccccagctccccactccagagctgcactcccagtctctcaccccgtagccatgtccccagtccacaccaggctcttgtgaccaggccccagaaacctagcctggagttcaaggagtttgtagggttgccctgcaagaatcggccgccttttcccaggaccggagctaccaggggagcccaggagccctgctctgtctgggaacccccaaagaggcatcgtgatggttctgccttccagtatgagtatgagccaccctgcacgtccctctgtgctcgggtccaagctgtcaggcttcctccccagctcatggcctgggccttgcactttctgatggatgcacagccagggtctgagccaactccgatgtgagacgtcacgcaggacagataccgctccacactctgcttcctttgagttttttaataaaataatctcatgcggcagg

SEQ ID NO: 1254 - DNA, 12227 bp, Homo sapiens
tgagctgcgaggcccgagagtcagaacctgggggagagggatggtctctgcacgggggggagccggaggagccgccgccgctgccgacgccaccgccgcagccgccgccgccgccgccccggcacccgcctcccggcgctgacggtctcgtacgaagccggcgagggggagccagcagcggcggtcgccggcacgccgcccagcatggtccgggaaaccaggcatctctgggtgggcaacttacccgagaacgtgcgggaagagaagatcatcgagcatttcaaacgatatggccgcgtggaaagtgtcaaaattcttcccaagaggggatctgaaggaggagtggctgcctttgtggattttgtggacatcaaaagtgcacagaaagctcacaactcggtcaacaaaatgggtgacagagacctacgcacggattataatgaaccaggcaccatcccgagtgctgctcggggattggatgatacagtttccatagcatctcgtagtagagaggtttctgggttcagaggaggtggtggagggcctgcttatggtcccccaccgtcacttcatgcacgagaaggacgttatgagcggagacttgatggggcttcagataacagggagcgtgcttatgaacatagtgcctatggacaccatgaacgggggacgggaggatttgatcggacaagacattacgatcaggattactatagagatcctcgagagcggactttacaacatgggctctattacgcttctcggagtcgaagtccaaatcgctttgatgctcatgacccccgatatgaacctagggctcgcgagcagtttacactgcccagtgtggtacacagggatatctacagggatgatattacccgggaggtacgaggcagaaggccagagcggaattaccagcacagcaggagtcggtcaccacattcatcccagtctagaaatcagtctcctcagagactggctagccaagcatctagacccacaaggtcccctagcggcagcggctctagaagtagatcctccagtagtgattcaatcagcagcagcagtagtaccagcagtgacagcagtgattccagcagtagttcaagtgatgattctccagctcgatcagttcagtctgcagcagtccctgcacccacttcccagttgctttcatctctggaaaaagatgagccccgtaaaagttttggcatcaaggtccagaatcttccagtacgctctacagatacaagccttaaagatggccttttccatgaatttaagaaatttggaaaagtaacttcagtgcagatacatggaacttcagaagagaggtatggtctggtattctttcggcagcaagaggaccaagaaaaagccttgactgcatcaaaaggaaaacttttctttggcatgcagattgaagtaacagcatggataggtccagaaacagaaagtgaaaatgaatttcgccccttggatgaaaggatagatgaatttcaccccaaagcaacaagaactctctttattggcaaccttgaaaaaaccactacttaccatgaccttcgcaacatcttccagcgctttggagaaattgtggatattgacattaagaaagtaaatggagttcctcagtatgcgtttctgcaatactgtgatattgctagcgtttgtaaagctattaagaagatggatggggaatatcttggaaataatcgcctcaagctgggttttggaaagagcatgcctacaaactgcgtgtggctagatgggctttcttcgaatgtgtcagatcagtatttaacacgacatttctgccgatatgggcctgtggtaaaggtggtgtttgaccgcttaaaaggcatggccctggttctctacaatgaaattgaatatgcacaagcagctgtaaaagagaccaaagggaggaaaatcggtgggaataaaattaaggtggattttgcaaatcgggaaagtcagctggctttttatcactgcatggagaaatctggtcaagacatcagagacttttatgaaatgttagccgaaagaagagaggaacgaagggcatcctacgactataaccaagatcgtacatattatgagagtgttcgaactccaggcacttatcctgaggattccaggcgggactatccagctcgagggagagagttttattcagaatgggaaacttaccaaggagactactatgaatcacgatactacgatgatcctcgggaatacagggattacaggaatgatccttatgaacaagatattagggaatatagttacaggcaaagggaacgagaaagagaacgtgaaagatttgagtctgaccgggacagagaccatgagaggaggccgattgaacgaagtcaaagtcctgttcacttgcgacgtccacagagtcctggagcgtctccctctcaggcagagaggttgccgagtgattctgagaggaggctttacagccgatcctcagaccggagtggaagctgtagctcactctcccctccaagatatgagaaactggacaagtctcgtttggagcgctatacaaaaaatgaaaagacagataaagaacgaacttttgatccggagagagtggagagagagagacgcttaatacggaaggaaaaagtggaaaaggacaaaactgacaagcagaaacgcaaaggaaaggttcactcccctagttctcagtcttcagaaacggaccaagaaaatgagcgagagcaaagccctgaaaagcccaggagttgtaataaactgagcagagagaaagctgacaaagagggaatagcgaaaaaccgcctggaactcatgccttgcgtggttttgactcgagtgaaagagaaagagggaaaggtcattgaccacactcctgtggaaaagttgaaagccaagcttgataatgacactgtcaaatcttctgccctggaccagaaacttcaggtctctcagacggagcctgcaaaatctgacttgtctaaactggaatcagttagaatgaaagtaccaaaggaaaaggggctttcaagccatgttgaagtggtggagaaggaaggcaggcttaaagccaggaagcacctcaagcctgagcagcctgcagatggggtaagtgctgtggatctggagaagctggaagccaggaaaaggcgctttgcagattccaatttaaaagcagaaaagcaaaaaccagaggtcaagaaaagcagtccagagatggaggatgctcgcgtgctttcaaaaaagcagcctgacgtgtcctctagagaggtcattctgctgagggaaggagaggctgaaagaaagcctgtgaggaaagaaattcttaaaagagaatctaaaaaaatcaaactggacagacttaatactgttgccagccccaaagactgtcaggagcttgccagtatttctgttgggtctggctcaaggcccagctcagacctacaagcaagactgggagaactagcaggtgaatctgtggaaaatcaagaagtccaatcaaaaaagcccattccctcaaaaccacagctcaaacagctgcaggtattagatgatcaaggaccagagagagaagacgttaggaaaaactattgcagtcttcgtgatgaaacacctgaacgtaaatcaggccaagagaaatcacattcagtaaatactgaagaaaaaattggcattgacatcgatcacacgcagagttaccgaaaacaaatggaacagagtcgtaggaaacagcagatggaaatggaaatagccaagtctgagaagtttggcagtcctaaaaaagatgtagatgaatatgaaagacgtagcctcgttcacgaggtaggcaaaccccctcaagatgtcactgatgactctcctcctagcaaaaagaaaaggatggatcatgtcgattttgatatctgcaccaagcgagaacggaattacagaagttcacgccaaatcagcgaagattctgaaaggactggtggttctcccagtgtccgacatggttccttccatgaagatgaggatcccataggctcccctaggctactgtcagtaaaagggtctcctaaagtagatgaaaaagtcctcccctattctaacataacagtcagggaagagtctttaaaatttaatccttatgattctagcaggagagaacagatggcagatatggccaaaataaaactatctgtcttgaattctgaagatgaactaaatcgttgggactctcagatgaaacaggatgctggcagatttgatgtgagtttcccaaacagcataattaagagagatagccttcgaaaaaggtctgtacgagatctggaacctggtgaggtgccttctgattctgacgaagatggtgaacacaaatcccactcacccagagcctctgcattatatgaaagttctcgattgtcttttttattgagggacagagaagacaagctacgtgagcgagatgaaagactctctagttctttagaaaggaacaaattttactcttttgcattggataagacaatcacaccagacactaaagctttgcttgaaagagctaaatccctctcttcatctcgtgaagaaaattggtcttttcttgattgggactcccgatttgcaaattttcgaaacaacaaagataaagaaaaggttgactctgctccaagacctattccatcctggtacatgaaaaagaagaaaattaggactgattcagaagggaaaatggatgataagaaagaggaccataaagaagaagagcaagagaggcaggaattgtttgcttctcgttttttacacagctcaatctttgaacaagattccaagcgattgcagcatctagagagaaaagaggaagattctgacttcatttctggtaggatctatgggaagcagacatctgagggagcaaacagcacaactgattccattcaagaaccagtagttctgttccatagcagatttatggagctcacacggatgcaacagaaagaaaaagaaaaagaccagaaacccaaagaggttgagaaacaggaagatacagagaatcatcccaagaccccagaatctgctcctgagaataaagattcagaactgaaaactccaccttccgttgggcctccaagtgtcacagtcgtaactctagaatcagccccatcagcactagagaagaccactggtgacaaaacggtagaggcgcctttggtaacagaagagaagactgtggagccagctaccgtctcagaagaagcaaagcctgcatctgaacctgctcctgcccctgtggaacagctggaacaagtagacctgcccccaggagcagaccccgataaagaagctgccatgatgcctgcgggtgttgaggaaggttcatcaggtgaccagccgccttatctggatgccaagcctccaactcccggggcctcgttttcccaggcagagagcaacgtagatccagagcctgacagtacccagccactttcaaaaccagctcagaagtctgaggaagccaatgagccaaaggccgaaaagccagacgccactgcagatgctgagcctgatgcaaaccagaaagccgaagctgctcctgagtctcagcccccagcttctgaagatttagaggttgatcctccagttgctgcaaaggataaaaagccaaacaaaagcaagcgttcaaagacccctgttcaggcagctgcagtgagtatcgtggagaagcccgtcacaaggaagagtgagaggatagaccgggaaaaactcaagcggtccaattctcctcggggagaagcacagaagcttttggaattgaagatggaggcagagaagattacaaggactgcttctaaaaactctgctgcagaccttgaacatcccgaaccaagtttgcctctcagccgaacaaggcgccggaatgtaaggagcgtctatgcaaccatgggtgaccatgaaaaccgctctcctgtcaaagagcccgttgagcaaccaagagtgaccagaaagagattggagcgagagcttcaggaggctgcagcggttcccaccacccctcggaggggaaggcctccaaagacacgccggcgagccgatgaagaggaggagaacgaggccaaggaacctgcagaaacactcaagccacctgagggatggcggtcgccaaggtcccagaaaactgcagctggtggtggaccccaagggaaaaagggaaaaaatgaaccgaaggtggatgctacacgtcctgaggccaccactgaggtgggcccccaaataggcgtgaaagagagctccatggaacccaaggctgctgaggaggaggcagggagtgaacagaaacgtgacagaaaagatgctggcacagacaaaaacccccctgaaaccgcccctgttgaagttgtagagaaaaaaccggcccctgaaaaaaactccaaatcaaagagaggaagatctcgaaactccaggttagcagtggacaaatctgcaagtctgaaaaatgtggatgctgctgtcagtcccaggggggctgcagcacaggcaggggagagggaatctggggtggtggcagtctcccctgagaaaagtgagagtccccaaaaggaggatggtttatcatcccagttgaaaagtgatccagttgatccagacaaggaaccagagaaagaagacgtgtctgcctctgggccgtccccagaagccacccagttagccaagcagatggagctggagcaggccgtggaacacatcgcaaagctcgctgaggcctctgcctctgctgcctataaggcagatgcaccagagggccttgccccagaggacagggacaagcctgcacaccaagcaagtgaaacagagctggctgcggccatcggctccatcatcaatgacatttctggggagccagaaaacttcccagcacctccaccttatcctggagaatcccagacagatctgcaaccccccgcaggtgcacaggcgctgcagccttctgaggaaggaatggagacagatgaggctgtatctggcatcctggaaactgaggctgctacagaatcttctaggcctccagtcaatgctcctgacccctcagccggcccaacagataccaaggaagccagaggaaatagcagtgaaacctcacactcagtgccagaagccaaagggtctaaagaagtggaagtcactcttgttcggaaagacaaagggcgccagaaaacaacccgatcacgccgcaagcgaaacacaaacaagaaagtggtggctcctgtagagagccatgtccctgaatccaaccaagctcaaggtgagagtcctgctgcaaatgaggggacaacagtacagcaccccgaagccccacaggaagaaaagcagagtgagaaaccccattccactcctcctcagtcatgtacttctgacctaagcaagattccctccacagagaattcgtcccaagaaatcagtgttgaggaaaggactccaaccaaagcatctgtgcccccagaccttcccccacctccccagccagcaccggtggatgaggagcctcaagccaggttcagggtgcattccatcattgaaagtgacccggtgaccccacccagcgatccaagcatccccatacccacactgccttctgtaactgcagcaaagctctcacctcctgtcgcctctggggggatcccacaccagagcccccctactaaggtgacagagtggatcacaaggcaggaggagccacgggctcagtctactccatctccagctcttcccccagacacaaaggcctctgatgttgacaccagctccagcaccctgaggaagattctcatggaccccaagtatgtgtctgccacaagtgtcacttccacaagtgtcaccacagccattgcagagcctgtcagtgctgccccttgcctacatgaggccccgcccccgccagttgactctaaaaagcctttagaagaaaaaacagcacctccagtgacaaacaactctgagatacaagcctcggaggtgctggtagctgctgacaaggaaaaggtggctccagtcattgctcccaaaattacctctgttattagccggatgcctgtcagcattgacctggaaaattcacagaagataaccttggcaaaaccagctcctcaaaccctcactggtctggtgagcgcactcactggcctggtgaacgtctccctggtcccggtgaatgccctgaaaggccccgtgaagggctcagtgaccacactgaaaagtttggtgagcacccctgctgggcccgtgaacgtcctgaaagggcctgtgaatgttcttacggggccagtgaatgttctcaccactccagtgaacgccacggtgggcacagtgaatgccgccccaggcacagtcaatgccgctgcgagtgcagtgaatgccacagcaagtgcagtgaccgtcacagcgggtgcggttactgctgcatctggtggtgtaacggccacaacaggcacggtgacaatggcaggggcagtgattgcgccgtcaacaaagtgcaaacagagagcgagtgctaatgaaaacagtcggttccacccagggtccatgcctgtgatcgacgatcgtccggcagacgcgggctcaggggcggggctgcgtgtgaacacttctgaaggggttgtgctcctgagttactcagggcagaagaccgaaggcccacagcggatcagcgccaagatcagccagatccccccggccagtgcaatggacattgaatttcagcagtcagtgtccaagtcccaggtcaaacctgattctgtcacagcatcgcagcctccatccaaaggccctcaagctcctgcaggctatgcgaacgtggccacccattccacgttggtactgaccgcccagacatataatgcctctcctgtgatttcgtctgtgaaggccgataggccatccttggagaagcccgagcccattcacctctcggtgtccacgcctgtcacccagggaggcacagtgaaggttctcacccaggggatcaacacaccccctgtgctggttcacaaccagctggtcctcaccccaagcattgtcaccacaaacaagaagcttgctgaccccgtcacccttaaaatcgagaccaaggtccttcagccggccaacctggggtccacgctcacgccccaccaccctcctgctctgcccagcaaactgcctacagaagtcaaccatgtcccctcggggcccagcatcccagcagatcgaactgtctcccatttggcagctgcaaagctagatgctcattctcctcgaccaagtggacccgggccatcctcattcccaagggcaagccaccccagcagtactgcatctacggcgctctccaccaacgccacagtcatgctggctgcaggcatcccagtgccccagttcatctccagcatccacccagagcagtctgtcatcatgccaccccacagcatcacccagactgtgtccctgagccacctctcccagggcgaggtgagaatgaacactcccacgctgcccagtatcacctacagcatccggccagaagcgcttcactctcctcgggctccgctgcagccccagcaaatagaggtcagggccccacagcgtgccagcaccccgcagccagccccagctggtgtgcctgcactggcctcccagcaccctcccgaggaggaagtgcattatcaccttcctgtcgctcgagccacagcccctgtgcagtcagaggtactagtcatgcagtctgagtaccgactgcacccctatactgtgccacgggatgtgaggatcatggtgcatccacatgtgacggcagtcagcgagcagcccagggccgcggatggggtggtgaaggtgccaccagccagcaaggcccctcagcagccagggaaggaagctgccaagacaccagatgccaaagctgcccccacccccacccctgcccccgtccctgtccctgtcccccttcctgcccctgctcctgcccctcatggtgaggcccgtatcctcacagttacccccagtaaccaactccaggggctgcctctgacccctcctgtggtggtgacccatggggtgcagattgtgcactccagcggggagctgtttcaagagtaccggtacggcgacatccgcacctaccaccccccggcccagctcacacacactcagtttcccgccgcttcctctgttggcctgccttcccggaccaagacagctgctcagggccctcctcctgaaggtgagcccctgcagcctcctcagcctgtgcagtccacacagcctgcccagcctgcaccaccctgcccgccctcccagctcggtcagcccggccagccaccaagcagcaagatgcctcaagtgtcccaggaggcaaaggggacccagacgggagtagagcagcctcgcctcccagctggacctgcaaacaggccacctgagcctcacacccaggttcagagggcacaagcagaaacaggcccgacttccttcccctcccctgtgtctgtctccatgaagcctgaccttccagtctctcttcccactcagactgccccaaaacagccgttgtttgtcccaacaacctctggccccagcaccccaccaggactggttctgccacacactgaattccagccagcccccaaacaagattcctctccacacctgacttcccagagacccgtggatatggttcaacttctgaagaagtaccccatcgtgtggcagggcctgctggccctcaagaatgacacagctgctgtgcagctccacttcgtctctggcaacaacgtcctggcccatcggtccctgcccctttctgaaggagggcccccactaaggatcgcccagaggatgcggctggaggcaacgcagctggaaggggttgcccgaaggatgacggtggagacagattactgtctgctgctggctctgccctgtggccgtgaccaagaggatgttgtgagccagaccgagtccctcaaggctgccttcatcacttacctgcaggccaagcaggcggcagggatcatcaacgttcccaaccctggctccaatcagcctgcctacgtgctgcagatcttcccgccctgtgagttctctgagagtcacctgtcccgcctggcccctgacctccttgccagcatctccaacatctctccccacctcatgattgtcattgcctccgtgtgagccactgagtggttatcacctcagtgaatcttcccagggctctgcagtaaaaacaaaggacaacccagccaagcagaggaagaagctgccgaaggggacagactccactgccagacggccagccgtttgctgtcctgccgcccggctcagtcggccagacttcctctaggagtggtgctgctaccttgtatgtttacataatgctttagcccaaggacacatcaccaacccatggactcgcagacaccggggctgggtttctctttcctctttttggagaaaaggaacagggcagtggaatgaaaattttttgtttgtttgtttttaagaaacaagaaaacagaactgcctttgcactaaattagtgacttggacttttgcccagtgaagacaggctgtgacactctggatgtcttggtgtgtgtagacacacattgcagactcttaacgcaggaaggacttcaaacttctgctgagaccttggggtcaaggaacatttcattggttttttttgtccacccccatctcccttgctcatttggatgcgtcaccttaattctcctgctgccaccgtctttgattcaccgggatgtacagtttacagttgaagagcaaacagaaaggttttctcttggtgggatatgcagaacttgggatgtgtgtatatataaatatataatatatataaatatatataatactgacttaaaaaatcaaatcccccgacatacgttttttttaatctgtgccaaaaatgtgttttcagaggaaatcttattttcatattcagactttgtattgcccactcatttgtataagtgcgcttcggtacagcacgggtcctgctcccgcgatgtggaagtgtcacacggcacctgtacaaaaagactggctaacccctcttcctattaccttgatctcttcccccaacttcctaacacttattaatttatgaaactgtttttctcagcgcagttttgttttgtgtgtccattggattacaaactttattaaaaaatataaaacac

SEQ ID NO: 1255 - DNA, 1448 bp, Homo sapiens
gcacaccatgtgtccctccgcgcgcagcacgggggacttttcggtggggattttgggcgccgaccagacgcggcattttcggaaaatagcgccctgtgcagctgaagcgctttgtgtgtagcggggccgcgtcagcccggccgggtacgaggcgcctcgggtccccgcaccacctcctgctgccttcccgtcgccgctcccgaagcttttccagatgtccctggtagatttgggaaagaagcttttagaagcggcacgagcaggtcaagatgatgaagttcgtattttgatggcaaatggagctccctttactacagactggctgggaacttctccacttcatctagcagcacagtatggtcattattccaccacagaggtactgctgcgagctggtgtgagcagagatgccagaaccaaagtggaccgaacaccattacatatggcagcttctgagggccatgccagcatagtagaggttttacttaagcatggtgctgatgtcaatgcaaaggacatgttaaagatgacagctctccattgggccacagaacacaatcatcaagaggtggtggaacttttaatcaaatatggtgctgatgtacacacgcaaagtaaattttgtaaaactgcatttgatatttcaatagacaatggaaatgaagatttagcagagatattacagattgctatgcagaaccaaatcaacacaaacccagagagtcctgacactgtgacaatacatgctgcaacaccacagtttatcattggacctggaggggtggtgaacctaacaggtctggtatcttcagaaaattcatccaaggcaacagatgaaacgggtgtatctgctgttcagtttggaaactcttctacatcagtattagctacattagctgccttagctgaagcatctgctccattgtccaattcttcagaaactccagtagtggccacagaagaagtagttactgcagaatctgtggatggtgccattcagcaagtagttagttcagggggtcagcaagtcatcacaatagttacagatggaattcagcttggaaatttgcactctattccaaccagtggaattggtcagcccatcattgtgaccatgccagatggacaacaagtattaacagtaccagcaacagacattgctgaagaaactgttataagtgaagaaccaccagctaagagacaatgtatcgaaataattgaaaaccgggtggaatctgcagaaatagaagtaaggagtcttttacccggtgtgctttgccgcagtcatccaaaataaattcaattttttttgtcttttatatttattactgacagtattgttttgatacagaatgaaagtgcgtagtattttcattttgtttatttttgccttatacatatagcaagccctcaataaataaatattgaatgaatgaaaaaaaaaaaaa

SEQ ID NO: 1256 - DNA, 2842 bp, Homo sapiens
gcacaccatgtgtccctccgcgcgcagcacgggggacttttcggtggggattttgggcgccgaccagacgcggcattttcggaaaatagcgccctgtgcagctgaagcgctttgtgtgtagcggggccgcgtcagcccggccgggtacgaggcgcctcgggtccccgcaccacctcctgctgccttcccgtcgccgctcccgaagcttttccagatgtccctggtagatttgggaaagaagcttttagaagcggcacgagcaggtcaagatgatgaagttcgtattttgatggcaaatggagctccctttactacagactggctgggaacttctccacttcatctagcagcacagtatggtcattattccaccacagaggtactgctgcgagctggtgtgagcagagatgccagaaccaaagtggaccgaacaccattacatatggcagcttctgagggccatgccagcatagtagaggttttacttaagcatggtgctgatgtcaatgcaaaggacatgttaaagatgacagctctccattgggccacagaacacaatcatcaagaggtggtggaacttttaatcaaatatggtgctgatgtacacacgcaaagtaaattttgtaaaactgcatttgatatttcaatagacaatggaaatgaagatttagcagagatattacagattgctatgcagaaccaaatcaacacaaacccagagagtcctgacactgtgacaatacatgctgcaacaccacagtttatcattggacctggaggggtggtgaacctaacaggtctggtatcttcagaaaattcatccaaggcaacagatgaaacgggtgtatctgctgttcagtttggaaactcttctacatcagtattagctacattagctgccttagctgaagcatctgctccattgtccaattcttcagaaactccagtagtggccacagaagaagtagttactgcagaatctgtggatggtgccattcagcaagtagttagttcagggggtcagcaagtcatcacaatagttacagatggaattcagcttggaaatttgcactctattccaaccagtggaattggtcagcccatcattgtgaccatgccagatggacaacaagtattaacagtaccagcaacagacattgctgaagaaactgttataagtgaagaaccaccagctaagagacaatgtatcgaaataattgaaaaccgggtggaatctgcagaaatagaagagagagaagctcttcagaaacagctggatgaagcaaatcgagaagcacaaaaatatcgacagcagctcctaaagaaagaacaggaagcagaggcctacagacagaagttggaagctatgactcgtcttcagactaataaagaagctgtttaattgaaatgaacatgtagtttgattttacttttggtcaagaaagaatacaatcttgaactgtacacaacaaaggtacagccatgggaatacagaatgatagaagagactacagatggataattggacttaagccatgagctctgagttcttgtaacataaaactttactttagaagttgtgaaatgtatttaaaactgaattctgtaaatagtttttttttttttacagttccaaatgagttgataaagattgttgaagagatccaaaaccagaataagccactgtttttgtgaattctttttgattttagtacaaaccttaatttctcagaaacggaacagttttaagggtgatcgttgttggttaggccaaatgttgtgtaataattatggtggactgatgctggaattactcctgtaggtataaacctctgtatgaagagaagatttctcccaggaaatctttgtacagctttaagttgtgtcagattctctgaaaacattttttagaaagcaaaatttttatatttgttcaatttcagctatacccaagtagatttacatgtatatgaagcaaatatttttaaaaatttctgtttgtacatattctgcatgttttataatttcaaaatgcatcacttacataggtatttctcccacagaaatgatgaaagtgaccagaaaaaaacaaaaacaaaacccctttactctgtaggtcattgaaacgaagtaagctggcagctggttttattggaatgacagtgttctcggaaggagcagcctacaagataacttgaatttgccaattctgcaaaatctgtgcttttttgaaaatttaagagtggggacgtgaaactgtattctgtgccttccatcatgatttccacatgaaagcactttaaggcactgattttaagataatgtttttggaaaacccaatgcatatgggtttctgaaatattttatggacttatttctccccaggaaatgattcttacggaaaaaaattgcttttgtatgtagaacaggaactttttgtattacagtgatgcaatagacatgtctaatgtaacttctacttttccttttgaaagctcagtgtctgtgctatgacttgctctcatcacaatattgttgaattccacaatgtatggacattaaacactggcagactgttcactttttcttttttttttttggtaaaatattacttcaaacccctttttcttgctttatttttcagtgttttattgctttatgaactgtttaaccctgaaatccctctaggttatctatactgtataaaaaagcaattacccttaaaactgtactctggcctacttttctattttgcaattaaatatctttttcacatatgttcattgtagacttatgtttttatcacatcttattaacacattaaaaatgttatcctactgca

SEQ ID NO: 1257 - DNA, 2806 bp, Homo sapiens
gcacaccatgtgtccctccgcgcgcagcacgggggacttttcggtggggattttgggcgccgaccagacgcggcattttcggaaaatagcgccctgtgcagctgaagcgctttgtgtgtagcggggccgcgtcagcccggccgggtacgaggcgcctcgggtccccgcaccacctcctgctgccttcccgtcgccgctcccgaagcttttccagatgtccctggtagatttgggaaagaagcttttagaagcggcacgagcaggtcaagatgatgaagttcgtattttgatggcaaatggagctccctttactacagactggctgggaacttctccacttcatctagcagcacagtatggtcattattccaccacagaggtactgctgcgagctggtgtgagcagagatgccagaaccaaagtggaccgaacaccattacatatggcagcttctgagggccatgccagcatagtagaggttttacttaagcatggtgctgatgtcaatgcaaaggacatgttaaagatgacagctctccattgggccacagaacacaatcatcaagaggtggtggaacttttaatcaaatatggtgctgatgtacacacgcaaagtaaattttgtaaaactgcatttgatatttcaatagacaatggaaatgaagatttagcagagatattacagattgctatgcagaaccaaatcaacacaaacccagagagtcctgacactgtgacaatacatgctgcaacaccacagtttatcattggacctggaggggtggtgaacctaacagatgaaacgggtgtatctgctgttcagtttggaaactcttctacatcagtattagctacattagctgccttagctgaagcatctgctccattgtccaattcttcagaaactccagtagtggccacagaagaagtagttactgcagaatctgtggatggtgccattcagcaagtagttagttcagggggtcagcaagtcatcacaatagttacagatggaattcagcttggaaatttgcactctattccaaccagtggaattggtcagcccatcattgtgaccatgccagatggacaacaagtattaacagtaccagcaacagacattgctgaagaaactgttataagtgaagaaccaccagctaagagacaatgtatcgaaataattgaaaaccgggtggaatctgcagaaatagaagagagagaagctcttcagaaacagctggatgaagcaaatcgagaagcacaaaaatatcgacagcagctcctaaagaaagaacaggaagcagaggcctacagacagaagttggaagctatgactcgtcttcagactaataaagaagctgtttaattgaaatgaacatgtagtttgattttacttttggtcaagaaagaatacaatcttgaactgtacacaacaaaggtacagccatgggaatacagaatgatagaagagactacagatggataattggacttaagccatgagctctgagttcttgtaacataaaactttactttagaagttgtgaaatgtatttaaaactgaattctgtaaatagtttttttttttttacagttccaaatgagttgataaagattgttgaagagatccaaaaccagaataagccactgtttttgtgaattctttttgattttagtacaaaccttaatttctcagaaacggaacagttttaagggtgatcgttgttggttaggccaaatgttgtgtaataattatggtggactgatgctggaattactcctgtaggtataaacctctgtatgaagagaagatttctcccaggaaatctttgtacagctttaagttgtgtcagattctctgaaaacattttttagaaagcaaaatttttatatttgttcaatttcagctatacccaagtagatttacatgtatatgaagcaaatatttttaaaaatttctgtttgtacatattctgcatgttttataatttcaaaatgcatcacttacataggtatttctcccacagaaatgatgaaagtgaccagaaaaaaacaaaaacaaaacccctttactctgtaggtcattgaaacgaagtaagctggcagctggttttattggaatgacagtgttctcggaaggagcagcctacaagataacttgaatttgccaattctgcaaaatctgtgcttttttgaaaatttaagagtggggacgtgaaactgtattctgtgccttccatcatgatttccacatgaaagcactttaaggcactgattttaagataatgtttttggaaaacccaatgcatatgggtttctgaaatattttatggacttatttctccccaggaaatgattcttacggaaaaaaattgcttttgtatgtagaacaggaactttttgtattacagtgatgcaatagacatgtctaatgtaacttctacttttccttttgaaagctcagtgtctgtgctatgacttgctctcatcacaatattgttgaattccacaatgtatggacattaaacactggcagactgttcactttttcttttttttttttggtaaaatattacttcaaacccctttttcttgctttatttttcagtgttttattgctttatgaactgtttaaccctgaaatccctctaggttatctatactgtataaaaaagcaattacccttaaaactgtactctggcctacttttctattttgcaattaaatatctttttcacatatgttcattgtagacttatgtttttatcacatcttattaacacattaaaaatgttatcctactgca

SEQ ID NO: 1258 - DNA, 1412 bp, Homo sapiens
gcacaccatgtgtccctccgcgcgcagcacgggggacttttcggtggggattttgggcgccgaccagacgcggcattttcggaaaatagcgccctgtgcagctgaagcgctttgtgtgtagcggggccgcgtcagcccggccgggtacgaggcgcctcgggtccccgcaccacctcctgctgccttcccgtcgccgctcccgaagcttttccagatgtccctggtagatttgggaaagaagcttttagaagcggcacgagcaggtcaagatgatgaagttcgtattttgatggcaaatggagctccctttactacagactggctgggaacttctccacttcatctagcagcacagtatggtcattattccaccacagaggtactgctgcgagctggtgtgagcagagatgccagaaccaaagtggaccgaacaccattacatatggcagcttctgagggccatgccagcatagtagaggttttacttaagcatggtgctgatgtcaatgcaaaggacatgttaaagatgacagctctccattgggccacagaacacaatcatcaagaggtggtggaacttttaatcaaatatggtgctgatgtacacacgcaaagtaaattttgtaaaactgcatttgatatttcaatagacaatggaaatgaagatttagcagagatattacagattgctatgcagaaccaaatcaacacaaacccagagagtcctgacactgtgacaatacatgctgcaacaccacagtttatcattggacctggaggggtggtgaacctaacagatgaaacgggtgtatctgctgttcagtttggaaactcttctacatcagtattagctacattagctgccttagctgaagcatctgctccattgtccaattcttcagaaactccagtagtggccacagaagaagtagttactgcagaatctgtggatggtgccattcagcaagtagttagttcagggggtcagcaagtcatcacaatagttacagatggaattcagcttggaaatttgcactctattccaaccagtggaattggtcagcccatcattgtgaccatgccagatggacaacaagtattaacagtaccagcaacagacattgctgaagaaactgttataagtgaagaaccaccagctaagagacaatgtatcgaaataattgaaaaccgggtggaatctgcagaaatagaagtaaggagtcttttacccggtgtgctttgccgcagtcatccaaaataaattcaattttttttgtcttttatatttattactgacagtattgttttgatacagaatgaaagtgcgtagtattttcattttgtttatttttgccttatacatatagcaagccctcaataaataaatattgaatgaatgaaaaaaaaaaaaa

SEQ ID NO: 1259 - DNA, 1436 bp, Homo sapiens
gcacaccatgtgtccctccgcgcgcagcacgggggacttttcggtggggattttgggcgccgaccagacgcggcattttcggaaaatagcgccctgtgcagctgaagcgctttgtgtgtagcggggccgcgtcagcccggccgggtacgaggcgcctcgggtccccgcaccacctcctgctgccttcccgtcgccgctcccgaagcttttccaggtcacagcatatttgtggaggaagatgtccctggtagatttgggaaagaagcttttagaagcggcacgagcaggtcaagatgatgaagttcgtattttgatggcaaatggagctccctttactacagactggctgggaacttctccacttcatctagcagcacagtatggtcattattccaccacagaggtactgctgcgagctggtgtgagcagagatgccagaaccaaagtggaccgaacaccattacatatggcagcttctgagggccatgccagcatagtagaggttttacttaagcatggtgctgatgtcaatgcaaaggacatgttaaagatgacagctctccattgggccacagaacacaatcatcaagaggtggtggaacttttaatcaaatatggtgctgatgtacacacgcaaagtaaattttgtaaaactgcatttgatatttcaatagacaatggaaatgaagatttagcagagatattacagattgctatgcagaaccaaatcaacacaaacccagagagtcctgacactgtgacaatacatgctgcaacaccacagtttatcattggacctggaggggtggtgaacctaacagatgaaacgggtgtatctgctgttcagtttggaaactcttctacatcagtattagctacattagctgccttagctgaagcatctgctccattgtccaattcttcagaaactccagtagtggccacagaagaagtagttactgcagaatctgtggatggtgccattcagcaagtagttagttcagggggtcagcaagtcatcacaatagttacagatggaattcagcttggaaatttgcactctattccaaccagtggaattggtcagcccatcattgtgaccatgccagatggacaacaagtattaacagtaccagcaacagacattgctgaagaaactgttataagtgaagaaccaccagctaagagacaatgtatcgaaataattgaaaaccgggtggaatctgcagaaatagaagtaaggagtcttttacccggtgtgctttgccgcagtcatccaaaataaattcaattttttttgtcttttatatttattactgacagtattgttttgatacagaatgaaagtgcgtagtattttcattttgtttatttttgccttatacatatagcaagccctcaataaataaatattgaatgaatgaaaaaaaaaaaaa

SEQ ID NO: 1260 - DNA, 1323 bp, Homo sapiens
cgcacgggcgcgcgcagtgttgacgcgcttcttagctggtgcgcgccggagcccaaattccaagtggaaactgcaggcgcacgagggaggaacgcgtggagcatgaaaaggcagggggcctcctctgagcgaaaacgagcgcggataccgtccgggaaggccggagcagcaaatggatttctcatggaagtttgtgttgattcagtggaatcagctgtgaatgcagaaagaggaggtgctgatcggattgaattatgttctggtttatcagaggggggaactacacccagcatgggtgtccttcaagtagtgaagcagagtgttcagatcccagtttttgtgatgattcggccacggggaggtgattttttgtattcagatcgtgaaattgaggtgatgaaggctgacattcgtcttgccaagccttatggtgctgatggtttggtttttggggcattgactgaagatggacacattgacaaagagctgtgtatgtcccttatggctatttgccgccctctgccagtcactttccaccgagcctttgacatggttcatgatccaatggcagctctggagaccctcttaaccttgggatttgaacgcgtgttgaccagtggatgtgacagttcagcattagaagggctacccctaataaatcgactcattgagcaggcaaaaggcaggattgtggtaatgccaggaggtggtataacagacagaaatctacaaaggatccttgagggttcaggtgctacagaattccactgttctgctcggtctactagagactcgggaatgaagtttcgaaattcatctgttgccatgggagcctcactttcttgctcagaatattccctaaaggtaacagatgtgaccaaagtaaggactttgaatgctatcgcaaagaacatcctggtgtagccagacctctctgagagacatggatatcacaggatgaaggtagaactataatctgcaattctctatgacacagctttaaccttcttctctggccaggacagtcgcaatctttgttttaagtttcacatggccatggagaatgtgcccaagaagaaaaagaatttgaaacagagatacagtcacttcctttgcttagtcttaccagtgattgtcatcatggttaaagctggtctgtgcttcttccatagacagaagcttagtctgttttcagtggaattaattgatgaactgggaaaattttaactgcatggtatgaattcagagtgtgacttaagggtcaattcaaagcagtattttgacttttcatttgtaaaataaaaatttccactattaaaaaaa

SEQ ID NO: 1261 - DNA, 1968 bp, Homo sapiens
acagaaggcggggccagcgccgctgccgggtgctggaggcgccattggagccggcttggctggcgagcccggctgaggagcctcttgggtcgcacttaccgccgcgtccgctcccggtccctggcccctcagcggcatggcgtgcggggcgacgctgaagcggcccatggagttcgaggcggcgctgctgagccccggctccccgaagcggcggcgctgcgcccctctgcccggccccactccgggcctcaggcccccggacgccgagccgccgccgccgtttcagacgcagaccccaccgcagagtctgcagcagcccgccccgcccggcagcgagcggcgccttccaactccggagcaaatttttcagaacataaaacaagaatatagtcgttatcagaggtggagacatttagaagttgttcttaatcagagtgaagcttgtgcttcggaaagtcaacctcactcctcagcactcacagcacctagctctccaggttcctcatggatgaagaaggaccagcccacatttaccctccgacaagttggcataatatgtgagcgcctcttaaaagactatgaagataaaattcgggaggagtatgagcaaatcctcaataccaaactagcagaacaatatgaatcttttgtgaaattcacacatgatcagattatgcgacggtatgggacaaggccaacaagctatgtgtcatgaagctttgtcacatatctgggtatcaggtttgacctcaagagatggccgctgtacactttttgcaactggtttgatgtcacatttcagctccaactttgcatcctgagaacacttaaacgtttctgcaggtccattttatacaacttgaaagaccgtaaaactttctggttgccacaagcatatctttcttttctgctcatccaataaacagctgtgccctactgtgatagattttccaaacaaaaatacctggagcagcagtttagcaaaatatgccttcagtggcattcaacaaatggagtttccccaagcacagttctgtaagaagtgcgtgtgagagtgtgtgtatatgtgtgtatgtgtattttaagttattatttgtattgtgcaaaaattttttttttgatcttggggattctggctgtgaatttggtgcacgacaattatggtaaaaaaacatttgcttggtctaaagaagatcattaatgttttgtgaccatacaagttgtaacagtggattgtttttatgtgtaggtattgttaaatacagggactgtttccaggcacagaatatgaatcgtaagttaggatggacattagatgtgattatgatgataaagcgaaggtctgcggtcctgtatctacagacacgtggtgagaaattagaacaaactggagacgggccattgacacatggactctgcctgggcatgttaggttaattctttgactccaagccttaaaatactcacatggagtcagcgctcacctcattcacacaattatcatagagctccctggacactgaacctctaaagggaaaaggtctaccctggagccaggagcatcagggttggcttgggagcatgagaggtgagcccagggctaggcctgggccaggccccggcagcactgctacttgggaggagccacttcacctttgtattagttattaaaaaatataatttgggctgggcgcagtggctcacgcctgtaatcccagcactttgggagtccgaggcatgcggatcacttgaggtcaggagttcgagaccaccctggccaatatggtgaaaccccatctctactaaaaatacaacaaagttagccgggcgtggtggcaggcgtctgtaatcccagctgcttgggaggctgaggcagtagaatcacttgaaccctggaggtggcggttgcagtgagcacagatcatgccactgcactccagcctgggcaacaaaacgagacttcgtctc

SEQ ID NO: 1262 - DNA, 3046 bp, Homo sapiens
agtcacgtgacatgaggagaggtgggcgggtacctggaggaagctcgcggcgtcggtggcggtggcgcgcggcggccgctgagaccggggctttgagtcgcaccccgcggcccgccccccgccgccaccctcgcagatccgtgctttttcccctttgcttctctcccgtactgggtcagtcctgtccgcgctcgcgcgtcggtttgcgggtgtgcgcaggcgcggcaggggccattagccctttgggtgggcggtggagcccgggagcgcgcgggcgagaccatggcgggtagcagcactgggggcggtggggttggggagacgaaggtgatttaccacctggatgaggaagagactccctacctggtgaagatccctgtccccgccgagcgcatcaccctcggcgatttcaagagcgtcctgcagcggcccgcgggcgccaagtactttttcaagtctatggatcaggatttcggggtggtgaaggaagaaatttcagatgacaacgcccgcctcccctgcttcaacggaagggtggtatcctggctggtgtcctcagataatccccaacccgagatggcccctccagtccatgagcctcgggcagaactggcgcctccagccccacctttacctcctttgccacccgagaggaccagcggcattggggactcaaggcctccatccttccaccctaatgtgtccagcagccatgagaatctggagcctgagacagaaaccgagtcagtagtgtcactgaggcgggagcggcctcgcaggagagacagcagtgagcatggcgctgggggccacaggactggtggcccctcaaggctggagcgccacctggccggatacgagagctcctctaccctcatgaccagcgagctggagagtaccagcctgggggactcggacgaggaggacaccatgagcaggttcagcagctccacggagcagagcagtgcctcccgcctccttaagcgccaccggcggcgaaggaagcagaggccaccccgcctggagaggacgtcatccttcagcagcgtcacagattccacaatgtctctcaatatcatcacagtcacgctaaacatggagaagtacaacttcctgggtatctccattgttggccagagcaatgagcggggagacggaggcatctacattggctccatcatgaagggtggggctgtggcggccgacgggcgcattgagccaggggacatgcttttgcaggtgaatgacatgaactttgagaacatgagcaacgatgacgctgtgcgggtgctgagggacattgtgcacaagcctggccccattgtgctgactgtggccaagtgctgggatccctctcctcaggcctatttcactctcccccgaaatgagcccatccagccaattgaccctgctgcctgggtgtcccattccgcggctctgactggcaccttcccagcctatccaggttcctcctccatgagcaccattacatctggatcgtctttgcctgatggctgtgaaggccggggtctctccgtccatacggacatggcatcggtgaccaaggccatggcagctccagagtctggactggaagtccgggaccgcatgtggctcaagatcaccatccctaatgcctttctgggctcggatgtggttgactggctctaccatcacgtggagggctttcctgagcggcgggaggcccgcaagtatgccagcgggctgctcaaagcaggcctgatccgacacaccgtcaacaagatcaccttctctgagcagtgctattacgtcttcggagacctcagtggtggctgtgagagctacctagtcaacctgtctctcaatgacaacgatggctccagtggggcttcagaccaggataccctggctcctctgcctggggccaccccctggcccctgctgcccactttctcctaccaataccctgccccacacccctacagcccgcagcctccaccctaccatgagctttcatcttacacctatggtgggggcagtgccagcagccagcatagtgagggcagccggagcagtgggtcgacacggagtgatgggggggcagggcgcacggggaggcccgaggagcgggcccccgagtccaagtccggcagtggcagtgagtctgagccctccagccgagggggcagccttcggcggggtggggaagcaagtgggactagcgatgggggccctcctccatccagaggctcaactgggggtgcccctaatctccgagcccacccagggctccatccctatggaccgccccctggcatggccctcccctacaaccccatgatggtggtcatgatgcccccacctccacctccagtccctccagcagtgcagcctccgggggcccctccagtcagagacctgggctctgtgcccccagaactgacagccagccgccaaagcttccacatggccatgggcaatcccagcgagttctttgtggatgttatgtagcccactgtggggccaggctgggccgggcgctcctggtgtgtgactgggtgtcctggccgtcatgtgcttgctcttacagtgcctgggctcagcctaccagctgctgccatacaggagattgtggccactgtgactctcaccagcagtgcctggttcctcccccttccctcaggggtagacaagggacctttgattatttttagctttgtttttttataagcctttttgggggttaaaatagagtttcttacatttttgggacttttttaataggcatttcctcttttatatgaagaattcccatccattgggccccttctaaccccagaatgtgacctcctcctccagttacccacagccctgccctttgcagggttgggggtggtcagcggtaccccggggttaggcatcctagacagcagcctgaggaagctgggagatttgggccatgtagctgcctttgttactctatttattttagtcacttgtataaaacaccaaataaagcaatagaggcaaactcaaaaaaaaaaaaaaaaaaaaaaaaaaaaaa

SEQ ID NO: 1263 - DNA, 2267 bp, Homo sapiens
gcataggctaggtagcgaggccgcgtgtgaatcggccgaggccgagtttctgcgcttccttctccctctctccagacgtcgtggtcgttcggtcctatgtcgcgccgggccctccggaggctgaggggggaacagcgcggccaggagcccctcgggcccggcgccttgcatttcgatctccgtgatgacgatgacgcggaagaagaagggcccaagcgggagcttggtgtccggcgtcccgggggcgcagggaaggagggcgtccgagtcaacaaccgcttcgagctgataaacattgacgatcttgaggatgaccctgtggtgaacggggagaggtctggctgtgcgctcacagacgctgtggcaccagggaacaaaggaaggggtcagcgtggaaacacagagagcaagacggatggagatgacaccgagacagtgccctcagagcagtctcatgcaagtggcaaactccggaagaagaaaaaaaaacagaaaaacaagaaaagcagcacgggagaagcatcggaaaacggactagaagatatcgatcgcatcctagagaggattgaggacagcactgggttgaaccgtcccggcccagctcccctgagctccaggaagcacgttctctacgtggagcacagacacttgaatccagacacagaactgaaaaggtattttggtgcccgggcaatcctgggggagcaaaggccacggcagagacaacgtgtgtaccccaagtgcacatggctgaccacccctaaaagcacctggccccgctacagcaaaccaggtctgtccatgcggctgctggaatcaaaaaaaggcctctccttctttgcgtttgagcacagtgaggagtaccagcaggctcagcacaagttcctggtggccgtggagtctatggagccgaacaacatcgtggttctgctccagacgagcccttaccacgttgactcactcctgcagctcagcgatgcctgccgctttcaagaggatcaggagatggctcgagacctcgtagagagagcgctgtacagcatggaatgtgcgttccaccccctgttcagtctcaccagtggggcctgccggctggattaccgcagacccgagaacaggagcttctacctggccctctacaagcagatgagcttcctggagaagcgaggctgcccgcgcacggcgctggagtactgcaagctcatcctgagtctcgagccggatgaggaccccctctgcatgctgctgctcatcgaccacctggccttgcgggcccggaactacgagtacctgatccgcctcttccaggagtgggaggctcatcggaacctgtcccagctccctaattttgccttctctgttccactggcgtatttcctgctgagccagcagacagacctccctgagtgtgagcagagctctgccaggcagaaggcctctctcctgatacagcaggcgctcaccatgttccctggagtcctcctgcccctgctcgagtcttgcagtgtgcggcccgacgccagcgtttccagtcaccgcttctttggacccaatgctgaaataagccagccccctgccctgagccagctggtgaacctgtaccttgggaggtcacactttctctggaaagagcccgccaccatgagctggctggaggagaacgtccacgaggttctgcaagcagtggacgccggggacccagccgtggaagcctgtgagaaccggcggaaggtgctctaccagcgtgcacccaggaatatccaccgccatgtgatcctctctgagatcaaggaagccgtcgctgccctgcccccggacgtgaccacgcagtctgtgatggggtttgatcctctgcctccttcggacacaatctactcctacgtcaggccagagaggctaagtcctatcagccatggaaacaccattgctctcttcttccggtcactgttgccaaactataccatggagggggagaggcccgaggaaggagtggctgggggtctgaaccgcaaccagggcctgaacaggctgatgctggctgtgcgcgacatgatggccaacttccacctcaacgacctggaggcgccgcacgaggacgacgctgagggggagggggagtgggactgagcgtccgcagaggtgaccgaaaagccgtatgatgatgttcccgatttctctgttggtcggagtcggccagttgcctgaagtagggaagctgagtgtgtcgctccctggtccactgtttctcctataaatgtaaatgggtc

SEQ ID NO: 1264 - DNA, 2211 bp, Homo sapiens
ggcgaaggctttgtagagttcagaaatgaggctgactataaggctgctctgtgtcgtcataaacagtacatgggcaatcgctttattcaagttcatccaattactaagaaaggtatgctagaaaagatagatatgattcgaaaaagactgcagaacttcagctatgaccagagggaaatgatactaaatccagagggggatgtcaactctgccaaagtctgtgcccacataacaaatattccattcagcattacaaagatggatgttcttcagttcctagaaggaatcccagtggatgaaaatgctgtacatgttcttgttgataacaatgggcaaggtctaggacaggcattggttcagtttaaaaatgaagatgatgcacatggcccactgcgtgaccttggttcagctgtccatttcctgtgaccatctcattgacaaggacatcggctccaagtctgacccactctgcgtccttttacaggatgtgggagggggcagctgggctgagcttggccggactgaacgggtgcggaactgctcaagccctgagttctccaagactctacagcttgagtaccgctttgagacagtccagaagctacgctttggaatctatgacatagacaacaagacgccagagctgagggatgatgacttcctagggggtgctgagtgttccctaggacagattgtgtccagccaggtactgactctccccttgatgctgaagcctggaaaacctgctgggcgggggaccatcacggtctcagctcaggaattaaaggacaatcgtgtagtaaccatggaggtagaggccagaaacctagataagaaggacttcctgggaaaatcagatccatttctggagttcttccgccagggtgatgggaaatggcacctggtgtacagatctgaggtcatcaagaacaacctgaaccctacatggaagcgtttctcagtccccgttcagcatttctgtggtgggaaccccagcacacccatccaggtgcaatgctccgattatgacagtgacgggtcacatgatctcatcggtaccttccacaccagcttggcccagctgcaggcagtcccggctgagtttgaatgcatccaccctgagaagcagcagaaaaagaaaagctacaagaactctggaactatccgtgtcaagatttgtcgggtagaaacagagtactcctttctggactatgtgatgggaggctgtcagatcaacttcactgtgggcgtggacttcactggctccaatggagacccctcctcacctgactccctacactacctgagtccaacaggggtcaatgagtacctgatggcactgtggagtgtgggcagcgtggttcaggactatgactcagacaagctgttccctgcatttggatttggggcccaggttccccctgactggcaggtctcgcatgaatttgccttgaatttcaaccccagtaacccctactgtgcaggcatccagggcattgtggatgcctaccgccaagccctgccccaagttcgcctctatggccctaccaactttgcacccatcatcaaccatgtggccaggtttgcagcccaggctgcacatcaggggactgcctcgcaatacttcatgctgttgctgctgactgatggtgctgtgacggatgtggaagccacacgtgaggctgtggtgcgtgcctcgaacctgcccatgtcagtgatcattgtgggtgtgggtggtgctgactttgaggccatggagcagctggacgctgatggtggacccctgcatacacgttctgggcaggctgctgcccgcgacattgtgcagtttgtaccctaccgccggttccagaatgcccctcgggaggcattggcacagaccgtgctcgcagaagtgcccacacaactggtctcatacttcagggcccagggttgggccccgctcaagccacttccaccctcagccaaggatcctgcacaggccccccaggcctaggttcccttggaggctgtggcaagtcctcaatcctgtgtcccagaggtccctctgggccacaacccaacccttctcactctcctcagtgctagcactttgtattttttgatacttttatacttgtttctgcttttgctgctcttgatcccacctttgctcctgacaaccctcattcaataaagaccagtgaagaccaaaaaaaaaaaaaaaaaaaa

SEQ ID NO: 1265 - DNA, 1996 bp, Homo sapiens
cggagccgctgagcgggccgacggccattttgtgaagcggcgaaggaggtggtggctgcgttgggctccgggaagccgttcgggctggggctgtcggccgcggggcggaggcactcgcgcggggggtaattcggggtctgggttctggtgccgcgcagctttccccgatggcccactgcgtgaccttggttcagctgtccatttcctgtgaccatctcattgacaaggacatcggctccaagtctgacccactctgcgtccttttacaggatgtgggagggggcagctgggctgagcttggccggactgaacgggtgcggaactgctcaagccctgagttctccaagactctacagcttgagtaccgctttgagacagtccagaagctacgctttggaatctatgacatagacaacaagacgccagagctgagggatgatgacttcctagggggtgctgagtgttccctaggacagattgtgtccagccaggtactgactctccccttgatgctgaagcctggaaaacctgctgggcgggggaccatcacggtctcagctcaggaattaaaggacaatcgtgtagtaaccatggaggtagaggccagaaacctagataagaaggacttcctgggaaaatcagatccatttctggagttcttccgccagggtgatgggaaatggcacctggtgtacagatctgaggtcatcaagaacaacctgaaccctacatggaagcgtttctcagtccccgttcagcatttctgtggtgggaaccccagcacacccatccaggtgcaatgctccgattatgacagtgacgggtcacatgatctcatcggtaccttccacaccagcttggcccagctgcaggcagtcccggctgagtttgaatgcatccaccctgagaagcagcagaaaaagaaaagctacaagaactctggaactatccgtgtcaagatttgtcgggtagaaacagagtactcctttctggactatgtgatgggaggctgtcagatcaacttcactgtgggcgtggacttcactggctccaatggagacccctcctcacctgactccctacactacctgagtccaacaggggtcaatgagtacctgatggcactgtggagtgtgggcagcgtggttcaggactatgactcagacaagctgttccctgcatttggatttggggcccaggttccccctgactggcaggtctcgcatgaatttgccttgaatttcaaccccagtaacccctactgtgcaggcatccagggcattgtggatgcctaccgccaagccctgccccaagttcgcctctatggccctaccaactttgcacccatcatcaaccatgtggccaggtttgcagcccaggctgcacatcaggggactgcctcgcaatacttcatgctgttgctgctgactgatggtgctgtgacggatgtggaagccacacgtgaggctgtggtgcgtgcctcgaacctgcccatgtcagtgatcattgtgggtgtgggtggtgctgactttgaggccatggagcagctggacgctgatggtggacccctgcatacacgttctgggcaggctgctgcccgcgacattgtgcagtttgtaccctaccgccggttccagaatgcccctcgggaggcattggcacagaccgtgctcgcagaagtgcccacacaactggtctcatacttcagggcccagggttgggccccgctcaagccacttccaccctcagccaaggatcctgcacaggccccccaggcctaggttcccttggaggctgtggcaagtcctcaatcctgtgtcccagaggtccctctgggccacaacccaacccttctcactctcctcagtgctagcactttgtattttttgatacttttatacttgtttctgcttttgctgctcttgatcccacctttgctcctgacaaccctcattcaataaagaccagtgaagaccaaaaaaaaaaaaaaaaaaaa

SEQ ID NO: 1266 - DNA, 1954 bp, Homo sapiens
cggagccgctgagcgggccgacggccattttgtgaagcggcgaaggaggtggtggctgcgttgggctccgggaagccgttcgggctggggctgtcggccgcggggcggaggcactcgcgcgggggatggcccactgcgtgaccttggttcagctgtccatttcctgtgaccatctcattgacaaggacatcggctccaagtctgacccactctgcgtccttttacaggatgtgggagggggcagctgggctgagcttggccggactgaacgggtgcggaactgctcaagccctgagttctccaagactctacagcttgagtaccgctttgagacagtccagaagctacgctttggaatctatgacatagacaacaagacgccagagctgagggatgatgacttcctagggggtgctgagtgttccctaggacagattgtgtccagccaggtactgactctccccttgatgctgaagcctggaaaacctgctgggcgggggaccatcacggtctcagctcaggaattaaaggacaatcgtgtagtaaccatggaggtagaggccagaaacctagataagaaggacttcctgggaaaatcagatccatttctggagttcttccgccagggtgatgggaaatggcacctggtgtacagatctgaggtcatcaagaacaacctgaaccctacatggaagcgtttctcagtccccgttcagcatttctgtggtgggaaccccagcacacccatccaggtgcaatgctccgattatgacagtgacgggtcacatgatctcatcggtaccttccacaccagcttggcccagctgcaggcagtcccggctgagtttgaatgcatccaccctgagaagcagcagaaaaagaaaagctacaagaactctggaactatccgtgtcaagatttgtcgggtagaaacagagtactcctttctggactatgtgatgggaggctgtcagatcaacttcactgtgggcgtggacttcactggctccaatggagacccctcctcacctgactccctacactacctgagtccaacaggggtcaatgagtacctgatggcactgtggagtgtgggcagcgtggttcaggactatgactcagacaagctgttccctgcatttggatttggggcccaggttccccctgactggcaggtctcgcatgaatttgccttgaatttcaaccccagtaacccctactgtgcaggcatccagggcattgtggatgcctaccgccaagccctgccccaagttcgcctctatggccctaccaactttgcacccatcatcaaccatgtggccaggtttgcagcccaggctgcacatcaggggactgcctcgcaatacttcatgctgttgctgctgactgatggtgctgtgacggatgtggaagccacacgtgaggctgtggtgcgtgcctcgaacctgcccatgtcagtgatcattgtgggtgtgggtggtgctgactttgaggccatggagcagctggacgctgatggtggacccctgcatacacgttctgggcaggctgctgcccgcgacattgtgcagtttgtaccctaccgccggttccagaatgcccctcgggaggcattggcacagaccgtgctcgcagaagtgcccacacaactggtctcatacttcagggcccagggttgggccccgctcaagccacttccaccctcagccaaggatcctgcacaggccccccaggcctaggttcccttggaggctgtggcaagtcctcaatcctgtgtcccagaggtccctctgggccacaacccaacccttctcactctcctcagtgctagcactttgtattttttgatacttttatacttgtttctgcttttgctgctcttgatcccacctttgctcctgacaaccctcattcaataaagaccagtgaagaccaaaaaaaaaaaaaaaaaaaa

SEQ ID NO: 1267 - DNA, 2081 bp, Homo sapiens
cggagccgctgagcgggccgacggccattttgtgaagcggcgaaggaggtggtggctgcgttgggctccgggaagccgttcgggctggggctgtcggccgcggggcggaggcactcgcgcggggggtaattcggggtctgggttctggtgccgcgcagctttccccgtctaaaagttggttttaattggttgcccacaggattgacttggcctctacttcttgttaaggaaattcatctcttgttttatcagatggcccactgcgtgaccttggttcagctgtccatttcctgtgaccatctcattgacaaggacatcggctccaagtctgacccactctgcgtccttttacaggatgtgggagggggcagctgggctgagcttggccggactgaacgggtgcggaactgctcaagccctgagttctccaagactctacagcttgagtaccgctttgagacagtccagaagctacgctttggaatctatgacatagacaacaagacgccagagctgagggatgatgacttcctagggggtgctgagtgttccctaggacagattgtgtccagccaggtactgactctccccttgatgctgaagcctggaaaacctgctgggcgggggaccatcacggtctcagctcaggaattaaaggacaatcgtgtagtaaccatggaggtagaggccagaaacctagataagaaggacttcctgggaaaatcagatccatttctggagttcttccgccagggtgatgggaaatggcacctggtgtacagatctgaggtcatcaagaacaacctgaaccctacatggaagcgtttctcagtccccgttcagcatttctgtggtgggaaccccagcacacccatccaggtgcaatgctccgattatgacagtgacgggtcacatgatctcatcggtaccttccacaccagcttggcccagctgcaggcagtcccggctgagtttgaatgcatccaccctgagaagcagcagaaaaagaaaagctacaagaactctggaactatccgtgtcaagatttgtcgggtagaaacagagtactcctttctggactatgtgatgggaggctgtcagatcaacttcactgtgggcgtggacttcactggctccaatggagacccctcctcacctgactccctacactacctgagtccaacaggggtcaatgagtacctgatggcactgtggagtgtgggcagcgtggttcaggactatgactcagacaagctgttccctgcatttggatttggggcccaggttccccctgactggcaggtctcgcatgaatttgccttgaatttcaaccccagtaacccctactgtgcaggcatccagggcattgtggatgcctaccgccaagccctgccccaagttcgcctctatggccctaccaactttgcacccatcatcaaccatgtggccaggtttgcagcccaggctgcacatcaggggactgcctcgcaatacttcatgctgttgctgctgactgatggtgctgtgacggatgtggaagccacacgtgaggctgtggtgcgtgcctcgaacctgcccatgtcagtgatcattgtgggtgtgggtggtgctgactttgaggccatggagcagctggacgctgatggtggacccctgcatacacgttctgggcaggctgctgcccgcgacattgtgcagtttgtaccctaccgccggttccagaatgcccctcgggaggcattggcacagaccgtgctcgcagaagtgcccacacaactggtctcatacttcagggcccagggttgggccccgctcaagccacttccaccctcagccaaggatcctgcacaggccccccaggcctaggttcccttggaggctgtggcaagtcctcaatcctgtgtcccagaggtccctctgggccacaacccaacccttctcactctcctcagtgctagcactttgtattttttgatacttttatacttgtttctgcttttgctgctcttgatcccacctttgctcctgacaaccctcattcaataaagaccagtgaagaccaaaaaaaaaaaaaaaaaaaa

SEQ ID NO: 1268 - DNA, 2049 bp, Homo sapiens
cggagccgctgagcgggccgacggccattttgtgaagcggcgaaggaggtggtggctgcgttgggctccgggaagccgttcgggctggggctgtcggccgcggggcggaggcactcgcgcggggggtaattcggggtctgggttctggtgccgcgcagctttccccggattgacttggcctctacttcttgttaaggaaattcatctcttgttttatcagatggcccactgcgtgaccttggttcagctgtccatttcctgtgaccatctcattgacaaggacatcggctccaagtctgacccactctgcgtccttttacaggatgtgggagggggcagctgggctgagcttggccggactgaacgggtgcggaactgctcaagccctgagttctccaagactctacagcttgagtaccgctttgagacagtccagaagctacgctttggaatctatgacatagacaacaagacgccagagctgagggatgatgacttcctagggggtgctgagtgttccctaggacagattgtgtccagccaggtactgactctccccttgatgctgaagcctggaaaacctgctgggcgggggaccatcacggtctcagctcaggaattaaaggacaatcgtgtagtaaccatggaggtagaggccagaaacctagataagaaggacttcctgggaaaatcagatccatttctggagttcttccgccagggtgatgggaaatggcacctggtgtacagatctgaggtcatcaagaacaacctgaaccctacatggaagcgtttctcagtccccgttcagcatttctgtggtgggaaccccagcacacccatccaggtgcaatgctccgattatgacagtgacgggtcacatgatctcatcggtaccttccacaccagcttggcccagctgcaggcagtcccggctgagtttgaatgcatccaccctgagaagcagcagaaaaagaaaagctacaagaactctggaactatccgtgtcaagatttgtcgggtagaaacagagtactcctttctggactatgtgatgggaggctgtcagatcaacttcactgtgggcgtggacttcactggctccaatggagacccctcctcacctgactccctacactacctgagtccaacaggggtcaatgagtacctgatggcactgtggagtgtgggcagcgtggttcaggactatgactcagacaagctgttccctgcatttggatttggggcccaggttccccctgactggcaggtctcgcatgaatttgccttgaatttcaaccccagtaacccctactgtgcaggcatccagggcattgtggatgcctaccgccaagccctgccccaagttcgcctctatggccctaccaactttgcacccatcatcaaccatgtggccaggtttgcagcccaggctgcacatcaggggactgcctcgcaatacttcatgctgttgctgctgactgatggtgctgtgacggatgtggaagccacacgtgaggctgtggtgcgtgcctcgaacctgcccatgtcagtgatcattgtgggtgtgggtggtgctgactttgaggccatggagcagctggacgctgatggtggacccctgcatacacgttctgggcaggctgctgcccgcgacattgtgcagtttgtaccctaccgccggttccagaatgcccctcgggaggcattggcacagaccgtgctcgcagaagtgcccacacaactggtctcatacttcagggcccagggttgggccccgctcaagccacttccaccctcagccaaggatcctgcacaggccccccaggcctaggttcccttggaggctgtggcaagtcctcaatcctgtgtcccagaggtccctctgggccacaacccaacccttctcactctcctcagtgctagcactttgtattttttgatacttttatacttgtttctgcttttgctgctcttgatcccacctttgctcctgacaaccctcattcaataaagaccagtgaagaccaaaaaaaaaaaaaaaaaaaa

SEQ ID NO: 1269 - DNA, 2097 bp, Homo sapiens
cggagccgctgagcgggccgacggccattttgtgaagcggcgaaggaggtggtggctgcgttgggctccgggaagccgttcgggctggggctgtcggccgcggggcggaggcactcgcgcggggggtgtgtgtggtttcagcgcagcatggctgtggtcatccgtttgcaaggtctcccaattgtggcggggaccatggacattcgccacttcttctctggattgaccattcctgatgggggcgtgcatattgtagggggtgaactggatggcccactgcgtgaccttggttcagctgtccatttcctgtgaccatctcattgacaaggacatcggctccaagtctgacccactctgcgtccttttacaggatgtgggagggggcagctgggctgagcttggccggactgaacgggtgcggaactgctcaagccctgagttctccaagactctacagcttgagtaccgctttgagacagtccagaagctacgctttggaatctatgacatagacaacaagacgccagagctgagggatgatgacttcctagggggtgctgagtgttccctaggacagattgtgtccagccaggtactgactctccccttgatgctgaagcctggaaaacctgctgggcgggggaccatcacggtctcagctcaggaattaaaggacaatcgtgtagtaaccatggaggtagaggccagaaacctagataagaaggacttcctgggaaaatcagatccatttctggagttcttccgccagggtgatgggaaatggcacctggtgtacagatctgaggtcatcaagaacaacctgaaccctacatggaagcgtttctcagtccccgttcagcatttctgtggtgggaaccccagcacacccatccaggtgcaatgctccgattatgacagtgacgggtcacatgatctcatcggtaccttccacaccagcttggcccagctgcaggcagtcccggctgagtttgaatgcatccaccctgagaagcagcagaaaaagaaaagctacaagaactctggaactatccgtgtcaagatttgtcgggtagaaacagagtactcctttctggactatgtgatgggaggctgtcagatcaacttcactgtgggcgtggacttcactggctccaatggagacccctcctcacctgactccctacactacctgagtccaacaggggtcaatgagtacctgatggcactgtggagtgtgggcagcgtggttcaggactatgactcagacaagctgttccctgcatttggatttggggcccaggttccccctgactggcaggtctcgcatgaatttgccttgaatttcaaccccagtaacccctactgtgcaggcatccagggcattgtggatgcctaccgccaagccctgccccaagttcgcctctatggccctaccaactttgcacccatcatcaaccatgtggccaggtttgcagcccaggctgcacatcaggggactgcctcgcaatacttcatgctgttgctgctgactgatggtgctgtgacggatgtggaagccacacgtgaggctgtggtgcgtgcctcgaacctgcccatgtcagtgatcattgtgggtgtgggtggtgctgactttgaggccatggagcagctggacgctgatggtggacccctgcatacacgttctgggcaggctgctgcccgcgacattgtgcagtttgtaccctaccgccggttccagaatgcccctcgggaggcattggcacagaccgtgctcgcagaagtgcccacacaactggtctcatacttcagggcccagggttgggccccgctcaagccacttccaccctcagccaaggatcctgcacaggccccccaggcctaggttcccttggaggctgtggcaagtcctcaatcctgtgtcccagaggtccctctgggccacaacccaacccttctcactctcctcagtgctagcactttgtattttttgatacttttatacttgtttctgcttttgctgctcttgatcccacctttgctcctgacaaccctcattcaataaagaccagtgaagaccaaaaaaaaaaaaaaaaaaaa

SEQ ID NO: 1270 - DNA, 2224 bp, Homo sapiens
cggagccgctgagcgggccgacggccattttgtgaagcggcgaaggaggtggtggctgcgttgggctccgggaagccgttcgggctggggctgtcggccgcggggcggaggcactcgcgcggggggtaattcggggtctgggttctggtgccgcgcagctttccccgtctaaaagttggttttaattggttgcccacaggattgacttggcctctacttcttgttaaggaaattcatctcttgttttatcaggtgtgtgtggtttcagcgcagcatggctgtggtcatccgtttgcaaggtctcccaattgtggcggggaccatggacattcgccacttcttctctggattgaccattcctgatgggggcgtgcatattgtagggggtgaactggatggcccactgcgtgaccttggttcagctgtccatttcctgtgaccatctcattgacaaggacatcggctccaagtctgacccactctgcgtccttttacaggatgtgggagggggcagctgggctgagcttggccggactgaacgggtgcggaactgctcaagccctgagttctccaagactctacagcttgagtaccgctttgagacagtccagaagctacgctttggaatctatgacatagacaacaagacgccagagctgagggatgatgacttcctagggggtgctgagtgttccctaggacagattgtgtccagccaggtactgactctccccttgatgctgaagcctggaaaacctgctgggcgggggaccatcacggtctcagctcaggaattaaaggacaatcgtgtagtaaccatggaggtagaggccagaaacctagataagaaggacttcctgggaaaatcagatccatttctggagttcttccgccagggtgatgggaaatggcacctggtgtacagatctgaggtcatcaagaacaacctgaaccctacatggaagcgtttctcagtccccgttcagcatttctgtggtgggaaccccagcacacccatccaggtgcaatgctccgattatgacagtgacgggtcacatgatctcatcggtaccttccacaccagcttggcccagctgcaggcagtcccggctgagtttgaatgcatccaccctgagaagcagcagaaaaagaaaagctacaagaactctggaactatccgtgtcaagatttgtcgggtagaaacagagtactcctttctggactatgtgatgggaggctgtcagatcaacttcactgtgggcgtggacttcactggctccaatggagacccctcctcacctgactccctacactacctgagtccaacaggggtcaatgagtacctgatggcactgtggagtgtgggcagcgtggttcaggactatgactcagacaagctgttccctgcatttggatttggggcccaggttccccctgactggcaggtctcgcatgaatttgccttgaatttcaaccccagtaacccctactgtgcaggcatccagggcattgtggatgcctaccgccaagccctgccccaagttcgcctctatggccctaccaactttgcacccatcatcaaccatgtggccaggtttgcagcccaggctgcacatcaggggactgcctcgcaatacttcatgctgttgctgctgactgatggtgctgtgacggatgtggaagccacacgtgaggctgtggtgcgtgcctcgaacctgcccatgtcagtgatcattgtgggtgtgggtggtgctgactttgaggccatggagcagctggacgctgatggtggacccctgcatacacgttctgggcaggctgctgcccgcgacattgtgcagtttgtaccctaccgccggttccagaatgcccctcgggaggcattggcacagaccgtgctcgcagaagtgcccacacaactggtctcatacttcagggcccagggttgggccccgctcaagccacttccaccctcagccaaggatcctgcacaggccccccaggcctaggttcccttggaggctgtggcaagtcctcaatcctgtgtcccagaggtccctctgggccacaacccaacccttctcactctcctcagtgctagcactttgtattttttgatacttttatacttgtttctgcttttgctgctcttgatcccacctttgctcctgacaaccctcattcaataaagaccagtgaagaccaaaaaaaaaaaaaaaaaaaa

SEQ ID NO: 1271 - DNA, 2192 bp, Homo sapiens
cggagccgctgagcgggccgacggccattttgtgaagcggcgaaggaggtggtggctgcgttgggctccgggaagccgttcgggctggggctgtcggccgcggggcggaggcactcgcgcggggggtaattcggggtctgggttctggtgccgcgcagctttccccggattgacttggcctctacttcttgttaaggaaattcatctcttgttttatcaggtgtgtgtggtttcagcgcagcatggctgtggtcatccgtttgcaaggtctcccaattgtggcggggaccatggacattcgccacttcttctctggattgaccattcctgatgggggcgtgcatattgtagggggtgaactggatggcccactgcgtgaccttggttcagctgtccatttcctgtgaccatctcattgacaaggacatcggctccaagtctgacccactctgcgtccttttacaggatgtgggagggggcagctgggctgagcttggccggactgaacgggtgcggaactgctcaagccctgagttctccaagactctacagcttgagtaccgctttgagacagtccagaagctacgctttggaatctatgacatagacaacaagacgccagagctgagggatgatgacttcctagggggtgctgagtgttccctaggacagattgtgtccagccaggtactgactctccccttgatgctgaagcctggaaaacctgctgggcgggggaccatcacggtctcagctcaggaattaaaggacaatcgtgtagtaaccatggaggtagaggccagaaacctagataagaaggacttcctgggaaaatcagatccatttctggagttcttccgccagggtgatgggaaatggcacctggtgtacagatctgaggtcatcaagaacaacctgaaccctacatggaagcgtttctcagtccccgttcagcatttctgtggtgggaaccccagcacacccatccaggtgcaatgctccgattatgacagtgacgggtcacatgatctcatcggtaccttccacaccagcttggcccagctgcaggcagtcccggctgagtttgaatgcatccaccctgagaagcagcagaaaaagaaaagctacaagaactctggaactatccgtgtcaagatttgtcgggtagaaacagagtactcctttctggactatgtgatgggaggctgtcagatcaacttcactgtgggcgtggacttcactggctccaatggagacccctcctcacctgactccctacactacctgagtccaacaggggtcaatgagtacctgatggcactgtggagtgtgggcagcgtggttcaggactatgactcagacaagctgttccctgcatttggatttggggcccaggttccccctgactggcaggtctcgcatgaatttgccttgaatttcaaccccagtaacccctactgtgcaggcatccagggcattgtggatgcctaccgccaagccctgccccaagttcgcctctatggccctaccaactttgcacccatcatcaaccatgtggccaggtttgcagcccaggctgcacatcaggggactgcctcgcaatacttcatgctgttgctgctgactgatggtgctgtgacggatgtggaagccacacgtgaggctgtggtgcgtgcctcgaacctgcccatgtcagtgatcattgtgggtgtgggtggtgctgactttgaggccatggagcagctggacgctgatggtggacccctgcatacacgttctgggcaggctgctgcccgcgacattgtgcagtttgtaccctaccgccggttccagaatgcccctcgggaggcattggcacagaccgtgctcgcagaagtgcccacacaactggtctcatacttcagggcccagggttgggccccgctcaagccacttccaccctcagccaaggatcctgcacaggccccccaggcctaggttcccttggaggctgtggcaagtcctcaatcctgtgtcccagaggtccctctgggccacaacccaacccttctcactctcctcagtgctagcactttgtattttttgatacttttatacttgtttctgcttttgctgctcttgatcccacctttgctcctgacaaccctcattcaataaagaccagtgaagaccaaaaaaaaaaaaaaaaaaaa

SEQ ID NO: 1272 - DNA, 878 bp, Homo sapiens
cagattttcaggttgattgatgtgggacagcagccacaatgaggaactcctatagatttctggcatcctctctctcagttgtcgtttctctcctgctaattcctgaagatgtctgtgaaaaaattattggaggaaatgaagtaactcctcattcaagaccctacatggtcctacttagtcttgacagaaaaaccatctgtgctggggctttgattgcaaaagactgggtgttgactgcagctcactgtaacttgaacaaaaggtcccaggtcattcttggggctcactcaataaccagggaagagccaacaaaacagataatgcttgttaagaaagagtttccctatccatgctatgacccagccacacgcgaaggtgaccttaaacttttacagctgacggaaaaagcaaaaattaacaaatatgtgactatccttcatctacctaaaaagggggatgatgtgaaaccaggaaccatgtgccaagttgcagggtgggggaggactcacaatagtgcatcttggtccgatactctgagagaagtcaatatcaccatcatagacagaaaagtctgcaatgatcgaaatcactataattttaaccctgtgattggaatgaatatggtttgtgctggaagcctccgaggtggaagagactcgtgcaatggagattctggaagccctttgttgtgcgagggtgttttccgaggggtcacttcctttggccttgaaaataaatgcggagaccctcgtgggcctggtgtctatattcttctctcaaagaaacacctcaactggataattatgactatcaagggagcagtttaaataaccgtttcctttcatttactgtggcttcttaatcttttcacaaataaa

SEQ ID NO: 1273 - DNA, 2466 bp, Homo sapiens
cctggccaccggctcgcggcgcgtggaggctgctcccagccgcgcccgagtcagactcgggtgggggtcccggcggcggtagcggcggcggcggtgcgagcatgtcgtggctcttcggcgttaacaagggccccaagggtgaaggcgcggggccgccgccgcctttgccgcccgcgcagcccggggccgagggcggcggggaccgcggtttgggagaccggccggcgcccaaggacaaatggagcaacttcgaccccaccggcctggagcgcgccgccaaggcggcgcgcgagctggagcactcgcgttacgccaaggaggccctgaatctggcgcagatgcaggagcagacgctgcagttggagcaacagtccaagctcaaagagtatgaggccgccgtggagcagctcaagagcgagcagatccgggcgcaggctgaggagaggaggaagaccctgagcgaggagacccggcagcaccaggccagggcccagtatcaagacaagctggcccggcagcgctacgaggaccaactgaagcagcagcaacttctcaatgaggagaatttacggaagcaggaggagtccgtgcagaagcaggaagccatgcggcgagccaccgtggagcgggagatggagctgcggcacaagaatgagatgctgcgagtggagaccgaggcccgggcgcgcgccaaggccgagcgggagaatgcagacatcatccgcgagcagatccgcctgaaggcgtccgagcaccgtcagaccgtcttggagtccatcaggacggctggcaccttgtttggggaaggattccgtgcctttgtgacagaccgggacaaagtgacagccacggtggctgggctgacgctgctggctgtcggggtctactcagccaagaatgcgacagccgtcactggccgcttcatcgaggctcggctggggaagccgtccctagtgagggagacgtcccgcatcacggtgctggaggcgctgcggcaccccatccaggtcagccggcggctcctcagtcgaccccaggacgtgctggagggtgttgtgcttagtcccagcctggaagcacgggtgcgcgacatcgccatagcaaccaggaacaccaagaagaaccggggcctgtacaggcacatcctgctgtatgggccaccaggcaccgggaagacgctgtttgccaagaaactcgccctgcactcaggcatggactacgccatcatgacaggcggggacgtggcccccatggggcgggaaggcgtgaccgccatgcacaagctctttgactgggccaataccagccggcgcggcctcctgctcttcatggatgaagcagacgccttccttcggaagcgagccactgaggagataagcaaggacctcagagccacactgaacgccttcctgtaccacatgggccaacacagcaacaaattcatgctggtcctggccagcaatctgcctgagcagttcgactgtgccatcaacagccgcattgacgtgatggtccacttcgacctgccgcagcaggaggagcgggagcgcctggtgagactgcattttgacaactgtgttcttaagccggccacagaaggaaaacggcgcctgaagctggcccagtttgactacgggaggaagtgctcggaggtcgctcggctgacggagggcatgtcgggccgggagatcgctcagctggccgtgtcctggcaggccacggcatatgcctccaaggacggggtcctcactgaggccatgatggacgcctgtgtgcaagatgctgtccagcagtaccgacagaagatgcgctggctgaaggcggaggggcctgggcgcggggtcgagcaccccctatccggagtccaaggcgagaccctcacctcatggagcctggccacggacccctcctacccctgccttgccggcccctgcacatttaggatatgctcctggatggggactgggctgtgcccagggcctctgtcccccaggatgtcttgtggtggcggtcggccgttctgccccccagggcaccccctgttgtaggcactggctagggaggggcaggcctccttcctgcccctcgagacactcttgggagatgcattttccgtctggctcacagggggagggtgaggctttgtaccccagcccctgcccaggccactgtgagggtgggtgctggctgagcccctggggcagaaggagtggggcaggcggggtctttgttctcggctcccacagcagagccaggtgagggggggcctgccaggactagacagaagtggggcggcctgaaccctgcttccagccatggccaggggccacggaacccggcaggggtgtctgaggccgccctgtcagctggccggtccaagcctgtggctggagctggtgtgtgtttatctaataaagtcccacaggtgcctcaaaaaaaaaaaaaaaaaaaaaaaaaaaaaaaaaa

SEQ ID NO: 1274 - DNA, 2559 bp, Homo sapiens
agcggagcagccgccgcccgcccgcccgcccgcctccgcccgcggcaagccagcccgccggcgccccggagcgctgccgccaccgtcaccgccaccgcccggtccaggcccaagcccaggccctgcgcggagcggagcggcgcggcgtccacccgggcccagccagccggcgcggcgggggcgggtccaggatcttcggcggatcttccattctcagggcgggagccggagtccgggcgcccgggatcgggctgggcccgcgcccatggcaagcgcggcctgcccgggccctggggaccctgccatgtgaggcaggcccgggctgggggcccggccatggccggggaacggcccccactgcggggccctgggcccgggcctggagaggtgccgggggaggggcccccggggccggggggcacgggcggaggcccgggccggggccgcccctcctcctaccgggctctccgcagcgccgtgtctagcctggcgcgtgtggacgattttcactgcgcggagaagatcggggccggcttcttctctgaggtctacaaggttcggcaccgacagtcagggcaagtcatggtgctgaagatgaacaagctccccagtaaccggggcaacacactacgggaagtgcagctgatgaaccggctcaggcaccccaacatcctaaggttcatgggagtctgtgtgcaccagggacagctgcacgctcttacagagtatatgaatggggggacattggaacagctgctcagctcccctgaacccctgtcctggccggtcaggctccacctggccctggacattgcccgaggcctgcggtacctgcactccaaaggtgtatttcaccgcgacctcacatccaagaactgtctagtccgacgggaagatcgaggcttcaccgctgtcgtgggtgacttcgggctggccgaaaagattcctgtgtatagggagggggcaaggaaggagccattggccgtggtgggctccccatactggatggctccagaggtgttacggggtgagctgtatgatgagaaggctgatgtctttgccttcgggattgtcctctgtgagctcatcgcccgagtacctgcagaccctgactacctaccacgcactgaggactttggcctggatgtgcctgctttccgaactctggtgggggatgactgcccactgcctttcttgctcctggccatccactgctgcaacctggaacccagcacccgtgcccccttcaccgaaattacccagcacctggaatggatcctggagcagctgcctgagccagccccactcaccaggaccgccctgacacacaatcagggctctgttgcaagagggggtccctctgccacgcttcccaggccagatccccggctttcccgaagccggtcagacctcttcctgcccccatcaccagaatcaccccccaactggggggacaatctgactcgagtcaaccccttctcactacgggaagacctcaggggtggcaagatcaagctcttagacacacccagcaagccagtcctgcctcttgtgccaccatcaccattcccatccactcagctgcccttggtgaccactccggagaccctggtccagcctgggacacctgcccgccgctgccgctcactaccctcatcccccgagctcccccgccgtatggagacagcactgccaggtcctggccctcccgctgtgggcccctcggctgaagagaagatggagtgcgagggcagcagccctgagccggaacctccagggccagcgccccagctgcctctggctgtggccacagacaacttcatcagcacctgttcctcggcctcccaaccctggtcccctagatcaggacccgtcctcaataacaatcccccagctgtggtggtgaactccccacaaggctgggctggggagccctggaaccgggcccagcatagcctgccccgggcggcagccctggagcggacagaaccctcgccacccccttcagctccccgggagcccgatgaggggctgccctgtcctggctgctgcctcggccccttcagctttggcttcctgtccatgtgcccccgccccacaccagctgttgcccgctaccgcaacctgaactgtgaggcgggcagtctcctctgccaccgagggcaccacgccaagccacccacacccagcctgcagctgcctggggcacgctcttagcagtggagcccgtggtctcaggcctccaactttggccttcaggacaccctgtaagaacagagcacacttgctggacagtgccagttccagatgggctgaccggctcttctccccgtgtaggggagccccagcatggactcaagggacagagcacttccagtcgaccccccggctcgcgttcccgtggggatcactgaaccagacacagcattgctgacacatgagactaacacgtgcaattatttaaaaagatttcaataaaactgcctggctggctccgggccgcccctatccgctcaaaaaaaaaaaaaaaaaaaaaaaaaaaaaaaaaaaaaaaaaaaa

SEQ ID NO: 1275 - DNA, 2643 bp, Homo sapiens
tgcacctccctctgcggtggggtccgggacatggcaggtaatgagccggacgaggggagccaagctggagtttacacaggcaaactgtcagaaaagagtagcctgggctgtctggaaatctgagccatggactttccccagcacagccagcatgtcttggaacagctgaaccagcagcggcagctggggcttctctgtgactgcacctttgtggtggacggtgttcactttaaggctcataaagcagtgctggcggcctgcagcgagtacttcaagatgctcttcgtggaccagaaggacgtggtgcacctggacatcagtaacgcggcaggcctggggcagatgctggagtttatgtacacggccaagctgagcctgagccctgagaacgtggatgatgtgctggccgtggccactttcctccaaatgcaggacatcatcacggcctgccatgccctcaagtcacttgctgagccggctaccagccctgggggaaatgcggaggccttggccacagaaggaggggacaagagagccaaagaggagaaggtggccaccagcacgctgagcaggctggagcaggcaggacgcagcacacccataggccccagcagggacctcaaggaggagcgcggcggtcaggcccagagtgcggccagcggtgcagagcagacagagaaagccgatgcgccccgggagccgccgcctgtggagctcaagccagaccccacgagtggcatggctgccgcagaagctgaggccgctttgtccgagagctcggagcaagaaatggaggtggagcccgcccggaaaggggaagaggagcaaaaggagcaagaggagcaagaggaggagggcgcagggccagctgaggtcaaggaggagggttcccagctggagaacggagaggcccccgaggagaacgagaatgaggagtcagcgggcacagactcggggcaggagctcggctccgaggcccggggcctgcgctcaggcacctacggcgaccgcacggagtccaaggcctacggctccgtcatccacaagtgcgaggactgtgggaaggagttcacgcacacggggaacttcaagcggcacatccgcatccacacgggggagaagcccttctcgtgccgggagtgcagcaaggccttttccgacccggccgcgtgcaaggcccatgagaagacgcacagccctctgaagccctacggctgcgaggagtgcgggaagagctaccgcctcatcagcctgctgaacctgcacaagaagcggcactcgggcgaggcgcgctaccgctgcgaggactgcggcaagctcttcaccacctcgggcaacctcaagcgccaccagctggtgcacagcggcgagaagccctaccagtgcgactactgcggccgctccttctccgaccccacttccaagatgcgccacctggagacccacgacacggacaaggagcacaagtgcccacactgcgacaagaagttcaaccaggtagggaacctgaaggcccacctgaagatccacatcgctgacgggcccctcaagtgccgagagtgtgggaagcagttcaccacctcagggaacctgaagcggcaccttcggatccacagcggggagaagccctacgtgtgcatccactgccagcgacagtttgcagaccccggcgctctgcagcggcacgtccgcattcacacaggtgagaagccatgccagtgtgtgatgtgcggtaaggccttcacccaggccagctccctcatcgcccacgtgcgccagcacaccggggagaagccctacgtctgcgagcgctgcggcaagagattcgtccagtccagccagttggccaatcatattcgccaccacgacaacatccgcccacacaagtgcagcgtgtgcagcaaggccttcgtgaacgtgggggacctgtccaagcacatcatcattcacactggagagaagccttacctgtgtgataagtgtgggcgtggcttcaaccgggtagacaacctgcgctcccacgtgaagaccgtgcaccagggcaaggcaggcatcaagatcctggagcccgaggagggcagtgaggtcagcgtggtcactgtggatgacatggtcacgctggctaccgaggcactggcagcgacagccgtcactcagctcacagtggtgccggtgggagctgcagtgacagccgatgagacggaagtcctgaaggccgagatcagcaaagctgtgaagcaagtgcaggaagaagaccccaacactcacatcctctacgcctgtgactcctgtggggacaagtttctggatgccaacagcctggctcagcatgtgcgaatccacacagcccaggcactggtcatgttccagacagacgcggacttctatcagcagtatgggccaggtggcacgtggcctgccgggcaggtgctgcaggctggggagctggtcttccgccctcgcgacggggctgagggccagcccgcactggcagagacctcccctacagctcctgaatgtcccccgcctgccgagtgagctggcggcccttctgactgtttatttaaggatggatggcaccctggaaccgggaagggtggcctgttccctagagagaataaattggattattttctaaaaaaa

SEQ ID NO: 1276 - DNA, 3460 bp, Homo sapiens
agcgggacgcccgggcggccctgaaggggacggggcggccccagtcggaggtcgcagggagctccgcccccgactcggtataagagctgggcccggcccacggcggcggcggcggcggcggagagagctggctcagggcgtccgctaggctcggacgacctgctgagcctcccaaaccgcttccataaggctttgcctttccaacttcagctacagtgttagctaagtttggaaagaaggaaaaaagaaaatccctgggccccttttcttttgttctttgccaaagtcgtcgttgtagtctttttgcccaaggctgttgtgtttttagaggtcctatctccagttccttgcactcctgttaacaagcacctcagcgagagcagcagcagcgatagcagccgcagaagagccagcggggtcgcgtagtgtcatgaccagggcgggagatcacaaccgccagagaggatgctgtggatccttggccgactacctgacctctgcaaaattccttctctaccttggtcattctctctctacttggggagatcggatgtggcactttgcggtgtctgtgtttctggtagagctctatggaaacagcctccttttgacagcagtctacgggctggtggtggcagggtctgttctggtcctgggagccatcatcggtgactgggtggacaagaatgctagacttaaagtggcccagacctcgctggtggtacagaatgtttcagtcatcctgtgtggaatcatcctgatgatggttttcttacataaacatgagcttctgaccatgtaccatggatgggttctcacttcctgctatatcctgatcatcactattgcaaatattgcaaatttggccagtactgctactgcaatcacaatccaaagggattggattgttgttgttgcaggagaagacagaagcaaactagcaaatatgaatgccacaatacgaaggattgaccagttaaccaacatcttagcccccatggctgttggccagattatgacatttggctccccagtcatcggctgtggctttatttcgggatggaacttggtatccatgtgcgtggagtacgttctgctctggaaggtttaccagaaaaccccagctctagctgtgaaagctggtcttaaagaagaggaaactgaattgaaacagctgaatttacacaaagatactgagccaaaacccctggagggaactcatctaatgggtgtgaaagactctaacatccatgagcttgaacatgagcaagagcctacttgtgcctcccagatggctgagcccttccgtaccttccgagatggatgggtctcctactacaaccagcctgtgtttctggctggcatgggtcttgctttcctttatatgactgtcctgggctttgactgcatcaccacagggtacgcctacactcagggactgagtggttccatcctcagtattttgatgggagcatcagctataactggaataatgggaactgtagcttttacttggctacgtcgaaaatgtggtttggttcggacaggtctgatctcaggattggcacagctttcctgtttgatcttgtgtgtgatctctgtattcatgcctggaagccccctggacttgtccgtttctccttttgaagatatccgatcaaggttcattcaaggagagtcaattacacctaccaagatacctgaaattacaactgaaatatacatgtctaatgggtctaattctgctaatattgtcccggagacaagtcctgaatctgtgcccataatctctgtcagtctgctgtttgcaggcgtcattgctgctagaatcggtctttggtcctttgatttaactgtgacacagttgctgcaagaaaatgtaattgaatctgaaagaggcattataaatggtgtacagaactccatgaactatcttcttgatcttctgcatttcatcatggtcatcctggctccaaatcctgaagcttttggcttgctcgtattgatttcagtctcctttgtggcaatgggccacattatgtatttccgatttgcccaaaatactctgggaaacaagctctttgcttgcggtcctgatgcaaaagaagttaggaaggaaaatcaagcaaatacatctgttgtttgagacagtttaactgttgctatcctgttactagattatatagagcacatgtgcttattttgtactgcagaattccaataaatggctgggtgttttgctctgtttttaccacagctgtgccttgagaactaaaagctgtttaggaaacctaagtcagcagaaattaactgattaatttcccttatgttgaggcatggaaaaaaaattggaaaagaaaaactcagtttaaatacggagactataatgataacactgaattcccctatttctcatgagtagatacaatcttacgtaaaagagtggttagtcacgtgaattcagttatcatttgacagattcttatctgtactagaattcagatatgtcagttttctgcaaaactcactcttgttcaagactagctaatttatttttttgcatcttagttatttttaaaaacaaattcttcaagtatgaagactaaattttgataactaatattatccttattgatcctattgatcttaaggtatttacatgtatgtggaaaaacaaaacacttaactagaattctctaataaggtttatggtttagcttaaagagcacctttgtatttttattatcagatggggcaacatattgtatgaagcatatgtagcacttcacagcatggttatcatgtaagctgcaggtagaagcaaagctgtaaagtagatttatcacacaatgactgcatacagacttcaaatatgtcaatagtttggtcatagaacctagaagccaaaagccacacagaagggcaagaatcccaatttaactcatgttatcatcattagtgatctgtgttgtagaacatgagggtgtaagccttcagcctggcaagttacatgtagaaagcccacacttgtgaaggttttgttttacaaatcacttgatttaacacactcaggtagaatatttttatttttactgttttatacccagaagttatttctacattgttctacagcaagaatattcataaaagtatccctttcaaatgcctttgagaagaatagaagaaaaaaagtttgtatatattttaaaaaattgttttaaaagtcagtttgcaacatgtctgtaccaagatggtactttgccttaaccgtttatatgcactttcatggagactgcaatacgttgctatgagcactttctttatccttggagtttaatcctttgcttcatctttctacagtatgacataatgatttgctatgttgtaaaatctttgtaaaaaatttctatataaaaatattttgaaaatcttaaaaaaaaaaaaaaaaaaaaaaaaaaaa

SEQ ID NO: 1277 - DNA, 5114 bp, Homo sapiens
gataaggtggcggcggcgaaggcagcggcaggtcgggagcaagatggcgctgcggccaggagctggttctggtggcggcggggccgcgggagctggcgcggggtccgccgggggaggcggcttcatgtttcctgttgcaggtgggataagaccccctcaagcaggcctgatgccgatgcagcaacaaggatttcctatggtctctgtcatgcagcctaatatgcaaggcattatgggaatgaattacagctctcagatgtcccaaggacctattgctatgcaggcaggaataccaatgggaccaatgccagcagcgggaatgccttacctaggacaagcacccttcctgggcatgcgtcctccaggcccacagtacactccagacatgcagaagcagtttgccgaagagcagcagaaacgatttgaacagcagcaaaaactcttagaagaagaaagaaaaagacgccagtttgaagagcagaagcaaaagctcagacttttgagcagtgtgaaacccaagacaggagagaagagtagagatgatgctttggaagccataaaaggaaatttagatgggttttccagagatgcaaaaatgcaccctactccagcatcgcaccccaagaaaccaggcccttccttggaggagaagttcctagtatcttgtgatataagtacatctgggcaggaacaaattaaattaaatacttctgaagttggccacaaagccctaggcccaggttccagtaagaagtatcccagtttaatggccagtaacggggttgctgtagatggatgtgtaagtggtaccaccactgcagaggcagaaaatacttcagatcaaaacctgtcaattgaagagagtggtgtgggagtatttccctcacaggatcctgctcagcccagaatgcctccttggatttacaatgagagtttggttccagatgcctataagaaaatcttagaaaccacaatgactccaactggaatagatactgccaaactgtatcccattctgatgtcatctgggcttcccagggaaactcttggacagatatgggccttagctaatcgaactacacctggcaaacttacaaaagaagaactttataccgttctagccatgatagcggtaacacagaggggcgttcctgcaatgagtcctgatgctttaaaccagttcccagcagctcctattccaactttaagtggcttttctatgactctgcctacaccggtgagtcagccaactgtgataccttcaggtcctgcgggctccatgcccctcagccttggacagccagtcatgggcattaaccttgttggaccagtgggtggagctgcagcccaggcttctagtggtttcataccaacctaccctgcaaatcaggtagtaaagccagaagaagatgacttccaggattttcaagatgcttctaagtcaggatcccttgatgactcattcagtgatttccaagagttgcctgcttcttcaaaaacaagtaactcccagcatggaaacagtgccccttctttgttgatgccacttcctggaactaaagcattgccttcaatggacaaatatgctgtgtttaaaggaattgcagctgacaagtcctctgaaaatactgttccacctggagatcctggtgataaatatagtgctttcagagaacttgaacagacagcagagaataaacctttaggagaaagctttgcagaattcagatctgcaggaactgatgatggtttcaccgattttaaaacagccgatagtgtatcaccactagagccaccaacaaaagacaaaacttttccaccatccttcccctcaggaactatacaacagaaacaacaaacacaagtgaaaaaccctctgaacttagcagacctagatatgttttcctcagttaattgcagcagcgagaaaccattgtctttttcagctgtgtttagcacatcaaaatcagtttctacaccacagtcaacaggttctgctgctactatgacagcattggcagcaacaaaaacttctagtttggctgatgattttggagaattcagcctttttggggaatattctggtctagcacctgttggggagcaggatgactttgcagattttatggctttcagtaatagctctatttcatctgagcaaaagccggatgacaaatatgatgcccttaaagaggaagccagtcctgttcctctaaccagcaacgtgggcagcacagtgaagggtggacaaaactcgactgctgcgtctaccaagtacgatgtcttcagacaactttctctggaagggtctggactaggtgttgaagacctgaaagataacactccttcaggaaaaagtgatgatgattttgctgacttccactccagtaaattttcttccataaactcggacaaatccctgggagagaaagcagtggctttcagacacaccaaagaagactctgcatcagtgaagtccttagatctcccttccattggtggcagcagtgttggcaaggaggactctgaagatgcactctctgttcagtttgacatgaaattggctgatgtgggaggagatcttaagcatgtcatgtctgatagctctttggatttaccaacagttagtggccagcatcctcctgctgcagatatagaggacttaaaatatgctgcttttggaagctacagtagcaattttgcagtgagcacacttacaagctatgactggtcagacagggatgatgcaactcagggcagaaaactctctccatttgtcctctcagcaggaagtggatccccctcagccacctcaattcttcaaaagaaagagacttcatttggcagttctgaaaacatcaccatgacatctctctccaaagtaacgacctttgtaagtgaagatgctcttccagagaccaccttcccagctcttgccagttttaaagacacgattcctcagaccagtgagcaaaaggaatatgaaaacagagactataaagatttcacaaaacaggacctgcctacggctgaacggagccaggaggccacgtgtcccagcccagcgtccagtggtgcctctcaagaaaccccgaacgaatgttcggatgactttggagagtttcaaagtgaaaagcccaaaatcagcaaatttgacttcttagtagccacttcacaaagcaaaatgaaatccagtgaagaaatgatcaaaagtgagctggcaacctttgacctttctgttcaaggatcacacaagaggagtttgagccttggtgataaagaaataagccgttcttctccttctccagctttggagcagcctttcagagaccgttccaatactctgaatgagaagcccgccctgcccgtcatccgagacaagtacaaagacctgacgggagaggtggaggaaaatgagagatatgcatatgaatggcagagatgcctggggagtgccctgaatgtcattaagaaggcaaatgataccttaaatggaatcagtagtagttctgtttgcacagaagtaattcagtcagctcaaggcatggaatatttattaggtgttgttgaagtgtacagggtaaccaagcgtgtggagctggggataaaagccactgcagtgtgcagtgagaaactccagcagttgctgaaggacatcgataaagtatggaataacctaatcggcttcatgtcactcgccacactcacaccagatgaaaactcgctggatttttcctcctgtatgttacggcctgggattaaaaatgctcaggagcttgcctgtggagtgtgcctcttgaatgtggactcgaggagccggaaagaagagaagcctgcagaagaacatcctaaaaaagcattcaactcagaaacagacagtttcaagctggcctatggagggcaccagtatcacgccagctgtgccaacttctggatcaactgtgtcgaaccaaagcctcctggcctcgtcctgcctgacctgctctgaacaactcctctgtgaagcattgacttttttttttctgtgacaccccacggggtgacagggaccaataaatagaatgcgagcactgcacagttcgcttccctgaatcgatatgaagaacaccgcaagggacggggcccccgtcatccccacggccagtctgcaggacttcaggtaaaattgtcccacccaaactgcacgtggcaccagaagcttgctcacttatctctacttaagattttctgaaatacggaccacggctttcttgatctaaggaagaacttgctgctgcagtattgaaactgtgaagaactgacatttgaagaaaaatagattaccgttgcgggactagaatgggcgactgcttggagccagtgcttgtttttatctaggacacttactgtcctgtgaagtagaatacatttatctgcatttagtttgttaatgtctgaaatgaataaaaagaggaaattgcgattaaactgatgttctgctttttatggagaagattctgcccatctcccctggacagtagcaggcaggtgagggcagattttacccacttggttgtcacaactgaaccagttctctactccttcccttcacttctgtccactctcaagactttttcccaaaacatgcctgggcactctgcagccgtgaagaatgctcattttgacagaggcccaaatcctgtgtattaggataatatccttccccccgggagccttcgctgcaaacctgttctgccgcatgcaaagactgtgaccatggagttttctcagacaagatttggaaaggcagtggaatgaaatctctttgcagtggcctctctccaaatttccaaagatgactgcatagggaccaacactgcctgactttgcagtatctgtgagaaaaacctgaaaattaattcagggtgaaaatgtggagctctcggcctagtgtaaagtatcaagatgtatatttatgggatagatacatgacttagaagaagtagaagaaaattgtccagaaacagtactgaattttagatagaaaaggctcatgcttcctggagtagggaattgtctttgccatttaatgtgaatgcataaaattaggggaaaaaccaaaaaaaaaaaaaaaa

SEQ ID NO: 1278 - DNA, 5078 bp, Homo sapiens
gataaggtggcggcggcgaaggcagcggcaggtcgggagcaagatggcgctgcggccaggagctggttctggtggcggcggggccgcgggagctggcgcggggtccgccgggggaggcggcttcatgtttcctgttgcaggtgggataagaccccctcaagcaggcctgatgccgatgcagcaacaaggatttcctatggtctctgtcatgcagcctaatatgcaaggcattatgggaatgaattacagctctcagatgtcccaaggacctattgctatgcaggcaggaataccaatgggaccaatgccagcagcgggaatgccttacctaggacaagcacccttcctgggcatgcgtcctccaggcccacagtacactccagacatgcagaagcagtttgccgaagagcagcagaaacgatttgaacagcagcaaaaactcttagaagaagaaagaaaaagacgccagtttgaagagcagaagcaaaagctcagacttttgagcagtgtgaaacccaagacaggagagaagagtagagatgatgctttggaagccataaaaggaaatttagatgggttttccagagatgcaaaaatgcaccctactccagcatcgcaccccaagaaaccaggcccttccttggaggagaagttcctagtatcttgtgatataagtacatctgggcaggaacaaattaaattaaatacttctgaagttggccacaaagccctaggcccaggttccagtaagaagtatcccagtttaatggccagtaacggggttgctgtagatggatgtgtaagtggtaccaccactgcagaggcagaaaatacttcagatcaaaacctgtcaattgaagagagtggtgtgggagtatttccctcacaggatcctgctcagcccagaatgcctccttggatttacaatgagagtttggttccagatgcctataagaaaatcttagaaaccacaatgactccaactggaatagatactgccaaactgtatcccattctgatgtcatctgggcttcccagggaaactcttggacagatatgggccttagctaatcgaactacacctggcaaacttacaaaagaagaactttataccgttctagccatgatagcggtaacacagaggggcgttcctgcaatgagtcctgatgctttaaaccagttcccagcagctcctattccaactttaagtggcttttctatgactctgcctacaccggtgagtcagccaactgtgataccttcaggtcctgcgggctccatgcccctcagccttggacagccagtcatgggcattaaccttgttggaccagtgggtggagctgcagcccaggcttctagtggtttcataccaacctaccctgcaaatcaggtagtaaagccagaagaagatgacttccaggattttcaagatgcttctaagtcaggatcccttgatgactcattcagtgatttccaagagttgcctgcttcttcaaaaacaagtaactcccagcatggaaacagtgccccttctttgttgatgccacttcctggaactaaagcattgccttcaatggacaaatatgctgtgtttaaaggaattgcagctgacaagtcctctgaaaatactgttccacctggagatcctggtgataaatatagtgctttcagagaacttgaacagacagcagagaataaacctttaggagaaagctttgcagaattcagatctgcaggaactgatgatggtttcaccgattttaaaacagccgatagtgtatcaccactagagccaccaacaaaagacaaaacttttccaccatccttcccctcaggaactatacaacagaaacaacaaacacaagtgaaaaaccctctgaacttagcagacctagatatgttttcctcagttaattgcagcagcgagaaaccattgtctttttcagctgtgtttagcacatcaaaatcagtttctacaccacagtcaacaggttctgctgctactatgacagcattggcagcaacaaaaacttctagtttggctgatgattttggagaattcagcctttttggggaatattctggtctagcacctgttggggagcaggatgactttgcagattttatggctttcagtaatagctctatttcatctgagcaaaagccggatgacaaatatgatgcccttaaagaggaagccagtcctgttcctctaaccagcaacgtgggcagcacagtgaagggtggacaaaactcgactgctgcgtctaccaagtacgatgtcttcagacaactttctctggaagggtctggactaggtgttgaagacctgaaagataacactccttcaggaaaaagtgatgatgattttgctgacttccactccagtaaattttcttccataaactcggacaaatccctgggagagaaagcagtggctttcagacacaccaaagaagactctgcatcagtgaagtccttagatctcccttccattggtggcagcagtgttggcaaggaggactctgaagatgcactctctgttcagtttgacatgaaattggctgatgtgggaggagatcttaagcatgtcatgtctgatagctctttggatttaccaacagttagtggccagcatcctcctgctgcagatatagaggacttaaaatatgctgcttttggaagctacagtagcaattttgcagtgagcacacttacaagctatgactggtcagacagggatgatgcaactcagggcagaaaactctctccatttgtcctctcagcaggaagtggatccccctcagccacctcaattcttcaaaagaaagagacttcatttggcagttctgaaaacatcaccatgacatctctctccaaagtaacgacctttgtaagtgaagatgctcttccagagaccaccttcccagctcttgccagttttaaagacacgattcctcagaccagtgagcaaaaggaatatgaaaacagagactataaagatttcacaaaacaggacctgcctacggctgaacggagccaggaggccacgtgtcccagcccagcgtccagtggtgcctctcaagaaaccccgaacgaatgttcggatgactttggagagtttcaaagtgaaaagcccaaaatcagcaaatttgacttcttagtagccacttcacaaagcaaaatgaaatccagtgaagaaatgatcaaaagtgagctggcaacctttgacctttctgttcaaggatcacacaagaggagtttgagccttggtgataaagaaataagccgttcttctccttctccagctttggagcagcctttcagagaccgttccaatactctgaatgagaagcccgccctgcccgtcatccgagacaagtacaaagacctgacgggagaggtggaggaaaatgagagatatgcatatgaatggcagagatgcctggggagtgccctgaatgtcattaagaaggcaaatgataccttaaatggaatcagtagtagttctgtttgcacagaagtaattcagtcagctcaaggcatggaatatttattaggtgttgttgaagtgtacagggtaaccaagcgtgtggagctggggataaaagccactgcagtgtgcagtgagaaactccagcagttgctgaaggacatcgataaagtatggaataacctaatcggcttcatgtcactcgccacactcacaccagatgaaaactcgctggatttttcctcctgtatgttacggcctgggattaaaaatgctcaggagcttgcctgtggagtgtgcctcttgaatgtggactcgaggagccgggcattcaactcagaaacagacagtttcaagctggcctatggagggcaccagtatcacgccagctgtgccaacttctggatcaactgtgtcgaaccaaagcctcctggcctcgtcctgcctgacctgctctgaacaactcctctgtgaagcattgacttttttttttctgtgacaccccacggggtgacagggaccaataaatagaatgcgagcactgcacagttcgcttccctgaatcgatatgaagaacaccgcaagggacggggcccccgtcatccccacggccagtctgcaggacttcaggtaaaattgtcccacccaaactgcacgtggcaccagaagcttgctcacttatctctacttaagattttctgaaatacggaccacggctttcttgatctaaggaagaacttgctgctgcagtattgaaactgtgaagaactgacatttgaagaaaaatagattaccgttgcgggactagaatgggcgactgcttggagccagtgcttgtttttatctaggacacttactgtcctgtgaagtagaatacatttatctgcatttagtttgttaatgtctgaaatgaataaaaagaggaaattgcgattaaactgatgttctgctttttatggagaagattctgcccatctcccctggacagtagcaggcaggtgagggcagattttacccacttggttgtcacaactgaaccagttctctactccttcccttcacttctgtccactctcaagactttttcccaaaacatgcctgggcactctgcagccgtgaagaatgctcattttgacagaggcccaaatcctgtgtattaggataatatccttccccccgggagccttcgctgcaaacctgttctgccgcatgcaaagactgtgaccatggagttttctcagacaagatttggaaaggcagtggaatgaaatctctttgcagtggcctctctccaaatttccaaagatgactgcatagggaccaacactgcctgactttgcagtatctgtgagaaaaacctgaaaattaattcagggtgaaaatgtggagctctcggcctagtgtaaagtatcaagatgtatatttatgggatagatacatgacttagaagaagtagaagaaaattgtccagaaacagtactgaattttagatagaaaaggctcatgcttcctggagtagggaattgtctttgccatttaatgtgaatgcataaaattaggggaaaaaccaaaaaaaaaaaaaaaa

SEQ ID NO: 1279 - DNA, 918 bp, Homo sapiens
ggggggagaggtagagatgagacaagaggtagaggggagaggtagaggtagccacgagctgataattacagacaagagatgcggagtatgtgggggctcattatcctgcatagtctatctttgtatatctttgaacttttcaagaataaaaaagcttaaaaagtatacatggcctggtcctaccagagactcacccaatgccagcctccagccagggagagccaagtttgcattttcacacgcatctcacactcctctgcactctcaacttggagagctccaaacagggaaaccccaagccttgctggcttctgccaaccccctgagcagaagcatgggtccccctgatcaccacctcaccaccctcatcctgatctcactgtacactccctttcctggtctgctaagtagcgggtgttttccttgacactaacgctacagctagaccacggtgggcttggcaacaggtgtcttcccagatgctggcgttaccgctagaccaaggagccctctggtggccccgtccgggcataacagaaagctcgcactcttgtcttctggtcactcctcactgtccccttcagcctcctatctctgtatggcctggtgtttcctaggttatgattgtagagcgaggattattataatattggaataaagaataattactacaaactaatgattaatgattcatatataatcatatctaagatctatatctagtataactattcttattttatatattttattatactggaacagctcgtgccctcggtctcttgcctcggcacctgggtggcttgctgcccacatccaccaagtgcactttgggaggctgaggctggaggactgctggaggccaggagttcaataccagcctgggcaacatagggagaccccccccccaccatctcc

SEQ ID NO: 1280 - DNA, 3152 bp, Homo sapiens
gtgggcaggcgcctgaggctgacggctggcaagcagggcaccgcggtgcgctgaagctagagattccgaaagggggttcgggtagttcgctccggagaagtctgagaagggtggctccggtgatcccagccctagctgtttcccatattcctttatccacctgcctttgaaggagaccagactccggctccgcccggcccgtgccgggtggtctgcggccccgagtccgtgaccaagccctccgagtgatcggcctgccctcgggtgcacccgcgggtcccaacgtgggggatccctccatccgcaaagccagggtcctaaagatcgctctgggaaaagggaaggatgccgctcttcttccggaagcggaaacccagtgaggaggctcggaaacgcctggagtaccagatgtgtttggcaaaagaagctggggcagatgacattctcgacatctctaaatgtgagctctcagagattccatttggagcttttgcaacatgcaaagttctgcagaagaaggtgctgatcgtccacacgaatcacctcacttccctgcttcccaaatcctgcagcctcctgagtctggcaaccatcaaggttctagatctccacgataatcagctgacagcccttcctgacgatctggggcagctgactgccctccaggtcttaaacgtggaaaggaatcaactgatgcagctcccacgttccattgggaacctgacccagctccagactctcaatgttaaagacaacaagctgaaggagcttccagacaccgtgggggagcttcgaagcctgcgtaccctcaacatcagtggaaacgagatccagagattgccgcagatgctggctcacgttcgaaccctggagatgctgagccttgacgcctcggccatggtctacccgccgcgggaggtgtgtggtgccggcactgcggccatcttgcagttcctctgcaaagagtcagggctggaatactaccccccttctcagtacttgctgccaattctggagcaagatggaatcgagaactctcgggacagccctgatgggcccacggacagattctcaagggaggagttagagtggcagaacaggttctcagactatgagaagaggaaggaacagaagatgctggagaaactcgagtttgaacggcgcctggaactggggcagcgggagcacacccagctccttcagcagagcagcagccagaaggatgagatccttcagacggtcaaggaggagcagtcccggctggagcagggcctgagtgagcaccagcgccacctcaacgcagagcggcagcggctgcaggagcagctgaagcagacggaacagaacatttccagccggatccagaagctgctgcaggacaatcagagacaaaagaaaagctccgagattttgaaatcgctggaaaatgaaagaataagaatggaacagttgatgtccataacccaggaggagactgagagcctgcggcgacgtgacgttgcctccgccatgcagcagatgctgactgagagctgtaagaaccggctcatccagatggcctacgaatctcagaggcagaacttggtccagcaggcctgttccagcatggccgaaatggatgaacgattccagcagattctgtcgtggcagcaaatggatcagaacaaagccatcagccagatcctgcaggagagcgcgatgcagaaggctgcgttcgaggcactccaggtgaagaaagacctgatgcatcggcagatcaggagccagattaagttaatagaaactgagttattgcagctgacacagctggagttaaagaggaagtccctggacacagagtcactccaggagatgatctcggagcagcgctgggccctcagctccctgctccagcagctgctcaaagagaagcagcagcgagaggaagagctccgggaaatcctgacggagttagaagccaaaagtgaaaccaggcaggaaaattactggctgattcagtatcaacggcttttgaaccagaagcccttgtccttgaagctgcaagaagaggggatggagcgccagctggtggccctcctggaggagctgtcggctgagcactacctgcccatctttgcgcaccaccgcctctcactggacctgctgagccaaatgagcccaggggacctggccaaggtgggcgtctcagaagctggcctgcagcacgagatcctccggagagtccaggaactgctggatgcagccaggatccagccagagctgaaaccaccaatgggtgaggtcgtcacccctacggccccccaggagcctcctgagtctgtgaggccatccgctccccctgcagagctggaggtgcaggcctcagagtgtgtcgtgtgcctggaacgggaggcccagatgatcttcctcaactgtggccacgtctgctgctgccagcagtgctgccagccactgcgcacctgcccgctgtgccgccaggacatcgcccagcgcctccgcatctaccacagcagctgagtgctgcccgcccacctgggcctggtcctagccctgcctcggccactgtgagccccgggctcctgctcagccttgtgccagccagactcgtatgaggctcccccctgccctgggccccttccccactgcccaggagcccccatcctaagctccaagcatgtctgggccaggcagaggtgctcctcatccatgacaccaccagtctgaatggtcctgggggctggggctggagaggccgctgcaccaccacccgagcctgggagccagcgtcccagcctaatcacggatctgctgcctcccagctgtcttgactgaaggccaccgcccctgcaggagcttgggtcctcatctgggggccatgcacaggcccgtcccaccctgcatgtgggaagggagcaggagggcctggctgggtgaggggaggccttcctgggaaggcgtgtggtgcaggcctgtgctcacagtggcaccagcaaccctgggtctccctctctgctgctccccagaaccccggggccctcctgctctccacaactgtccctccttaccccatgtagctcgatccgaagcaggagtgtcaataaacctgtcttcagtgcgaaaaaaaaaaaaaaaaaaaaaaaaaaaaaaaaaaa

SEQ ID NO: 1281 - DNA, 2884 bp, Homo sapiens
atcaggaagggggtgcaagagggttagtgattggggagcagaaggggtcctaaagatcgctctgggaaaagggaaggatgccgctcttcttccggaagcggaaacccagtgaggaggctcggaaacgcctggagtaccagatgtgtttggcaaaagaagctggggcagatgacattctcgacatctctaaatgtgagctctcagagattccatttggagcttttgcaacatgcaaagttctgcagaagaaggtgctgatcgtccacacgaatcacctcacttccctgcttcccaaatcctgcagcctcctgagtctggcaaccatcaaggttctagatctccacgataatcagctgacagcccttcctgacgatctggggcagctgactgccctccaggtcttaaacgtggaaaggaatcaactgatgcagctcccacgttccattgggaacctgacccagctccagactctcaatgttaaagacaacaagctgaaggagcttccagacaccgtgggggagcttcgaagcctgcgtaccctcaacatcagtggaaacgagatccagagattgccgcagatgctggctcacgttcgaaccctggagatgctgagccttgacgcctcggccatggtctacccgccgcgggaggtgtgtggtgccggcactgcggccatcttgcagttcctctgcaaagagtcagggctggaatactaccccccttctcagtacttgctgccaattctggagcaagatggaatcgagaactctcgggacagccctgatgggcccacggacagattctcaagggaggagttagagtggcagaacaggttctcagactatgagaagaggaaggaacagaagatgctggagaaactcgagtttgaacggcgcctggaactggggcagcgggagcacacccagctccttcagcagagcagcagccagaaggatgagatccttcagacggtcaaggaggagcagtcccggctggagcagggcctgagtgagcaccagcgccacctcaacgcagagcggcagcggctgcaggagcagctgaagcagacggaacagaacatttccagccggatccagaagctgctgcaggacaatcagagacaaaagaaaagctccgagattttgaaatcgctggaaaatgaaagaataagaatggaacagttgatgtccataacccaggaggagactgagagcctgcggcgacgtgacgttgcctccgccatgcagcagatgctgactgagagctgtaagaaccggctcatccagatggcctacgaatctcagaggcagaacttggtccagcaggcctgttccagcatggccgaaatggatgaacgattccagcagattctgtcgtggcagcaaatggatcagaacaaagccatcagccagatcctgcaggagagcgcgatgcagaaggctgcgttcgaggcactccaggtgaagaaagacctgatgcatcggcagatcaggagccagattaagttaatagaaactgagttattgcagctgacacagctggagttaaagaggaagtccctggacacagagtcactccaggagatgatctcggagcagcgctgggccctcagctccctgctccagcagctgctcaaagagaagcagcagcgagaggaagagctccgggaaatcctgacggagttagaagccaaaagtgaaaccaggcaggaaaattactggctgattcagtatcaacggcttttgaaccagaagcccttgtccttgaagctgcaagaagaggggatggagcgccagctggtggccctcctggaggagctgtcggctgagcactacctgcccatctttgcgcaccaccgcctctcactggacctgctgagccaaatgagcccaggggacctggccaaggtgggcgtctcagaagctggcctgcagcacgagatcctccggagagtccaggaactgctggatgcagccaggatccagccagagctgaaaccaccaatgggtgaggtcgtcacccctacggccccccaggagcctcctgagtctgtgaggccatccgctccccctgcagagctggaggtgcaggcctcagagtgtgtcgtgtgcctggaacgggaggcccagatgatcttcctcaactgtggccacgtctgctgctgccagcagtgctgccagccactgcgcacctgcccgctgtgccgccaggacatcgcccagcgcctccgcatctaccacagcagctgagtgctgcccgcccacctgggcctggtcctagccctgcctcggccactgtgagccccgggctcctgctcagccttgtgccagccagactcgtatgaggctcccccctgccctgggccccttccccactgcccaggagcccccatcctaagctccaagcatgtctgggccaggcagaggtgctcctcatccatgacaccaccagtctgaatggtcctgggggctggggctggagaggccgctgcaccaccacccgagcctgggagccagcgtcccagcctaatcacggatctgctgcctcccagctgtcttgactgaaggccaccgcccctgcaggagcttgggtcctcatctgggggccatgcacaggcccgtcccaccctgcatgtgggaagggagcaggagggcctggctgggtgaggggaggccttcctgggaaggcgtgtggtgcaggcctgtgctcacagtggcaccagcaaccctgggtctccctctctgctgctccccagaaccccggggccctcctgctctccacaactgtccctccttaccccatgtagctcgatccgaagcaggagtgtcaataaacctgtcttcagtgcgaaaaaaaaaaaaaaaaaaaaaaaaaaaaaaaaaaa

SEQ ID NO: 1282 - DNA, 3186 bp, Homo sapiens
ccattccgagaccccagtaccgcggcgacccctgctccctcgagcacttgttgtgtgcactttagttatcaaaacagtctatgtggaaatccagtcccgctcttcattcggagagtccgcgattcctagagcctcagacttcgtcatcccggtctgcgtgactttatgagattctgagtttctgttcccagcacctgcctttgaaggagaccagactccggctccgcccggcccgtgccgggtggtctgcggccccgagtccgtgaccaagccctccgagtgatcggcctgccctcgggtgcacccgcgggtcccaacgtgggggatccctccatccgcaaagccagggtcctaaagatcgctctgggaaaagggaaggatgccgctcttcttccggaagcggaaacccagtgaggaggctcggaaacgcctggagtaccagatgtgtttggcaaaagaagctggggcagatgacattctcgacatctctaaatgtgagctctcagagattccatttggagcttttgcaacatgcaaagttctgcagaagaaggtgctgatcgtccacacgaatcacctcacttccctgcttcccaaatcctgcagcctcctgagtctggcaaccatcaaggttctagatctccacgataatcagctgacagcccttcctgacgatctggggcagctgactgccctccaggtcttaaacgtggaaaggaatcaactgatgcagctcccacgttccattgggaacctgacccagctccagactctcaatgttaaagacaacaagctgaaggagcttccagacaccgtgggggagcttcgaagcctgcgtaccctcaacatcagtggaaacgagatccagagattgccgcagatgctggctcacgttcgaaccctggagatgctgagccttgacgcctcggccatggtctacccgccgcgggaggtgtgtggtgccggcactgcggccatcttgcagttcctctgcaaagagtcagggctggaatactaccccccttctcagtacttgctgccaattctggagcaagatggaatcgagaactctcgggacagccctgatgggcccacggacagattctcaagggaggagttagagtggcagaacaggttctcagactatgagaagaggaaggaacagaagatgctggagaaactcgagtttgaacggcgcctggaactggggcagcgggagcacacccagctccttcagcagagcagcagccagaaggatgagatccttcagacggtcaaggaggagcagtcccggctggagcagggcctgagtgagcaccagcgccacctcaacgcagagcggcagcggctgcaggagcagctgaagcagacggaacagaacatttccagccggatccagaagctgctgcaggacaatcagagacaaaagaaaagctccgagattttgaaatcgctggaaaatgaaagaataagaatggaacagttgatgtccataacccaggaggagactgagagcctgcggcgacgtgacgttgcctccgccatgcagcagatgctgactgagagctgtaagaaccggctcatccagatggcctacgaatctcagaggcagaacttggtccagcaggcctgttccagcatggccgaaatggatgaacgattccagcagattctgtcgtggcagcaaatggatcagaacaaagccatcagccagatcctgcaggagagcgcgatgcagaaggctgcgttcgaggcactccaggtgaagaaagacctgatgcatcggcagatcaggagccagattaagttaatagaaactgagttattgcagctgacacagctggagttaaagaggaagtccctggacacagagtcactccaggagatgatctcggagcagcgctgggccctcagctccctgctccagcagctgctcaaagagaagcagcagcgagaggaagagctccgggaaatcctgacggagttagaagccaaaagtgaaaccaggcaggaaaattactggctgattcagtatcaacggcttttgaaccagaagcccttgtccttgaagctgcaagaagaggggatggagcgccagctggtggccctcctggaggagctgtcggctgagcactacctgcccatctttgcgcaccaccgcctctcactggacctgctgagccaaatgagcccaggggacctggccaaggtgggcgtctcagaagctggcctgcagcacgagatcctccggagagtccaggaactgctggatgcagccaggatccagccagagctgaaaccaccaatgggtgaggtcgtcacccctacggccccccaggagcctcctgagtctgtgaggccatccgctccccctgcagagctggaggtgcaggcctcagagtgtgtcgtgtgcctggaacgggaggcccagatgatcttcctcaactgtggccacgtctgctgctgccagcagtgctgccagccactgcgcacctgcccgctgtgccgccaggacatcgcccagcgcctccgcatctaccacagcagctgagtgctgcccgcccacctgggcctggtcctagccctgcctcggccactgtgagccccgggctcctgctcagccttgtgccagccagactcgtatgaggctcccccctgccctgggccccttccccactgcccaggagcccccatcctaagctccaagcatgtctgggccaggcagaggtgctcctcatccatgacaccaccagtctgaatggtcctgggggctggggctggagaggccgctgcaccaccacccgagcctgggagccagcgtcccagcctaatcacggatctgctgcctcccagctgtcttgactgaaggccaccgcccctgcaggagcttgggtcctcatctgggggccatgcacaggcccgtcccaccctgcatgtgggaagggagcaggagggcctggctgggtgaggggaggccttcctgggaaggcgtgtggtgcaggcctgtgctcacagtggcaccagcaaccctgggtctccctctctgctgctccccagaaccccggggccctcctgctctccacaactgtccctccttaccccatgtagctcgatccgaagcaggagtgtcaataaacctgtcttcagtgcgaaaaaaaaaaaaaaaaaaaaaaaaaaaaaaaaaaa

SEQ ID NO: 1283 - DNA, 7408 bp, Homo sapiens
atgaatgatggtgacacagtacaagaatacagtggccggctggaaagggctcccactggccaaatacgggacaatttaagcagcaagagaatcacgaagacatactgggatgttggcacaacccctacgctggttctttggcccatagttctgatggtacaaggacgagttcagcagccacagtctgaaaagggcctggaaaccaggggctcagacctgcacatgagggtctgcatcatgccaccaaataagctactgagaccagaagtgagagaaatgtttgaaattttccgaaataaaatcccctcccctatacacagaaaggcaaatgaagaggaacaaacacccagggtggcggcggtgagcgccccagcacctgccgccctgggcgcctcctccacctgcgcgccccacgcccgcttccggccggcttccaggcctcagaggcgatcccgaggaatcgttccgctcccaaggggcggagctttctcatcgccgcgctcggcattcggcttatgctgcctcgccccggcggccgtccagcgggaggcggagcgagtccaaaatggcggctctcaggctggcgcgctccgtgctgctggggctttgaggtggtcgccgggggtccgggggaccctttccccgccgcggaagccctagaggatgaatcggggaccctgctaaggtctggcggcggggctggagagcagtggcagcaagggctgcggtggcgtccacgcagcgggatgtgcgagagttactccaggtcgttgttgagggtctcggtggcgcagatctgccaggcgctgggctgggactcggtgcagctcagcgcctgccacctcctcacggacgtgctgcagcgctatctgcagcagctgggccggggctgccatcggtactctgagctctatggccgaacagacccaattttggatgatgttggtgaagctttccagctgatgggggttagtctacatgaactagaagactatattcacaacattgagcctgtcaccttcccacaccaaattccgtcatttcctgttagcaagaacaatgtacttcagtttcctcaacctggaagtaaagatgcagaggaaagaaaagaatacattcctgattacctgccacccattgtgtcttctcaagaagaagaagaagaagagcaggtgcccactgatggaggcacatcagcagaagccatgcaggttcccttggaagaagatgatgaattggaggaggaagaaattattaatgatgagaatttcctgggcaagagaccactggatagtcctgaagctgaagaactgccagccatgaagcggcctcggctattaagcactaaaggggacacgctagatgttgtgttattggaagctcgagagccactcagctcaataaatactcaaaagatcccaccaatgctttctccagtccatgtacaggacagtacagacttggcacctccctcacccgagccgccaatgttggctccagttgcaaaatcacaaatgccaactgcaaaaccattagaaacaaagtcatttacacctaaaacaaagactaaaactagctctccaggacagaagactaaatcacctaaaaccgcccagtcaccagcaatggtcggaagtcctattcgatcaccaaaaactgtatccaaagaaaagaaatcacctggacgttccaagagccccaagagtcccaagagccccaaggtcacgactcacattccccaaacacctgtgagacctgaaacgcccaacaggactccttcagctacactcagtgaaaaaatcagtaaagagactatccaggtaaaacaaatacagacaccccctgatgctgggaaactgaacagtgagaatcagccgaaaaaggctgtggtagcagataaaacgattgaggcctctatcgatgctgtgattgcacgagcctgtgctgagcgagagccagatcctttcgaattttcttctggatcggaatctgaaggagacatttttactagccctaagagaatttcaggcccggagtgtactactcccaaagcttccacttccgcgaacaatttcacaaagtcaggatccactcctctgcctctttccggtggaacctcaagttccgataactcatggacaatggatgcctccattgatgaggttgtacgtaaagcaaaactgggaacaccttcaaatatgccccccaactttccttatatctcttctccgtcagtgtctcctcccactcccgaacctctccacaaggtgtatgaggagaaaaccaagctgccttcctccgtggaggtaaagaagaagttgaaaaaggaactaaagactaaaatgaaaaagaaagaaaagcagagagatagggagagggaaaaagacaagaacaaggacaaaagtaaggagaaggataaagtgaaagagaaagagaaagacaaggaaactggcagggaaacaaagtatccctggaaggaatttcttaaagaggaagaggcagatccctacaagtttaaaatcaaagaatttgaagatgttgatcccaaagtgaaattgaaagatggacttgtgaggaaggagaaagagaagcataaagataagaagaaagatagagagaaaggcaagaaagataaagataagagagagaaagaaaaagtgaaagataaaggcagagaagataagatgaaagccccagcacccccactggtgttgcccccaaaagagttggccctgcccttgttcagccctgccacagcctccagggtcccagccatgctgccatctttgttgccagtgcttccggaaaaactgtttgaggagaaagagaaggtgaaggagaaagaaaagaaaaaggacaaaaaggagaagaagaaaaagaaggaaaaagagaaggagaagaaggagaaggaaagagagaaagagaagagagagcgagagaagagagaaaaagagaaggagaaacacaagcatgaaaaaataaaagtggaaccagtcgctctggccccgagtccagttatccccagattaactctccgagtcggtgctggccaagacaagattgtcatcagcaaggtggtccctgcccccgaggccaagccggcgccctcgcagaacaggccgaagaccccaccgccggcccccgcgcccgcccccggccccatgctcgtcagccctgcgcccgtgccgctgccgctgctcgcccaggccgccgcgggccctgccctgctgccctccccgggtcccgccgcctccggggccagtgccaaagcccccgtgcgcagcgtggtgactgagacggtcagcacctacgtgatccgagatgagtggggcaatcagatctggatctgccctgggtgtaacaagcctgacgatgggagtcccatgattgggtgtgacgactgcgatgactggtaccactggccctgtgttggaatcatgactgcacccccagaagagatgcagtggttctgccccaagtgtgcgaacaagaagaaggacaaaaagcacaagaagaggaagcatcgagcccactgacgactcccgaggggctggaccaagcggggtcagcccgggcttcttccctggcgcctctggaagggagctggtgcaagtctgccgtcacatccacccccagatgcctgtggataaagaacccaggaggactgaggctggaacacaccgcgcacctggattgttcactcccgagccgccttggcctgtggctccgtggcagtgcgacagaaggaaactcaagcagaggcgtggcctgggggctgcccctcctccacttctctaataccagtgacaagtattattaataaagagcgtacatcttcccttttgatttcctttattctctccagggccttttcattgaggtattagatgagaagataatgtacaaactgcctcaactgtaatttaaggatgatagagtctgtatacagttttcagcccctttccctctatagtaagataatcagaataacataaaagaaaactccagttggagtaccggtaaatatttttgtgataagaatatatgaagcttccctccttcccccgtttttagtactaacatgtaaaatgttcaggcttttgtgaaataccttatattttttaagaaaaaggtttctatcatgtcctgtttgcttttgtgcaaattatttttgtttaatgtattttatatcttcgttgcattctaattttgcccttctttaaactgctggagtctcttctcactgcttgtacatttcatcaacttgtataaaaactcttcagactaaaagattgcccctaatgtaaataataaatatttatgaagtagttattttttaaatttttatcgtgtttaattctggctttctctgaaatccactgtgatttcagccaggtctgtaatgacgctggacagaaacaaggctagagaaaaagccatcgttcaaagaaatttcccttgagctcagcctgcgcagtgcccggaaacatggtggggaaagggcccgagcagttggaaggaaaacaaggcaatttaaatttagagtttatgacttgaagttgttttgtttgttgtctattttgtttttgtaaatttctttgacagacttttactaaaaggacatgtagtttccatgaaagtaaaaaaaaaaaacaacaaaaaacccacatatactgtagcattttgtctttatattgttttatttctacaaatctgttcattaatattgtgctttaaggctgaaatgaagtatattatgaatttttttaagaaaactcatcaaatttcagggtatcacaaaactttattatattattatactgcccactatttattatatgttatagatgtctgagaggtaaaccaaatattttatttttaatgttaaaaaaacatcaaatttaactttattagcatattttagcaactttgggataaatacggacttttacttgattttgaaataatcccagtgtaggcccatgtgctggatctgttggatgctagaatatgggctttgaacctaatacaaatatattactagaaaatgtgatttttttaaatgccaagtaaattgatattagtgtatgaattagtcatattttaaaacattatgtggttagagaaatgcggttttctgccatgaatgttaagttgcaaatcagtggaaatggagtcgacctcttcggagcacagggtgtcattgccctcgttgttcaagaggccagaatttttctatccccgctaagaaacaaagcatctatgttgagatatgtgtttttttgtttgattaatttgagatcattctaaatactttatacaatattttcacatgcacaaaaatgcgcgttagtggtttttggagaggggtgaggggtgggggaagtgcaaaataaagattattggctatttcatagtttgcttttccattttctttatttaggatttagttccttgaggcgtggtccatgatctgaagttgccacgtttaagtgagcaggtcacgctactgaaatcagaatggaggtgcctatatataactttccccccaatcttactgtctgagagacttcagcccatgctacatttaaggaatttcaatcagtttgttgtcccttgctatttcatggttgctttcctaaatccagttcatgattttataaatggtctttgcaataataaaaccaaagaatcattttcagggggctggagagctcgagggattagtaatggaatacagagcctttcacctctaggtcagtgagtcggatccagtccaggtcactagagaccaaaagttgtcaccatcttatgactgttcagtggcctgtgtgaaatgaactggtggtctcagtctctactgggtggctggctgtgacaccaaccaaaggaagttcaagaaactgcaaagagaaatgtggattagaaaataaaacatccacattacaaagaaaaagttagaaagttgggcgtagtcattctccagaaagtaataccgaagaaaaaagagcaacttacaaataccacagacaaacagagattaatttactttccttaatgaagtcaagcaaaaccggaaaagaaaagcctatattgggtgagaggggagagggttaagtggggaggatgatttgatcagaagaaaaagttcagggacccaaacatcagggaaaaatgggttttgacttttgagggagaaggaaatcgcaacagcagcaatttgaggaactactgtagcagaattcgacacaaaggaatgagaagtatttccctttagagggcttgcagtgttccagttggaagcaaaaccctgaccggctttcatttagcccagcactgtcatttgaatagcatcaatactttattaagagaagtaatgcggggggggcggggattgtcctgactagtgattttattgagggagatggtatttgagaaacagaccctcacctcatgaaaccgagacgctcttctggtgtgatgatctgccgtcagagccagatggaactggcagagcttaatttctgtggctgacaaggtgtttctcttccaaaggtgtctacagtgaggcacagtgaggatctttatcccctgactgatttgtggttccaaatgtcctggagaaaaccagaggctatcagagtcttctgactttgtcgggcttttttcagagataaaatatagtgcattactctcctgtatcacctaaaccgcctttgttctcctttcaatgggatgattaaacaaagacctactaaccaaattaaagtataaaatgaacactgagatatggaaaccttgccactaagaatgctaatgaaaaaagttcactaaagccacgctggctatgttttcaatacaaatagttttatggccaatctctttagatcatagcagttttctttagaagtgtaagtctaaaagtagatgagttaccttgacggaagaatgaaacagataatgtcctgaataatgtctctttccacaatggtatcagtcattctgttaggaaactatttctttgagaatcttgcgttcgctgcagcctaaaaagtataaagtaactattaatccatgtgtgcaggcgagtagatgacatcgaaatgagatatttaggtggacagcttgttcatttaatctacatatgagttattaaaatggctagtggttatttttttcgttctgggcaactcagttttaaatttagtttgaagaacattgttacatggtttcattcatttcgtccacatttgctacgcacgttttttggaaatggcaatgatgtatcagaaccaagttcatttccagttgcctggtttctgagctgctctagcccttccgctggctccatgattttggaattgttcccaaagtatactatgtattaaagtgtattgcatgaaattct

SEQ ID NO: 1284 - DNA, 7357 bp, Homo sapiens
atgaatgatggtgacacagtacaagaatacagtggccggctggaaagggctcccactggccaaatacgggacaatttaagcagcaagagaatcacgaagacatactgggatgttggcacaacccctacgctggttctttggcccatagttctgatggtacaaggacgagttcagcagccacagtctgaaaagggcctggaaaccaggggctcagacctgcacatgagggtctgcatcatgccaccaaggaaagggccccctccagaatcctggaggagctgttcctcaaaccaagaagtgtctctgagggtgagcgccccagcacctgccgccctgggcgcctcctccacctgcgcgccccacgcccgcttccggccggcttccaggcctcagaggcgatcccgaggaatcgttccgctcccaaggggcggagctttctcatcgccgcgctcggcattcggcttatgctgcctcgccccggcggccgtccagcgggaggcggagcgagtccaaaatggcggctctcaggctggcgcgctccgtgctgctggggctttgaggtggtcgccgggggtccgggggaccctttccccgccgcggaagccctagaggatgaatcggggaccctgctaaggtctggcggcggggctggagagcagtggcagcaagggctgcggtggcgtccacgcagcgggatgtgcgagagttactccaggtcgttgttgagggtctcggtggcgcagatctgccaggcgctgggctgggactcggtgcagctcagcgcctgccacctcctcacggacgtgctgcagcgctatctgcagcagctgggccggggctgccatcggtactctgagctctatggccgaacagacccaattttggatgatgttggtgaagctttccagctgatgggggttagtctacatgaactagaagactatattcacaacattgagcctgtcaccttcccacaccaaattccgtcatttcctgttagcaagaacaatgtacttcagtttcctcaacctggaagtaaagatgcagaggaaagaaaagaatacattcctgattacctgccacccattgtgtcttctcaagaagaagaagaagaagagcaggtgcccactgatggaggcacatcagcagaagccatgcaggttcccttggaagaagatgatgaattggaggaggaagaaattattaatgatgagaatttcctgggcaagagaccactggatagtcctgaagctgaagaactgccagccatgaagcggcctcggctattaagcactaaaggggacacgctagatgttgtgttattggaagctcgagagccactcagctcaataaatactcaaaagatcccaccaatgctttctccagtccatgtacaggacagtacagacttggcacctccctcacccgagccgccaatgttggctccagttgcaaaatcacaaatgccaactgcaaaaccattagaaacaaagtcatttacacctaaaacaaagactaaaactagctctccaggacagaagactaaatcacctaaaaccgcccagtcaccagcaatggtcggaagtcctattcgatcaccaaaaactgtatccaaagaaaagaaatcacctggacgttccaagagccccaagagtcccaagagccccaaggtcacgactcacattccccaaacacctgtgagacctgaaacgcccaacaggactccttcagctacactcagtgaaaaaatcagtaaagagactatccaggtaaaacaaatacagacaccccctgatgctgggaaactgaacagtgagaatcagccgaaaaaggctgtggtagcagataaaacgattgaggcctctatcgatgctgtgattgcacgagcctgtgctgagcgagagccagatcctttcgaattttcttctggatcggaatctgaaggagacatttttactagccctaagagaatttcaggcccggagtgtactactcccaaagcttccacttccgcgaacaatttcacaaagtcaggatccactcctctgcctctttccggtggaacctcaagttccgataactcatggacaatggatgcctccattgatgaggttgtacgtaaagcaaaactgggaacaccttcaaatatgccccccaactttccttatatctcttctccgtcagtgtctcctcccactcccgaacctctccacaaggtgtatgaggagaaaaccaagctgccttcctccgtggaggtaaagaagaagttgaaaaaggaactaaagactaaaatgaaaaagaaagaaaagcagagagatagggagagggaaaaagacaagaacaaggacaaaagtaaggagaaggataaagtgaaagagaaagagaaagacaaggaaactggcagggaaacaaagtatccctggaaggaatttcttaaagaggaagaggcagatccctacaagtttaaaatcaaagaatttgaagatgttgatcccaaagtgaaattgaaagatggacttgtgaggaaggagaaagagaagcataaagataagaagaaagatagagagaaaggcaagaaagataaagataagagagagaaagaaaaagtgaaagataaaggcagagaagataagatgaaagccccagcacccccactggtgttgcccccaaaagagttggccctgcccttgttcagccctgccacagcctccagggtcccagccatgctgccatctttgttgccagtgcttccggaaaaactgtttgaggagaaagagaaggcgaaggagaaagaaaagaaaaaggacaaaaaggagaagaagaaaaagaaggaaaaagagaaggagaagaaggagaaggaaagagagaaagagaagagagagcgagagaagagagaaaaagagaaggagaaacacaagcatgaaaaaataaaagtggaaccagtcgctctggccccgagtccagttatccccagattaactctccgagtcggtgctggccaagacaagattgtcatcagcaaggtggtccctgcccccgaggccaagccggcgccctcgcagaacaggccgaagaccccaccgccggcccccgcgcccgcccccggccccatgctcgtcagccctgcgcccgtgccgctgccgctgctcgcccaggccgccgcgggccctgccctgctgccctccccgggtcccgccgcctccggggccagtgccaaagcccccgtgcgcagcgtggtgactgagacggtcagcacctacgtgatccgagatgagtggggcaatcagatctggatctgccctgggtgtaacaagcctgacgatgggagtcccatgattgggtgtgacgactgcgatgactggtaccactggccctgtgttggaatcatgactgcacccccagaagagatgcagtggttctgccccaagtgtgcgaacaagaagaaggacaaaaagcacaagaagaggaagcatcgagcccactgacgactcccgaggggctggaccaagcggggtcagcccgggcttcttccctggcgcctctggaagggagctggtgcaagtctgccgtcacatccacccccagatgcctgtggataaagaacccaggaggactgaggctggaacacaccgcgcacctggattgttcactcccgagccgccttggcctgtggctccgtggcagtgcgacagaaggaaactcaagcagaggcgtggcctgggggctgcccctcctccacttctctaataccagtgacaagtattattaataaagagcgtacatcttcccttttgatttcctttattctctccagggccttttcattgaggtattagatgagaagataatgtacaaactgcctcaactgtaatttaaggatgatagagtctgtatacagttttcagcccctttccctctatagtaagataatcagaataacataaaagaaaactccagttggagtaccggtaaatatttttgtgataagaatatatgaagcttccctccttcccccgtttttagtactaacatgtaaaatgttcaggcttttgtgaaataccttatattttttaagaaaaaggtttctatcatgtcctgtttgcttttgtgcaaattatttttgtttaatgtattttatatcttcgttgcattctaattttgcccttctttaaactgctggagtctcttctcactgcttgtacatttcatcaacttgtataaaaactcttcagactaaaagattgcccctaatgtaaataataaatatttatgaagtagttattttttaaatttttatcgtgtttaattctggctttctctgaaatccactgtgatttcagccaggtctgtaatgacgctggacagaaacaaggctagagaaaaagccatcgttcaaagaaatttcccttgagctcagcctgcgcagtgcccggaaacatggtggggaaagggcccgagcagttggaaggaaaacaaggcaatttaaatttagagtttatgacttgaagttgttttgtttgttgtctattttgtttttgtaaatttctttgacagacttttactaaaaggacatgtagtttccatgaaagtaaaaaaaaaaaacaacaaaaaacccacatatactgtagcattttgtctttatattgttttatttctacaaatctgttcattaatattgtgctttaaggctgaaatgaagtatattatgaatttttttaagaaaactcatcaaatttcagggtatcacaaaactttattatattattatactgcccactatttattatatgttatagatgtctgagaggtaaaccaaatattttatttttaatgttaaaaaaacatcaaatttaactttattagcatattttagcaactttgggataaatacggacttttacttgattttgaaataatcccagtgtaggcccatgtgctggatctgttggatgctagaatatgggctttgaacctaatacaaatatattactagaaaatgtgatttttttaaatgccaagtaaattgatattagtgtatgaattagtcatattttaaaacattatgtggttagagaaatgcggttttctgccatgaatgttaagttgcaaatcagtggaaatggagtcgacctcttcggagcacagggtgtcattgccctcgttgttcaagaggccagaatttttctatccccgctaagaaacaaagcatctatgttgagatatgtgtttttttgtttgattaatttgagatcattctaaatactttatacaatattttcacatgcacaaaaatgcgcgttagtggtttttggagaggggtgaggggtgggggaagtgcaaaataaagattattggctatttcatagtttgcttttccattttctttatttaggatttagttccttgaggcgtggtccatgatctgaagttgccacgtttaagtgagcaggtcacgctactgaaatcagaatggaggtgcctatatataactttccccccaatcttactgtctgagagacttcagcccatgctacatttaaggaatttcaatcagtttgttgtcccttgctatttcatggttgctttcctaaatccagttcatgattttataaatggtctttgcaataataaaaccaaagaatcattttcagggggctggagagctcgagggattagtaatggaatacagagcctttcacctctaggtcagtgagtcggatccagtccaggtcactagagaccaaaagttgtcaccatcttatgactgttcagtggcctgtgtgaaatgaactggtggtctcagtctctactgggtggctggctgtgacaccaaccaaaggaagttcaagaaactgcaaagagaaatgtggattagaaaataaaacatccacattacaaagaaaaagttagaaagttgggcgtagtcattctccagaaagtaataccgaagaaaaaagagcaacttacaaataccacagacaaacagagattaatttactttccttaatgaagtcaagcaaaaccggaaaagaaaagcctatattgggtgagaggggagagggttaagtggggaggatgatttgatcagaagaaaaagttcagggacccaaacatcagggaaaaatgggttttgacttttgagggagaaggaaatcgcaacagcagcaatttgaggaactactgtagcagaattcgacacaaaggaatgagaagtatttccctttagagggcttgcagtgttccagttggaagcaaaaccctgaccggctttcatttagcccagcactgtcatttgaatagcatcaatactttattaagagaagtaatgcggggggggcggggattgtcctgactagtgattttattgagggagatggtatttgagaaacagaccctcacctcatgaaaccgagacgctcttctggtgtgatgatctgccgtcagagccagatggaactggcagagcttaatttctgtggctgacaaggtgtttctcttccaaaggtgtctacagtgaggcacagtgaggatctttatcccctgactgatttgtggttccaaatgtcctggagaaaaccagaggctatcagagtcttctgactttgtcgggcttttttcagagataaaatatagtgcattactctcctgtatcacctaaaccgcctttgttctcctttcaatgggatgattaaacaaagacctactaaccaaattaaagtataaaatgaacactgagatatggaaaccttgccactaagaatgctaatgaaaaaagttcactaaagccacgctggctatgttttcaatacaaatagttttatggccaatctctttagatcatagcagttttctttagaagtgtaagtctaaaagtagatgagttaccttgaccgaagaatgaaacagataatgtcctgaataatgtctctttccacaatggtatcagtcattctgttaggaaactatttctttgagaatcttgcgttcgctgcagcctaaaaagtataaagtaactattaatccatgtgtgcaggcgagtagatgacatcgaaatgagatatttaggtggacagcttgttcatttaatctacatatgagttattaaaatggctagtggttatttttttcgttctgggcaactcagttttaaatttagtttgaagaacattgttacatggtttcattcatttcgtccacatttgctacgcacgttttttggaaatggcaatgatgtatcagaaccaagttcatttccagttgcctggtttctgagctgctctagcccttccgctggctccatgattttggaattgttcccaaagtatactatgtattaaagtgtattgcatgaaattct

SEQ ID NO: 1285 - DNA, 2805 bp, Homo sapiens
gcaggcttcggctattggtgttggtgccgcggccactggcccagccgatgggtcgggacacacgctcgcgctcgcggtccgcgggtcgccggggccgaaggcggcagagtcagagcgggagccgaagtcggagcaggagccatgggcggcgaaaccgacggcgccgggaggacgagggacggcgcagacggaggcggcggagccgggagcgcaggtcagattcagaggaagagcggtggcagcgctcagggatgcgaagccggagccccccgcggcccaagtggcactcaagagatgggtcctctcagtcggactcaggagaggagcagtcacggggccagtgggctcgccggcgacggcgcgcacgctcgtggtctcctagctcctcagcatccagctccgcgtctccagggcgatcccagagcccccgggcggccgcggctgccctgagccagcagcagagcctgcaggagcggctgcggctgcgggaggagcggaagcagcaggaggagctgatgaaggccttcgagacgcccgaggagaagcgcgcacggcggctggccaagaaggaggccaaggagcgcaagaagcgggagaagatgggctggggtgaggagtacatgggctacaccaacaccgacaaccccttcggagacaacaacctgctgggcaccttcatctggaataaggccctggagaagaaggggatcagccacctggaggagaaggagctgaaggagcggaacaagaggatccaggaggacaaccggctggagctgcagaaggtgaagcagctgcggctggagcgggagcgggagaaggccatgcgcgagcaggagctggagatgctgcagcgcgagaaggaggcagagcacttcaagacatgggaggagcaggaggacaacttccacctccagcaggccaagctgcgttccaagatccgcatccgggacgggcgggccaagcccatcgacctgctggccaagtacatcagcgctgaggatgacgatctggccgtggagatgcatgagccctacacgttcctcaacggcctcaccgtggccgacatggaggacctgctggaggatatccaggtctacatggagctggagcagggcaagaacgccgacttctggcgggacatgaccaccatcaccgaggacgagatctccaagctccgcaagctggaggcctcgggcaaggggccaggtgagcgccgcgagggggtcaacgcctccgtcagctctgatgtgcagtcggtgttcaaggggaagacatacaaccagctgcaggtcatcttccagggcatcgagggcaaaatccgcgctggtggccccaacctggacatgggctactgggagagcctcctgcagcagcttcgtgcccacatggcacgggcccggctgcgtgagcgccaccaggacgtgctgcggcagaagctgtacaaactgaagcaggagcagggcgtggagagcgagccgctgttccccatcctcaagcaggagccccagtcccccagccgcagcctggagcctgaggacgcggcgcccaccccgcccgggccctcctcggagggcggccccgcggaggccgaggtggacggcgcgaccccgacagagggcgacggcgacggggacggtgagggcgagggcgagggcgaggcggtgctcatggaggaggacctgatccagcagagcctggacgactacgacgccggcaggtacagcccgcggctgctcacggcgcacgagctgccactggacgcgcacgtgctggaaccggatgaggacctgcagcgcctgcagctctcgcgccagcagctccaggtcacgggagacgccagcgagagcgccgaggacatcttcttccggcgggccaaggagggcatgggccaggacgaggcgcagttcagcgtggagatgccactcaccggcaaggcctacctgtgggccgacaagtaccggccacgcaagccgcgcttcttcaaccgcgtgcacacgggcttcgagtggaacaagtacaaccagacgcactacgactttgacaacccaccgcccaagatcgtgcagggatacaagttcaacatcttctaccccgacctcatcgacaagcgctccacgcccgagtacttcctggaggcctgcgccgacaacaaggatttcgccatcctgcgcttccacgcggggccgccctacgaggacatcgctttcaagatcgtcaaccgcgagtgggaatactcgcaccgccacggcttccgctgccagtttgccaacggcatcttccagctgtggtttcacttcaagcgctaccgctatcggcggtgacggccctggggaacggcaggcagcactgaggccgggaccctgctggcgcccgatccgccactgcagaagagaccctctgtggacacccacactctgcagggactggcccccaactcaccccgtgctggctggtggggtccatttccccgcagcgggccaggagggccgagggccacacgggtgccacagcccaggtcggagtggcccagccggcaggcttgttcttcagcatccgacgggaacatctccaacagaagcaaaacggaaagtgcctcccggacccccagagggccacccaacctcaccagtcaccagccccagaccacccacagcccctcccagacaccccgcctcatctggaaatagttccgtttgtttctctaaaaagacttgtaggtgggaaaaaaaatcttttgttctcatggaattggcctattggcaagatcgcatgtttttttaataaacgttgtattttagaata

SEQ ID NO: 1286 - DNA, 2669 bp, Homo sapiens
gcaggcttcggctattggtgttggtgccgcggccactggcccagccgatgggtcgggacacacgctcgcgctcgcggtccgcgggtcgccggggccgaaggcggcagagtcagagcgggagccgaagtcggagcaggagccatgggcggcgaaaccgacggcgccgggaggacgagggacggcgcagacggaggcggcggagccgggagcgcaggtcagattcagaggaagagcggtggcagcgctcagggatgcgaagccggagccccccgcggcccaagtggcactcaagagatgggtcctctcagtcggactcaggagaggagcagtcacggggccagtgggctcgccggcgacggcgcgcacgctcgtggtctcctagctcctcagcatccagctccgcgtctccagggcgatcccagagcccccgggcggccgcggctgccctgagccagcagcagagcctgcaggagcggctgcggctgcgggaggagcggaagcagcaggaggagctgatgaaggccttcgagacgcccgaggagaagcgcgcacggcggctggccaagaaggaggccaaggagcgcaagaagcgggagaagatgggctggggtgaggagtacatgggctacaccaacaccgacaaccccttcggagacaacaacctgctgggcaccttcatctggaataaggccctggagaagaaggggatcagccacctggaggagaaggagctgaaggagcggaacaagaggatccaggaggacaaccggctggagctgcagaaggtgaagcagctgcggctggagcgggagcgggagaaggccatgcgcgagcaggagctggagatgctgcagcgcgagaaggaggcagagcacttcaagacatgggaggagcaggaggacaacttccacctccagcaggccaagctgcgttccaagatccgcatccgggacgggcgggccaagcccatcgacctgctggccaagtacatcagcgctgaggatgacgatctggccgtggagatgcatgagccctacacgttcctcaacggcctcaccgtggccgacatggaggacctgctggaggatatccaggtctacatggagctggagcagggcaagaacgccgacttctggcgggacatgaccaccatcaccgaggacgagatctccaagctccgcaagctggaggcctcgggcaaggggccaggtgagcgccgcgagggggtcaacgcctccgtcagctctgatgtgcagtcggtgttcaaggggaagacatacaaccagctgcaggtcatcttccagggcatcgagggcaaaatccgcgctggtggccccaacctggacatgggctactgggagagcctcctgcagcagcttcgtgcccacatggcacgggcccggctgcgtgagcgccaccaggacgtgctgcggcagaagctgtacaaactgaagcaggagcagggcgtggagagcgagccgctgttccccatcctcaagcaggagccccagtcccccagccgcagcctggagcctgaggacgcggcgcccaccccgcccgggccctcctcggagggcggccccgcggaggccgaggtggacggcgcgaccccgacagagggcgacggcgacggggacggtgagggcgagggcgagggcgaggcggtgctcatggaggaggacctgatccagcagagcctggacgactacgacgccggcaggtacagcccgcggctgctcacggcgcacgagctgccactggacgcgcacgtgctggaaccggatgaggacctgcagcgcctgcagctctcgcgccagcagctccaggtcacgggagacgccagcgagagcgccgaggacatcttcttccggcgggccaaggagggcatgggccaggacgaggcgcagttcagcgtggagatgccactcaccggcaaggcctacctgtgggccgacaagtaccggccacgcaagccgcgcttcttcaaccgcgtgcacacgggcttcgagtggaacaagtacaaccagacgcactacgactttgacaacccaccgcccaagatcgtgcagggatacaagttcaacatcttctaccccgacctcatcgacaagcgctccacgcccgagtacttcctggaggcctgcgccgacaacaaggatttcgccatcctgcgcttccacgcggggccgccctacgaggacatcgctttcaagatcgtcaaccgcgagtgggaatactcgcaccgccacggcttccgctgccagtttgccaacggcatcttccagctgtggtttcacttcaagcgctaccgctatcggcggtgacggccctggggaacggcaggccaggagggccgagggccacacgggtgccacagcccaggtcggagtggcccagccggcaggcttgttcttcagcatccgacgggaacatctccaacagaagcaaaacggaaagtgcctcccggacccccagagggccacccaacctcaccagtcaccagccccagaccacccacagcccctcccagacaccccgcctcatctggaaatagttccgtttgtttctctaaaaagacttgtaggtgggaaaaaaaatcttttgttctcatggaattggcctattggcaagatcgcatgtttttttaataaacgttgtattttagaata

SEQ ID NO: 1287 - DNA, 3613 bp, Homo sapiens
gcaggcttcggctattggtgttggtgccgcggccactggcccagccgatgggtcgggacacacgctcgcgctcgcggtccgcgggtcgccggggccgaaggcggcagagtcagagcgggagccgaagtcggagcaggagccatgggcggcgaaaccgacggcgccgggaggacgagggacggcgcagacggaggcggcggagccgggagcgcaggtcagattcagaggaagagcggtggcagcgctcagggatgcgaagccggagccccccgcggcccaagtggcactcaagagatgggtcctctcagtcggactcaggagaggagcagtcacggggccagtgggctcgccggcgacggcgcgcacgctcgtggtctcctagctcctcagcatccagctccgcgtctccagggcgatcccagagcccccgggcggccgcggctgccctgagccagcagcagagcctgcaggagcggctgcggctgcgggaggagcggaagcagcaggaggagctgatgaaggccttcgagacgcccgaggagaagcgcgcacggcggctggccaagaaggaggccaaggagcgcaagaagcgggagaagatgggctggggtgaggagtacatgggctacaccaacaccgacaaccccttcggagacaacaacctgctgggcaccttcatctggaataaggccctggagaagaaggggatcagccacctggaggagaaggagctgaaggagcggaacaagaggatccaggaggacaaccggctggagctgcagaaggtgaagcagctgcggctggagcgggagcgggagaaggccatgcgcgagcaggagctggagatgctgcagcgcgagaaggaggcagagcacttcaagacatgggaggagcaggaggacaacttccacctccagcaggccaagctgcgttccaagatccgcatccgggacgggcgggccaagcccatcgacctgctggccaagtacatcagcgctgaggatgacgatctggccgtggagatgcatgagccctacacgttcctcaacggcctcaccgtggccgacatggaggacctgctggaggatatccaggtctacatggagctggagcagggcaagaacgccgacttctggcgggacatgaccaccatcaccgaggacgagatctccaagctccgcaagctggaggcctcgggcaaggggccaggtgagcgccgcgagggggtcaacgcctccgtcagctctgatgtgcagtcggtgttcaaggggaagacatacaaccagctgcaggtcatcttccagggcatcgagggcaaaatccgcgctggtggccccaacctggacatgggctactgggagagcctcctgcagcagcttcgtgcccacatggcacgggcccggctgcgtgagcgccaccaggacgtgctgcggcagaagctgtacaaactgaagcaggagcagggcgtggagagcgagccgctgttccccatcctcaagcaggagccccagtcccccagccgcagcctggagcctgaggacgcggcgcccaccccgcccgggccctcctcggagggcggccccgcggaggccgaggtggacggcgcgaccccgacagagggcgacggcgacggggacggtgagggcgagggcgagggcgaggcggtgctcatggaggaggacctgatccagcagagcctggacgactacgacgccggcaggtacagcccgcggctgctcacggcgcacgagctgccactggacgcgcacgtgctggaaccggatgaggacctgcagcgcctgcagctctcgcgccagcagctccaggtcacgggagacgccagcgagagcgccgaggacatcttcttccggcgggccaaggagggcatgggccaggacgaggcgcagttcagcgtggagatgccactcaccggcaaggcctacctgtgggccgacaagtaccggccacgcaagccgcgcttcttcaaccgcgtgcacacgggcttcgagtggaacaagtacaaccagacgcactacgactttgacaacccaccgcccaagatcgtgcagggatacaagttcaacatcttctaccccgacctcatcgacaagcgctccacgcccgagtacttcctggaggcctgcgccgacaacaaggatttcgccatcctgcgcttccacgcggggccgccctacgaggacatcgctttcaagatcgtcaaccgcgagtgggaatactcgcaccgccacggcttccgctgccagtttgccaacggcatcttccagctgtggtttcacttcaagcgctaccgctatcggcggtgacggccctggggaacggcaggcaggtgtcctcgggggcacagtaaaggggcttcggtgaagctggtggtcactccggggccgctgtctgggctgcagggccgcgggttcacgtcccacctcaggccgcatctttctttcgccaggcctcagtttcctcctatataaaaggggggtcaccattgagcctgccatggtgagctgaggagacactgggacaggctggcctagggtcctgatgcaacggagggggcgctaggggcatctttcgagcacgagggtggccagcagccgccagctgacctcaccgtccaggcggacactctccaccgcccctcagccaggctgggtggggcccacagggcctgccccaagtggcggccacacagggtgttgtggagatgggccagaggggcctgggcttggcggtgccaggctcgtgagaagcaggaaactcaaggccagccctgccacatcacggggcacccactgggcgtgaggcagagcccgcggctgtggggcagctccagccctgcccacaggccaccctcgcccgcacaggcagcactgaggccgggaccctgctggcgcccgatccgccactgcagaagagaccctctgtggacacccacactctgcagggactggcccccaactcaccccgtgctggctggtggggtccatttccccgcagcgggtatggaggatgcgtcgaggtccctgtctctgtcaaggtcgtgggaaccaaaagtcactgagccgtcctccccccacctctgagcacagggcctggagggcaggggctccccgaaggctgggggttggagaagggtgaggggcttcccccagggatccccccacctggcctgctcacggggccttggagcatgagaccagtgaccccgagttttgcccatatcaggacagtggctccttctcactcccctttctcaggccaggagggccgagggccacacgggtgccacagcccaggtcggagtggcccagccggcaggcttgttcttcagcatccgacgggaacatctccaacagaagcaaaacggaaagtgcctcccggacccccagagggccacccaacctcaccagtcaccagccccagaccacccacagcccctcccagacaccccgcctcatctggaaatagttccgtttgtttctctaaaaagacttgtaggtgggaaaaaaaatcttttgttctcatggaattggcctattggcaagatcgcatgtttttttaataaacgttgtattttagaataatcttaggtttg

SEQ ID NO: 1288 - DNA, 3344 bp, Homo sapiens
gcaggcttcggctattggtgttggtgccgcggccactggcccagccgatgggtcgggacacacgctcgcgctcgcggtccgcgggtcgccggggccgaaggcggcagagtcagagcgggagccgaagtcggagcaggagccatgggcggcgaaaccgacggcgccgggaggacgagggacggcgcagacggaggcggcggagccgggagcgcaggtcagattcagaggaagagcggtggcagcgctcagggatgcgaagccggagccccccgcggcccaagtggcactcaagagatgggtcctctcagtcggactcaggagaggagcagtcacggggccagtgggctcgccggcgacggcgcgcacgctcgtggtctcctagctcctcagcatccagctccgcgtctccagggcgatcccagagcccccgggcggccgcggctgccctgagccagcagcagagcctgcaggagcggctgcggctgcgggaggagcggaagcagcaggaggagctgatgaaggccttcgagacgcccgaggagaagcgcgcacggcggctggccaagaaggaggccaaggagcgcaagaagcgggagaagatgggctggggtgaggagtacatgggctacaccaacaccgacaaccccttcggagacaacaacctgctgggcaccttcatctggaataaggccctggagaagaaggggatcagccacctggaggagaaggagctgaaggagcggaacaagaggatccaggaggacaaccggctggagctgcagaaggtgaagcagctgcggctggagcgggagcgggagaaggccatgcgcgagcaggagctggagatgctgcagcgcgagaaggaggcagagcacttcaagacatgggaggagcaggaggacaacttccacctccagcaggccaagctgcgttccaagatccgcatccgggacgggcgggccaagcccatcgacctgctggccaagtacatcagcgctgaggatgacgatctggccgtggagatgcatgagccctacacgttcctcaacggcctcaccgtggccgacatggaggacctgctggaggatatccaggtctacatggagctggagcagggcaagaacgccgacttctggcgggacatgaccaccatcaccgaggacgagatctccaagctccgcaagctggaggcctcgggcaaggggccaggtgagcgccgcgagggggtcaacgcctccgtcagctctgatgtgcagtcggtgttcaaggggaagacatacaaccagctgcaggtcatcttccagggcatcgagggcaaaatccgcgctggtggccccaacctggacatgggctactgggagagcctcctgcagcagcttcgtgcccacatggcacgggcccggctgcgtgagcgccaccaggacgtgctgcggcagaagctgtacaaactgaagcaggagcagggcgtggagagcgagccgctgttccccatcctcaagcaggagccccagtcccccagccgcagcctggagcctgaggacgcggcgcccaccccgcccgggccctcctcggagggcggccccgcggaggccgaggtggacggcgcgaccccgacagagggcgacggcgacggggacggtgagggcgagggcgagggcgaggcggtgctcatggaggaggacctgatccagcagagcctggacgactacgacgccggcaggtacagcccgcggctgctcacggcgcacgagctgccactggacgcgcacgtgctggaaccggatgaggacctgcagcgcctgcagctctcgcgccagcagctccaggtcacgggagacgccagcgagagcgccgaggacatcttcttccggcgggccaaggagggcatgggccaggacgaggcgcagttcagcgtggagatgccactcaccggcaaggcctacctgtgggccgacaagtaccggccacgcaagccgcgcttcttcaaccgcgtgcacacgggcttcgagtggaacaagtacaaccagacgcactacgactttgacaacccaccgcccaagatcgtgcagggatacaagttcaacatcttctaccccgacctcatcgacaagcgctccacgcccgagtacttcctggaggcctgcgccgacaacaaggatttcgccatcctgcgcttccacgcggggccgccctacgaggacatcgctttcaagatcgtcaaccgcgagtgggaatactcgcaccgccacggcttccgctgccagtttgccaacggcatcttccagctgtggtttcacttcaagcgctaccgctatcggcggtgacggccctggggaacggcaggcaggtgtcctcgggggcacagtaaaggggcttcggtgaagctggtggtcactccggggccgctgtctgggctgcagggccgcgggttcacgtcccacctcaggccgcatctttctttcgccaggcctcagtttcctcctatataaaaggggggtcaccattgagcctgccatggtgagctgaggagacactgggacaggctggcctagggtcctgatgcaacggagggggcgctaggggcatctttcgagcacgagggtggccagcagccgccagctgacctcaccgtccaggcggacactctccaccgcccctcagccaggctgggtggggcccacagggcctgccccaagtggcggccacacagggtgttgtggagatgggccagaggggcctgggcttggcggtgccaggctcgtgagaagcaggaaactcaaggccagccctgccacatcacggggcacccactgggcgtgaggcagagcccgcggctgtggggcagctccagccctgcccacaggccaccctcgcccgcacaggcagcactgaggccgggaccctgctggcgcccgatccgccactgcagaagagaccctctgtggacacccacactctgcagggactggcccccaactcaccccgtgctggctggtggggtccatttccccgcagcgggccaggagggccgagggccacacgggtgccacagcccaggtcggagtggcccagccggcaggcttgttcttcagcatccgacgggaacatctccaacagaagcaaaacggaaagtgcctcccggacccccagagggccacccaacctcaccagtcaccagccccagaccacccacagcccctcccagacaccccgcctcatctggaaatagttccgtttgtttctctaaaaagacttgtaggtgggaaaaaaaatcttttgttctcatggaattggcctattggcaagatcgcatgtttttttaataaacgttgtattttagaata

SEQ ID NO: 1289 - DNA, 2516 bp, Homo sapiens
gccgtggagatgcatgagccctacacgttcctcaacggcctcaccgtggccgacatggaggacctgctggaggatatccaggtctacatggagctggagcagggcaagaacgccgacttctggcgggacatgaccaccatcaccgaggacgagatctccaagctccgcaagctggaggcctcgggcaaggggccagggcatcgagggcaaaatccgcgctggtggccccaacctggacatgggctactgggagagcctcctgcagcagcttcgtgcccacatggcacgggcccggtgagcactaggctgcgtgagcgccaccaggacgtgctgcggcagaagctgtacaaactgaagcaggagcagggcgtggagagcgagccgctgttccccatcctcaagcaggagccccagtcccccagccgcagcctggagcctgaggacgcggcgcccaccccgcccgggccctcctcggagggcggccccgcggaggccgaggtggacggcgcgaccccgacagagggcgacggcgacggggacggtgagggcgagggcgagggcgaggcggtgctcatggaggaggacctgatccagcagagcctggacgactacgacgccggcaggtacagcccgcggctgctcacggcgcacgagctgccactggacgcgcacgtgctggaaccggatgaggacctgcagcgcctgcagctctcgcgccagcagctccaggtcacgggagacgccagcgagagcgccgaggacatcttcttccggcgggccaaggagggcatgggccaggacgaggcgcagttcagcgtggagatgccactcaccggcaaggcctacctgtgggccgacaagtaccggccacgcaagccgcgcttcttcaaccgcgtgcacacgggcttcgagtggaacaagtacaaccagacgcactacgactttgacaacccaccgcccaagatcgtgcagggatacaagttcaacatcttctaccccgacctcatcgacaagcgctccacgcccgagtacttcctggaggcctgcgccgacaacaaggatttcgccatcctgcgcttccacgcggggccgccctacgaggacatcgctttcaagatcgtcaaccgcgagtgggaatactcgcaccgccacggcttccgctgccagtttgccaacggcatcttccagctgtggtttcacttcaagcgctaccgctatcggcggtgacggccctggggaacggcaggcaggtgtcctcgggggcacagtaaaggggcttcggtgaagctggtggtcactccggggccgctgtctgggctgcagggccgcgggttcacgtcccacctcaggccgcatctttctttcgccaggcctcagtttcctcctatataaaaggggggtcaccattgagcctgccatggtgagctgaggagacactgggacaggctggcctagggtcctgatgcaacggagggggcgctaggggcatctttcgagcacgagggtggccagcagccgccagctgacctcaccgtccaggcggacactctccaccgcccctcagccaggctgggtggggcccacagggcctgccccaagtggcggccacacagggtgttgtggagatgggccagaggggcctgggcttggcggtgccaggctcgtgagaagcaggaaactcaaggccagccctgccacatcacggggcacccactgggcgtgaggcagagcccgcggctgtggggcagctccagccctgcccacaggccaccctcgcccgcacaggcagcactgaggccgggaccctgctggcgcccgatccgccactgcagaagagaccctctgtggacacccacactctgcagggactggcccccaactcaccccgtgctggctggtggggtccatttccccgcagcgggtatggaggatgcgtcgaggtccctgtctctgtcaaggtcgtgggaaccaaaagtcactgagccgtcctccccccacctctgagcacagggcctggagggcaggggctccccgaaggctgggggttggagaagggtgaggggcttcccccagggatccccccacctggcctgctcacggggccttggagcatgagaccagtgaccccgagttttgcccatatcaggacagtggctccttctcactcccctttctcaggccaggagggccgagggccacacgggtgccacagcccaggtcggagtggcccagccggcaggcttgttcttcagcatccgacgggaacatctccaacagaagcaaaacggaaagtgcctcccggacccccagagggccacccaacctcaccagtcaccagccccagaccacccacagcccctcccagacaccccgcctcatctggaaatagttccgtttgtttctctaaaaagacttgtaggtgggaaaaaaaatcttttgttctcatggaattggcctattggcaagatcgcatgtttttttaataaacgttgtattttagaataatcttaggtttg

SEQ ID NO: 1290 - DNA, 2805 bp, Homo sapiens
gcaggcttcggctattggtgttggtgccgcggccactggcccagccgatgggtcgggacacacgctcgcgctcgcggtccgcgggtcgccggggccgaaggcggcagagtcagagcgggagccgaagtcggagcaggagccatgggcggcgaaaccgacggcgccgggaggacgagggacggcgcagacggaggcggcggagccgggagcgcaggtcagattcagaggaagagcggtggcagcgctcagggatgcgaagccggagccccccgcggcccaagtggcactcaagagatgggtcctctcagtcggactcaggagaggagcagtcacggggccagtgggctcgccggcgacggcgcgcacgctcgtggtctcctagctcctcagcatccagctccgcgtctccagggcgatcccagagcccccgggcggccgcggctgccctgagccagcagcagagcctgcaggagcggctgcggctgcgggaggagcggaagcagcaggaggagctgatgaaggccttcgagacgcccgaggagaagcgcgcacggcggctggccaagaaggaggccaaggagcgcaagaagcgggagaagatgggctggggtgaggagtacatgggctacaccaacaccgacaaccccttcggagacaacaacctgctgggcaccttcatctggaataaggccctggagaagaaggggatcagccacctggaggagaaggagctgaaggagcggaacaagaggatccaggaggacaaccggctggagctgcagaaggtgaagcagctgcggctggagcgggagcgggagaaggccatgcgcgagcaggagctggagatgctgcagcgcgagaaggaggcagagcacttcaagacatgggaggagcaggaggacaacttccacctccagcaggccaagctgcgttccaagatccgcatccgggacgggcgggccaagcccatcgacctgctggccaagtacatcagcgctgaggatgacgatctggccgtggagatgcatgagccctacacgttcctcaacggcctcaccgtggccgacatggaggacctgctggaggatatccaggtctacatggagctggagcagggcaagaacgccgacttctggcgggacatgaccaccatcaccgaggacgagatctccaagctccgcaagctggaggcctcgggcaaggggccaggtgagcgccgcgagggggtcaacgcctccgtcagctctgatgtgcagtcggtgttcaaggggaagacatacaaccagctgcaggtcatcttccagggcatcgagggcaaaatccgcgctggtggccccaacctggacatgggctactgggagagcctcctgcagcagcttcgtgcccacatggcgcgggcccggctgcgtgagcgccaccaggacgtgctgcggcagaagctgtacaaactgaagcaggagcagggcgtggagagcgagccgctgttccccatcctcaagcaggagccccagtcccccagccgcagcctggagcctgaggacgcggcgcccaccccgcccgggccctcctcggagggcggccccgcggaggccgaggtggacggcgcgaccccgacagagggcgacggcgacggggacggtgagggcgagggcgagggcgaggcggtgctcatggaggaggacctgatccagcagagcctggacgactacgacgccggcaggtacagcccgcggctgctcacggcgcacgagctgccactggacgcgcacgtgctggaaccggatgaggacctgcagcgcctgcagctctcgcgccagcagctccaggtcacgggagacgccagcgagagcgccgaggacatcttcttccggcgggccaaggagggcatgggccaggacgaggcgcagttcagcgtggagatgccactcaccggcaaggcctacctgtgggccgacaagtaccggccacgcaagccgcgcttcttcaaccgcgtgcacacgggcttcgagtggaacaagtacaaccagacgcactacgactttgacaacccaccgcccaagatcgtgcagggatacaagttcaacatcttctaccccgacctcatcgacaagcgctccacgcccgagtacttcctggaggcctgcgccgacaacaaggatttcgccatcctgcgcttccacgcggggccgccctacgaggacatcgctttcaagatcgtcaaccgcgagtgggaatactcgcaccgccacggcttccgctgccagtttgccaacggcatcttccagctgtggtttcacttcaagcgctaccgctatcggcggtgacggccctggggaacggcaggcagcactgaggccgggaccctgctggcgcccgatccgccactgcagaagagaccctctgtggacacccacactctgcagggactggcccccaactcaccccgtgctggctggtggggtccatttccccgcagcgggccaggagggccgagggccacacgggtgccacagcccaggtcggagtggcccagccggcaggcttgttcttcagcatccgacgggaacatctccaacagaagcaaaacggaaagtgcctcccggacccccagagggccacccaacctcaccagtcaccagccccagaccacccacagcccctcccagacaccccgcctcatctggaaatagttccgtttgtttctctaaaaagacttgtaggtgggaaaaaaaatcttttgttctcatggaattggcctattggcaagatcgcatgtttttttaataaacgttgtattttagaata

SEQ ID NO: 1291 - DNA, 2669 bp, Homo sapiens
gcaggcttcggctattggtgttggtgccgcggccactggcccagccgatgggtcgggacacacgctcgcgctcgcggtccgcgggtcgccggggccgaaggcggcagagtcagagcgggagccgaagtcggagcaggagccatgggcggcgaaaccgacggcgccgggaggacgagggacggcgcagacggaggcggcggagccgggagcgcaggtcagattcagaggaagagcggtggcagcgctcagggatgcgaagccggagccccccgcggcccaagtggcactcaagagatgggtcctctcagtcggactcaggagaggagcagtcacggggccagtgggctcgccggcgacggcgcgcacgctcgtggtctcctagctcctcagcatccagctccgcgtctccagggcgatcccagagcccccgggcggccgcggctgccctgagccagcagcagagcctgcaggagcggctgcggctgcgggaggagcggaagcagcaggaggagctgatgaaggccttcgagacgcccgaggagaagcgcgcacggcggctggccaagaaggaggccaaggagcgcaagaagcgggagaagatgggctggggtgaggagtacatgggctacaccaacaccgacaaccccttcggagacaacaacctgctgggcaccttcatctggaataaggccctggagaagaaggggatcagccacctggaggagaaggagctgaaggagcggaacaagaggatccaggaggacaaccggctggagctgcagaaggtgaagcagctgcggctggagcgggagcgggagaaggccatgcgcgagcaggagctggagatgctgcagcgcgagaaggaggcagagcacttcaagacatgggaggagcaggaggacaacttccacctccagcaggccaagctgcgttccaagatccgcatccgggacgggcgggccaagcccatcgacctgctggccaagtacatcagcgctgaggatgacgatctggccgtggagatgcatgagccctacacgttcctcaacggcctcaccgtggccgacatggaggacctgctggaggatatccaggtctacatggagctggagcagggcaagaacgccgacttctggcgggacatgaccaccatcaccgaggacgagatctccaagctccgcaagctggaggcctcgggcaaggggccaggtgagcgccgcgagggggtcaacgcctccgtcagctctgatgtgcagtcggtgttcaaggggaagacatacaaccagctgcaggtcatcttccagggcatcgagggcaaaatccgcgctggtggccccaacctggacatgggctactgggagagcctcctgcagcagcttcgtgcccacatggcgcgggcccggctgcgtgagcgccaccaggacgtgctgcggcagaagctgtacaaactgaagcaggagcagggcgtggagagcgagccgctgttccccatcctcaagcaggagccccagtcccccagccgcagcctggagcctgaggacgcggcgcccaccccgcccgggccctcctcggagggcggccccgcggaggccgaggtggacggcgcgaccccgacagagggcgacggcgacggggacggtgagggcgagggcgagggcgaggcggtgctcatggaggaggacctgatccagcagagcctggacgactacgacgccggcaggtacagcccgcggctgctcacggcgcacgagctgccactggacgcgcacgtgctggaaccggatgaggacctgcagcgcctgcagctctcgcgccagcagctccaggtcacgggagacgccagcgagagcgccgaggacatcttcttccggcgggccaaggagggcatgggccaggacgaggcgcagttcagcgtggagatgccactcaccggcaaggcctacctgtgggccgacaagtaccggccacgcaagccgcgcttcttcaaccgcgtgcacacgggcttcgagtggaacaagtacaaccagacgcactacgactttgacaacccaccgcccaagatcgtgcagggatacaagttcaacatcttctaccccgacctcatcgacaagcgctccacgcccgagtacttcctggaggcctgcgccgacaacaaggatttcgccatcctgcgcttccacgcggggccgccctacgaggacatcgctttcaagatcgtcaaccgcgagtgggaatactcgcaccgccacggcttccgctgccagtttgccaacggcatcttccagctgtggtttcacttcaagcgctaccgctatcggcggtgacggccctggggaacggcaggccaggagggccgagggccacacgggtgccacagcccaggtcggagtggcccagccggcaggcttgttcttcagcatccgacgggaacatctccaacagaagcaaaacggaaagtgcctcccggacccccagagggccacccaacctcaccagtcaccagccccagaccacccacagcccctcccagacaccccgcctcatctggaaatagttccgtttgtttctctaaaaagacttgtaggtgggaaaaaaaatcttttgttctcatggaattggcctattggcaagatcgcatgtttttttaataaacgttgtattttagaata

SEQ ID NO: 1292 - DNA, 3613 bp, Homo sapiens
gcaggcttcggctattggtgttggtgccgcggccactggcccagccgatgggtcgggacacacgctcgcgctcgcggtccgcgggtcgccggggccgaaggcggcagagtcagagcgggagccgaagtcggagcaggagccatgggcggcgaaaccgacggcgccgggaggacgagggacggcgcagacggaggcggcggagccgggagcgcaggtcagattcagaggaagagcggtggcagcgctcagggatgcgaagccggagccccccgcggcccaagtggcactcaagagatgggtcctctcagtcggactcaggagaggagcagtcacggggccagtgggctcgccggcgacggcgcgcacgctcgtggtctcctagctcctcagcatccagctccgcgtctccagggcgatcccagagcccccgggcggccgcggctgccctgagccagcagcagagcctgcaggagcggctgcggctgcgggaggagcggaagcagcaggaggagctgatgaaggccttcgagacgcccgaggagaagcgcgcacggcggctggccaagaaggaggccaaggagcgcaagaagcgggagaagatgggctggggtgaggagtacatgggctacaccaacaccgacaaccccttcggagacaacaacctgctgggcaccttcatctggaataaggccctggagaagaaggggatcagccacctggaggagaaggagctgaaggagcggaacaagaggatccaggaggacaaccggctggagctgcagaaggtgaagcagctgcggctggagcgggagcgggagaaggccatgcgcgagcaggagctggagatgctgcagcgcgagaaggaggcagagcacttcaagacatgggaggagcaggaggacaacttccacctccagcaggccaagctgcgttccaagatccgcatccgggacgggcgggccaagcccatcgacctgctggccaagtacatcagcgctgaggatgacgatctggccgtggagatgcatgagccctacacgttcctcaacggcctcaccgtggccgacatggaggacctgctggaggatatccaggtctacatggagctggagcagggcaagaacgccgacttctggcgggacatgaccaccatcaccgaggacgagatctccaagctccgcaagctggaggcctcgggcaaggggccaggtgagcgccgcgagggggtcaacgcctccgtcagctctgatgtgcagtcggtgttcaaggggaagacatacaaccagctgcaggtcatcttccagggcatcgagggcaaaatccgcgctggtggccccaacctggacatgggctactgggagagcctcctgcagcagcttcgtgcccacatggcgcgggcccggctgcgtgagcgccaccaggacgtgctgcggcagaagctgtacaaactgaagcaggagcagggcgtggagagcgagccgctgttccccatcctcaagcaggagccccagtcccccagccgcagcctggagcctgaggacgcggcgcccaccccgcccgggccctcctcggagggcggccccgcggaggccgaggtggacggcgcgaccccgacagagggcgacggcgacggggacggtgagggcgagggcgagggcgaggcggtgctcatggaggaggacctgatccagcagagcctggacgactacgacgccggcaggtacagcccgcggctgctcacggcgcacgagctgccactggacgcgcacgtgctggaaccggatgaggacctgcagcgcctgcagctctcgcgccagcagctccaggtcacgggagacgccagcgagagcgccgaggacatcttcttccggcgggccaaggagggcatgggccaggacgaggcgcagttcagcgtggagatgccactcaccggcaaggcctacctgtgggccgacaagtaccggccacgcaagccgcgcttcttcaaccgcgtgcacacgggcttcgagtggaacaagtacaaccagacgcactacgactttgacaacccaccgcccaagatcgtgcagggatacaagttcaacatcttctaccccgacctcatcgacaagcgctccacgcccgagtacttcctggaggcctgcgccgacaacaaggatttcgccatcctgcgcttccacgcggggccgccctacgaggacatcgctttcaagatcgtcaaccgcgagtgggaatactcgcaccgccacggcttccgctgccagtttgccaacggcatcttccagctgtggtttcacttcaagcgctaccgctatcggcggtgacggccctggggaacggcaggcaggtgtcctcgggggcacagtaaaggggcttcggtgaagctggtggtcactccggggccgctgtctgggctgcagggccgcgggttcacgtcccacctcaggccgcatctttctttcgccaggcctcagtttcctcctatataaaaggggggtcaccattgagcctgccatggtgagctgaggagacactgggacaggctggcctagggtcctgatgcaacggagggggcgctaggggcatctttcgagcacgagggtggccagcagccgccagctgacctcaccgtccaggcggacactctccaccgcccctcagccaggctgggtggggcccacagggcctgccccaagtggcggccacacagggtgttgtggagatgggccagaggggcctgggcttggcggtgccaggctcgtgagaagcaggaaactcaaggccagccctgccacatcacggggcacccactgggcgtgaggcagagcccgcggctgtggggcagctccagccctgcccacaggccaccctcgcccgcacaggcagcactgaggccgggaccctgctggcgcccgatccgccactgcagaagagaccctctgtggacacccacactctgcagggactggcccccaactcaccccgtgctggctggtggggtccatttccccgcagcgggtatggaggatgcgtcgaggtccctgtctctgtcaaggtcgtgggaaccaaaagtcactgagccgtcctccccccacctctgagcacagggcctggagggcaggggctccccgaaggctgggggttggagaagggtgaggggcttcccccagggatccccccacctggcctgctcacggggccttggagcatgagaccagtgaccccgagttttgcccatatcaggacagtggctccttctcactcccctttctcaggccaggagggccgagggccacacgggtgccacagcccaggtcggagtggcccagccggcaggcttgttcttcagcatccgacgggaacatctccaacagaagcaaaacggaaagtgcctcccggacccccagagggccacccaacctcaccagtcaccagccccagaccacccacagcccctcccagacaccccgcctcatctggaaatagttccgtttgtttctctaaaaagacttgtaggtgggaaaaaaaatcttttgttctcatggaattggcctattggcaagatcgcatgtttttttaataaacgttgtattttagaataatcttaggtttg

SEQ ID NO: 1293 - DNA, 3344 bp, Homo sapiens
gcaggcttcggctattggtgttggtgccgcggccactggcccagccgatgggtcgggacacacgctcgcgctcgcggtccgcgggtcgccggggccgaaggcggcagagtcagagcgggagccgaagtcggagcaggagccatgggcggcgaaaccgacggcgccgggaggacgagggacggcgcagacggaggcggcggagccgggagcgcaggtcagattcagaggaagagcggtggcagcgctcagggatgcgaagccggagccccccgcggcccaagtggcactcaagagatgggtcctctcagtcggactcaggagaggagcagtcacggggccagtgggctcgccggcgacggcgcgcacgctcgtggtctcctagctcctcagcatccagctccgcgtctccagggcgatcccagagcccccgggcggccgcggctgccctgagccagcagcagagcctgcaggagcggctgcggctgcgggaggagcggaagcagcaggaggagctgatgaaggccttcgagacgcccgaggagaagcgcgcacggcggctggccaagaaggaggccaaggagcgcaagaagcgggagaagatgggctggggtgaggagtacatgggctacaccaacaccgacaaccccttcggagacaacaacctgctgggcaccttcatctggaataaggccctggagaagaaggggatcagccacctggaggagaaggagctgaaggagcggaacaagaggatccaggaggacaaccggctggagctgcagaaggtgaagcagctgcggctggagcgggagcgggagaaggccatgcgcgagcaggagctggagatgctgcagcgcgagaaggaggcagagcacttcaagacatgggaggagcaggaggacaacttccacctccagcaggccaagctgcgttccaagatccgcatccgggacgggcgggccaagcccatcgacctgctggccaagtacatcagcgctgaggatgacgatctggccgtggagatgcatgagccctacacgttcctcaacggcctcaccgtggccgacatggaggacctgctggaggatatccaggtctacatggagctggagcagggcaagaacgccgacttctggcgggacatgaccaccatcaccgaggacgagatctccaagctccgcaagctggaggcctcgggcaaggggccaggtgagcgccgcgagggggtcaacgcctccgtcagctctgatgtgcagtcggtgttcaaggggaagacatacaaccagctgcaggtcatcttccagggcatcgagggcaaaatccgcgctggtggccccaacctggacatgggctactgggagagcctcctgcagcagcttcgtgcccacatggcgcgggcccggctgcgtgagcgccaccaggacgtgctgcggcagaagctgtacaaactgaagcaggagcagggcgtggagagcgagccgctgttccccatcctcaagcaggagccccagtcccccagccgcagcctggagcctgaggacgcggcgcccaccccgcccgggccctcctcggagggcggccccgcggaggccgaggtggacggcgcgaccccgacagagggcgacggcgacggggacggtgagggcgagggcgagggcgaggcggtgctcatggaggaggacctgatccagcagagcctggacgactacgacgccggcaggtacagcccgcggctgctcacggcgcacgagctgccactggacgcgcacgtgctggaaccggatgaggacctgcagcgcctgcagctctcgcgccagcagctccaggtcacgggagacgccagcgagagcgccgaggacatcttcttccggcgggccaaggagggcatgggccaggacgaggcgcagttcagcgtggagatgccactcaccggcaaggcctacctgtgggccgacaagtaccggccacgcaagccgcgcttcttcaaccgcgtgcacacgggcttcgagtggaacaagtacaaccagacgcactacgactttgacaacccaccgcccaagatcgtgcagggatacaagttcaacatcttctaccccgacctcatcgacaagcgctccacgcccgagtacttcctggaggcctgcgccgacaacaaggatttcgccatcctgcgcttccacgcggggccgccctacgaggacatcgctttcaagatcgtcaaccgcgagtgggaatactcgcaccgccacggcttccgctgccagtttgccaacggcatcttccagctgtggtttcacttcaagcgctaccgctatcggcggtgacggccctggggaacggcaggcaggtgtcctcgggggcacagtaaaggggcttcggtgaagctggtggtcactccggggccgctgtctgggctgcagggccgcgggttcacgtcccacctcaggccgcatctttctttcgccaggcctcagtttcctcctatataaaaggggggtcaccattgagcctgccatggtgagctgaggagacactgggacaggctggcctagggtcctgatgcaacggagggggcgctaggggcatctttcgagcacgagggtggccagcagccgccagctgacctcaccgtccaggcggacactctccaccgcccctcagccaggctgggtggggcccacagggcctgccccaagtggcggccacacagggtgttgtggagatgggccagaggggcctgggcttggcggtgccaggctcgtgagaagcaggaaactcaaggccagccctgccacatcacggggcacccactgggcgtgaggcagagcccgcggctgtggggcagctccagccctgcccacaggccaccctcgcccgcacaggcagcactgaggccgggaccctgctggcgcccgatccgccactgcagaagagaccctctgtggacacccacactctgcagggactggcccccaactcaccccgtgctggctggtggggtccatttccccgcagcgggccaggagggccgagggccacacgggtgccacagcccaggtcggagtggcccagccggcaggcttgttcttcagcatccgacgggaacatctccaacagaagcaaaacggaaagtgcctcccggacccccagagggccacccaacctcaccagtcaccagccccagaccacccacagcccctcccagacaccccgcctcatctggaaatagttccgtttgtttctctaaaaagacttgtaggtgggaaaaaaaatcttttgttctcatggaattggcctattggcaagatcgcatgtttttttaataaacgttgtattttagaata

SEQ ID NO: 1294 - DNA, 2516 bp, Homo sapiens
gccgtggagatgcatgagccctacacgttcctcaacggcctcaccgtggccgacatggaggacctgctggaggatatccaggtctacatggagctggagcagggcaagaacgccgacttctggcgggacatgaccaccatcaccgaggacgagatctccaagctccgcaagctggaggcctcgggcaaggggccagggcatcgagggcaaaatccgcgctggtggccccaacctggacatgggctactgggagagcctcctgcagcagcttcgtgcccacatggcgcgggcccggtgagcactaggctgcgtgagcgccaccaggacgtgctgcggcagaagctgtacaaactgaagcaggagcagggcgtggagagcgagccgctgttccccatcctcaagcaggagccccagtcccccagccgcagcctggagcctgaggacgcggcgcccaccccgcccgggccctcctcggagggcggccccgcggaggccgaggtggacggcgcgaccccgacagagggcgacggcgacggggacggtgagggcgagggcgagggcgaggcggtgctcatggaggaggacctgatccagcagagcctggacgactacgacgccggcaggtacagcccgcggctgctcacggcgcacgagctgccactggacgcgcacgtgctggaaccggatgaggacctgcagcgcctgcagctctcgcgccagcagctccaggtcacgggagacgccagcgagagcgccgaggacatcttcttccggcgggccaaggagggcatgggccaggacgaggcgcagttcagcgtggagatgccactcaccggcaaggcctacctgtgggccgacaagtaccggccacgcaagccgcgcttcttcaaccgcgtgcacacgggcttcgagtggaacaagtacaaccagacgcactacgactttgacaacccaccgcccaagatcgtgcagggatacaagttcaacatcttctaccccgacctcatcgacaagcgctccacgcccgagtacttcctggaggcctgcgccgacaacaaggatttcgccatcctgcgcttccacgcggggccgccctacgaggacatcgctttcaagatcgtcaaccgcgagtgggaatactcgcaccgccacggcttccgctgccagtttgccaacggcatcttccagctgtggtttcacttcaagcgctaccgctatcggcggtgacggccctggggaacggcaggcaggtgtcctcgggggcacagtaaaggggcttcggtgaagctggtggtcactccggggccgctgtctgggctgcagggccgcgggttcacgtcccacctcaggccgcatctttctttcgccaggcctcagtttcctcctatataaaaggggggtcaccattgagcctgccatggtgagctgaggagacactgggacaggctggcctagggtcctgatgcaacggagggggcgctaggggcatctttcgagcacgagggtggccagcagccgccagctgacctcaccgtccaggcggacactctccaccgcccctcagccaggctgggtggggcccacagggcctgccccaagtggcggccacacagggtgttgtggagatgggccagaggggcctgggcttggcggtgccaggctcgtgagaagcaggaaactcaaggccagccctgccacatcacggggcacccactgggcgtgaggcagagcccgcggctgtggggcagctccagccctgcccacaggccaccctcgcccgcacaggcagcactgaggccgggaccctgctggcgcccgatccgccactgcagaagagaccctctgtggacacccacactctgcagggactggcccccaactcaccccgtgctggctggtggggtccatttccccgcagcgggtatggaggatgcgtcgaggtccctgtctctgtcaaggtcgtgggaaccaaaagtcactgagccgtcctccccccacctctgagcacagggcctggagggcaggggctccccgaaggctgggggttggagaagggtgaggggcttcccccagggatccccccacctggcctgctcacggggccttggagcatgagaccagtgaccccgagttttgcccatatcaggacagtggctccttctcactcccctttctcaggccaggagggccgagggccacacgggtgccacagcccaggtcggagtggcccagccggcaggcttgttcttcagcatccgacgggaacatctccaacagaagcaaaacggaaagtgcctcccggacccccagagggccacccaacctcaccagtcaccagccccagaccacccacagcccctcccagacaccccgcctcatctggaaatagttccgtttgtttctctaaaaagacttgtaggtgggaaaaaaaatcttttgttctcatggaattggcctattggcaagatcgcatgtttttttaataaacgttgtattttagaataatcttaggtttg

SEQ ID NO: 1295 - DNA, 1694 bp, Homo sapiens
attgctctaaaaggcctctgtgccctgactgatcctccctccctgtcaactcctaatctttttattgtctccatagttttgccttttccagaatgttgtaatcatacagtatgtagtctttttgaattggcttctttcacttagcaatgtgcatttaagtttcctaagctgttgatcatgagactgagtccctttttatacttcaacagacatgagaacggcctcaaggaagactaaccatctgcaatactagaagccatggctgagggatcagtgatgttcagtgatgtgtccatagacttctctcaggaggagtgggactgcctggaccctgttcagagggacttatacagagatgtgatgttggagaactacggcaatctggtttcaatgggactttacactcctaagcctcaagtgatctccttattggaacaagggaaagagccctggatggttggcagagagcttacaagaggcctgtgttcagatctggaatcgatgtgtgaaaccaagttattatctctaaagaaggaagtttatgaaatagaattatgccagagggagataatgggacttacaaagcatggccttgagtactccagttttggagatgttttggaatatagaagccaccttgcaaaacaactgggatatccaaatgggcattttagtcaagaaatattcactcctgaatacatgcccacatttattcaacagacattccttactctccatcaaataattaataatgaagacagaccctatgaatgtaagaaatgtggaaaggcctttagtcagaactcacaatttattcaacatcagagaattcatattggtgaaaaatcttatgaatgtaaagagtgtgggaaattctttagttgtggttcacatgttactcggcatctgaaaattcatactggcgaaaaaccctttgaatgtaaggaatgtggaaaggccttcagttgtagctcatacctttctcaacatcagagaatccataccggtaagaaaccctatgaatgtaaggaatgtgggaaggcctttagttattgctcaaatcttattgaccatcagcgaattcacactggtgaaaaaccttatgaatgtaaagtatgtgggaaagcctttactaagagctcacaactttttcagcatgcacgaattcatacaggtgagaaaccctatgaatgtaaggaatgtggcaaagcctttacccagagctcaaagcttgttcaacatcagagaattcatactggtgagaaaccctatgagtgcaaggaatgtggcaaagcctttagtagtggctcagcacttactaatcatcagagaattcacactggtgagaaaccctatgattgtaaggaatgtggaaaggcttttactcagagctcacagcttcgtcaacatcagagaattcacgctggtgagaaaccctttgaatgtcttgaatgtgggaaggcctttactcagaactcacaacttttccagcatcagagaattcatacagatgaaaaaccatatgaatgtaatgaatgtggaaaggcctttaataaatgctcaaaccttactcgacatctgagaattcacactggtgaaaagccctataactgtaaggaatgtgggaaggcttttagtagtggctcggatctcattcgtcatcagggaattcatactaataaataataaaaatt

SEQ ID NO: 1296 - DNA, 2148 bp, Homo sapiens
ccatgaatggaagcggcggcggcggcgggagcggcctgagctgggcgccggggccagggccgggggctgcccagggcccgcgccgctgcatgggggcggcccgcgggccctgagaggaagggcagacaggcgggccgagataggaggggcggggtcgggcggccgcaggccggaggcgcgtcgggctggagccggtcacgatgccccgaaggaagcaaagccacccgcagcccgtgaaatgcgagggggtcaaagtggatactgaagactccctcgacgaaggacccggggccctggtattggagagtgatttgctactaggccaggatctggagtttgaggaggaagaggaagaggaggaaggcgacggcaacagtgaccagctcatgggcttcgagagagactcggaaggagactctctgggggccaggcctgggcttccctatgggctgagcgacgatgagtctgggggcggccgggcactaagtgcggagagtgaagttgaggagccagccaggggtccaggggaggccaggggtgagaggccaggcccagcctgccagctgtgtggggggccgacaggtgaggggccgtgttgtggggcaggagggccgggtggggggcccctgctgcccccacggctactgtactcatgccgcctctgcaccttcgtgtcccactactcgagccacctgaagcggcacatgcagacacacagcggagagaagccgttccgctgtggccgctgcccctacgcctcagcccagctcgtcaacctgacacgacatacccgcacccacactggcgagaagccctaccgctgtccccactgcccctttgcctgcagcagcctgggcaacctgaggcggcatcagcgtacccacgcagggccccccactcctccctgcccgacctgtggcttccgctgctgtactccacgaccagcccggcctcccagtcccacagagcaggagggggcggtgccccggcgacctgaagatgctctgctccttccagatttgagcctccatgtgccaccaggtggtgccagtttcctgccagactgtgggcagctgcggggtgaaggggagggcctctgcgggactggatcagaaccactgccagagctgctattcccttggacctgccggggctgtggacaagagctggaggagggtgagggtagtcggctgggagctgccatgtgtgggcgctgcatgcgaggagaggctggagggggtgccagtggggggccccagggccccagtgacaaaggctttgcctgtagcctctgcccctttgccactcactatcccaaccacctggcccggcacatgaagacacacagtggtgagaagcccttccgctgcgcccgctgtccttatgcctctgctcatctggataacctgaaacggcaccagcgcgtccatacaggagagaagccctacaagtgccccctctgcccttatgcctgtggcaatctggccaacctcaagcgtcatggtcgcatccactctggtgacaaaccttttcggtgtagcctttgcaactacagctgcaaccagagcatgaacctcaaacgtcacatgctgcggcacacaggcgagaagcccttccgctgtgccacctgcgcctataccacgggccactgggacaactacaagcgccaccagaaggtgcatggccacggtggggcaggagggcctggtctctctgcctctgagggctgggccccacctcatagcccaccctctgttttgagctctcggggcccaccagccctggggactgctggcagccgggctgtccacacagactcatcctgaactaggtccttcttccccatgttttatacagacggaccagaagccacctttttctcccccgctggccaggggctccacacagactaacgtaggcactataaggaccagcccaaccccatgggcgggggggcccatatggaccaggggaccttgccttgactgaggcacttcacgagctcagtgagaagggccctgtattcacctccactgcccccaggggctgtggacaaaccggctgggggactgcccagcctcccacctgtttatttaacttatttcagtgctttataataaaggaaacactaacaaaaaaaaaaaaaaa

SEQ ID NO: 1297 - DNA, 4445 bp, Homo sapiens
cgctccccgctcccgtggctgccgccgccccggggaagaagagacaggggtggggtttgggggaagcgagagaggaggggagagaccctggccaggctggagcctggattcgaggggaggagggacgggaggaggagaaaggtggaggagaagggaggggggagcggggaggagcggccgggcctggggccttgaggcccggggagagccggggagccgggcccgcgcgccgagatgttgctgctgctgttactggcgccactcttcctccgccccccgggcgcgggcggggcgcagacccccaacgccacctcagaaggttgccagatcatacacccgccctgggaagggggcatcaggtaccggggcctgactcgggaccaggtgaaggctatcaacttcctgccagtggactatgagattgagtatgtgtgccggggggagcgcgaggtggtggggcccaaggtccgcaagtgcctggccaacggctcctggacagatatggacacacccagccgctgtgtccgaatctgctccaagtcttatttgaccctggaaaatgggaaggttttcctgacgggtggggacctcccagctctggacggagcccgggtggatttccggtgtgaccccgacttccatctggtgggcagctcccggagcatctgtagtcagggccagtggagcacccccaagccccactgccaggtgaatcgaacgccacactcagaacggcgcgcagtgtacatcggggcactgtttcccatgagcgggggctggccagggggccaggcctgccagcccgcggtggagatggcgctggaggacgtgaatagccgcagggacatcctgccggactatgagctcaagctcatccaccacgacagcaagtgtgatccaggccaagccaccaagtacctatatgagctgctctacaacgaccctatcaagatcatccttatgcctggctgcagctctgtctccacgctggtggctgaggctgctaggatgtggaacctcattgtgctttcctatggctccagctcaccagccctgtcaaaccggcagcgtttccccactttcttccgaacgcacccatcagccacactccacaaccctacccgcgtgaaactctttgaaaagtggggctggaagaagattgctaccatccagcagaccactgaggtcttcacttcgactctggacgacctggaggaacgagtgaaggaggctggaattgagattactttccgccagagtttcttctcagatccagctgtgcccgtcaaaaacctgaagcgccaggatgcccgaatcatcgtgggacttttctatgagactgaagcccggaaagttttttgtgaggtgtacaaggagcgtctctttgggaagaagtacgtctggttcctcattgggtggtatgctgacaattggttcaagatctacgacccttctatcaactgcacagtggatgagatgactgaggcggtggagggccacatcacaactgagattgtcatgctgaatcctgccaatacccgcagcatttccaacatgacatcccaggaatttgtggagaaactaaccaagcgactgaaaagacaccctgaggagacaggaggcttccaggaggcaccgctggcctatgatgccatctgggccttggcactggccctgaacaagacatctggaggaggcggccgttctggtgtgcgcctggaggacttcaactacaacaaccagaccattaccgaccaaatctaccgggcaatgaactcttcgtcctttgagggtgtctctggccatgtggtgtttgatgccagcggctctcggatggcatggacgcttatcgagcagcttcagggtggcagctacaagaagattggctactatgacagcaccaaggatgatctttcctggtccaaaacagataaatggattggagggtcccccccagctgaccagaccctggtcatcaagacattccgcttcctgtcacagaaactctttatctccgtctcagttctctccagcctgggcattgtcctagctgttgtctgtctgtcctttaacatctacaactcacatgtccgttatatccagaactcacagcccaacctgaacaacctgactgctgtgggctgctcactggctttagctgctgtcttccccctggggctcgatggttaccacattgggaggaaccagtttcctttcgtctgccaggcccgcctctggctcctgggcctgggctttagtctgggctacggttccatgttcaccaagatttggtgggtccacacggtcttcacaaagaaggaagaaaagaaggagtggaggaagactctggaaccctggaagctgtatgccacagtgggcctgctggtgggcatggatgtcctcactctcgccatctggcagatcgtggaccctctgcaccggaccattgagacatttgccaaggaggaacctaaggaagatattgacgtctctattctgccccagctggagcattgcagctccaggaagatgaatacatggcttggcattttctatggttacaaggggctgctgctgctgctgggaatcttccttgcttatgagaccaagagtgtgtccactgagaagatcaatgatcaccgggctgtgggcatggctatctacaatgtggcagtcctgtgcctcatcactgctcctgtcaccatgattctgtccagccagcaggatgcagcctttgcctttgcctctcttgccatagttttctcctcctatatcactcttgttgtgctctttgtgcccaagatgcgcaggctgatcacccgaggggaatggcagtcggaggcgcaggacaccatgaagacagggtcatcgaccaacaacaacgaggaggagaagtcccggctgttggagaaggagaaccgtgaactggaaaagatcattgctgagaaagaggagcgtgtctctgaactgcgccatcaactccagtctcggcagcagctccgctcccggcgccacccaccgacacccccagaaccctctgggggcctgcccaggggaccccctgagccccccgaccggcttagctgtgatgggagtcgagtgcatttgctttataagtgagggtagggtgagggaggacaggccagtagggggagggaaagggagaggggaagggcaggggactcaggaagcagggggtccccatccccagctgggaagaacatgctatccaatctcatctcttgtaaatacatgtccccctgtgagttctgggctgatttgggtctctcatacctctgggaaacagacctttttctctcttactgcttcatgtaattttgtatcacctcttcacaatttagttcgtacctggcttgaagctgctcactgctcacacgctgcctcctcagcagcctcactgcatctttctcttcccatgcaacaccctcttctagttaccacggcaacccctgcagctcctctgcctttgtgctctgttcctgtccagcaggggtctcccaacaagtgctctttccaccccaaaggggcctctccttttctccactgtcataatctctttccatcttacttgcccttctatactttctcacatgtggctccccctgaattttgcttcctttgggagctcattcttttcgccaaggctcacatgctccttgcctctgctctgtgcactcacgctcagcacacatgcatcctcccctctcctgcgtgtgcccactgaacatgctcatgtgtacacacgcttttcccgtatgctttcttcatgttcagtcacatgtgctctcgggtgccctgcattcacagctacgtgtgcccctctcatggtcatgggtctgcccttgagcgtgtttgggtaggcatgtgcaatttgtctagcatgctgagtcatgtctttcctatttgcacacgtccatgtttatccatgtactttccctgtgtaccctccatgtaccttgtgtactttcttcccttaaatcatggtattcttctgacagagccatatgtaccctaccctgcacattgttatgcacttttccccaattcatgtttggtggggccatccacaccctctccttgtcacagaatctccatttctgctcagattccccccatctccattgcattcatgtactaccctcagtctacactcacaatcatcttctcccaagactgctcccttttgttttgtgtttttttgaggggaattaaggaaaaataagtgggggcaggtttggagagctgcttccagtggatagttgatgagaatcctgaccaaaggaaggcacccttgactgttgggatagacagatggacctatggggtgggaggtggtgtccctttcacactgtggtgtctcttggggaaggatctccccgaatctcaataaaccagtgaacagtgtgactcggcaaaaaaaaaaa

SEQ ID NO: 1298 - DNA, 4039 bp, Homo sapiens
agagccgcgggggccgtaggaagccaaccttccctgcttctccggggccctcgccccctcctccccacaaaatcagggatggaggcgcctccccggcaccctcttagcagccctccccaggaaaagtgtcccccctgagctcctaacgctccccaacagctacccctgccccccacgccatggggcccggggccccttttgcccgggtggggtggccactgccgcttctggttgtgatggcggcaggggtggctccggtgtgggcctcccactccccccatctcccgcggcctcactcgcgggtccccccgcacccctcctcagaacggcgcgcagtgtacatcggggcactgtttcccatgagcgggggctggccagggggccaggcctgccagcccgcggtggagatggcgctggaggacgtgaatagccgcagggacatcctgccggactatgagctcaagctcatccaccacgacagcaagtgtgatccaggccaagccaccaagtacctatatgagctgctctacaacgaccctatcaagatcatccttatgcctggctgcagctctgtctccacgctggtggctgaggctgctaggatgtggaacctcattgtgctttcctatggctccagctcaccagccctgtcaaaccggcagcgtttccccactttcttccgaacgcacccatcagccacactccacaaccctacccgcgtgaaactctttgaaaagtggggctggaagaagattgctaccatccagcagaccactgaggtcttcacttcgactctggacgacctggaggaacgagtgaaggaggctggaattgagattactttccgccagagtttcttctcagatccagctgtgcccgtcaaaaacctgaagcgccaggatgcccgaatcatcgtgggacttttctatgagactgaagcccggaaagttttttgtgaggtgtacaaggagcgtctctttgggaagaagtacgtctggttcctcattgggtggtatgctgacaattggttcaagatctacgacccttctatcaactgcacagtggatgagatgactgaggcggtggagggccacatcacaactgagattgtcatgctgaatcctgccaatacccgcagcatttccaacatgacatcccaggaatttgtggagaaactaaccaagcgactgaaaagacaccctgaggagacaggaggcttccaggaggcaccgctggcctatgatgccatctgggccttggcactggccctgaacaagacatctggaggaggcggccgttctggtgtgcgcctggaggacttcaactacaacaaccagaccattaccgaccaaatctaccgggcaatgaactcttcgtcctttgagggtgtctctggccatgtggtgtttgatgccagcggctctcggatggcatggacgcttatcgagcagcttcagggtggcagctacaagaagattggctactatgacagcaccaaggatgatctttcctggtccaaaacagataaatggattggagggtcccccccagctgaccagaccctggtcatcaagacattccgcttcctgtcacagaaactctttatctccgtctcagttctctccagcctgggcattgtcctagctgttgtctgtctgtcctttaacatctacaactcacatgtccgttatatccagaactcacagcccaacctgaacaacctgactgctgtgggctgctcactggctttagctgctgtcttccccctggggctcgatggttaccacattgggaggaaccagtttcctttcgtctgccaggcccgcctctggctcctgggcctgggctttagtctgggctacggttccatgttcaccaagatttggtgggtccacacggtcttcacaaagaaggaagaaaagaaggagtggaggaagactctggaaccctggaagctgtatgccacagtgggcctgctggtgggcatggatgtcctcactctcgccatctggcagatcgtggaccctctgcaccggaccattgagacatttgccaaggaggaacctaaggaagatattgacgtctctattctgccccagctggagcattgcagctccaggaagatgaatacatggcttggcattttctatggttacaaggggctgctgctgctgctgggaatcttccttgcttatgagaccaagagtgtgtccactgagaagatcaatgatcaccgggctgtgggcatggctatctacaatgtggcagtcctgtgcctcatcactgctcctgtcaccatgattctgtccagccagcaggatgcagcctttgcctttgcctctcttgccatagttttctcctcctatatcactcttgttgtgctctttgtgcccaagatgcgcaggctgatcacccgaggggaatggcagtcggaggcgcaggacaccatgaagacagggtcatcgaccaacaacaacgaggaggagaagtcccggctgttggagaaggagaaccgtgaactggaaaagatcattgctgagaaagaggagcgtgtctctgaactgcgccatcaactccagtctcggcagcagctccgctcccggcgccacccaccgacacccccagaaccctctgggggcctgcccaggggaccccctgagccccccgaccggcttagctgtgatgggagtcgagtgcatttgctttataagtgagggtagggtgagggaggacaggccagtagggggagggaaagggagaggggaagggcaggggactcaggaagcagggggtccccatccccagctgggaagaacatgctatccaatctcatctcttgtaaatacatgtccccctgtgagttctgggctgatttgggtctctcatacctctgggaaacagacctttttctctcttactgcttcatgtaattttgtatcacctcttcacaatttagttcgtacctggcttgaagctgctcactgctcacacgctgcctcctcagcagcctcactgcatctttctcttcccatgcaacaccctcttctagttaccacggcaacccctgcagctcctctgcctttgtgctctgttcctgtccagcaggggtctcccaacaagtgctctttccaccccaaaggggcctctccttttctccactgtcataatctctttccatcttacttgcccttctatactttctcacatgtggctccccctgaattttgcttcctttgggagctcattcttttcgccaaggctcacatgctccttgcctctgctctgtgcactcacgctcagcacacatgcatcctcccctctcctgcgtgtgcccactgaacatgctcatgtgtacacacgcttttcccgtatgctttcttcatgttcagtcacatgtgctctcgggtgccctgcattcacagctacgtgtgcccctctcatggtcatgggtctgcccttgagcgtgtttgggtaggcatgtgcaatttgtctagcatgctgagtcatgtctttcctatttgcacacgtccatgtttatccatgtactttccctgtgtaccctccatgtaccttgtgtactttcttcccttaaatcatggtattcttctgacagagccatatgtaccctaccctgcacattgttatgcacttttccccaattcatgtttggtggggccatccacaccctctccttgtcacagaatctccatttctgctcagattccccccatctccattgcattcatgtactaccctcagtctacactcacaatcatcttctcccaagactgctcccttttgttttgtgtttttttgaggggaattaaggaaaaataagtgggggcaggtttggagagctgcttccagtggatagttgatgagaatcctgaccaaaggaaggcacccttgactgttgggatagacagatggacctatggggtgggaggtggtgtccctttcacactgtggtgtctcttggggaaggatctccccgaatctcaataaaccagtgaacagtgtgactcggcaaaaaaaaaaa

SEQ ID NO: 1299 - DNA, 4260 bp, Homo sapiens
cgctccccgctcccgtggctgccgccgccccggggaagaagagacaggggtggggtttgggggaagcgagagaggaggggagagaccctggccaggctggagcctggattcgaggggaggagggacgggaggaggagaaaggtggaggagaagggaggggggagcggggaggagcggccgggcctggggccttgaggcccggggagagccggggagccgggcccgcgcgccgagatgttgctgctgctgctactggcgccactcttcctccgccccccgggcgcgggcggggcgcatacccccaacgccacctcagaaggttgccagatcatacacccgccctgggaagggggcatcaggtaccggggcctgactcgggaccaggtgaaggctatcaacttcctgccagtggactatgagattgagtatgtgtgccggggggagcgcgaggtggtggggcccaaggtccgcaagtgcctggccaacggctcctggacagatatggacacacccagccgctgtgtgaatcgaacgccacactcagaacggcgcgcagtgtacatcggggcactgtttcccatgagcgggggctggccagggggccaggcctgccagcccgcggtggagatggcgctggaggacgtgaatagccgcagggacatcctgccggactatgagctcaagctcatccaccacgacagcaagtgtgatccaggccaagccaccaagtacctatatgagctgctctacaacgaccctatcaagatcatccttatgcctggctgcagctctgtctccacgctggtggctgaggctgctaggatgtggaacctcattgtgctttcctatggctccagctcaccagccctgtcaaaccggcagcgtttccccactttcttccgaacgcacccatcagccacactccacaaccctacccgcgtgaaactctttgaaaagtggggctggaagaagattgctaccatccagcagaccactgaggtcttcacttcgactctggacgacctggaggaacgagtgaaggaggctggaattgagattactttccgccagagtttcttctcagatccagctgtgcccgtcaaaaacctgaagcgccaggatgcccgaatcatcgtgggacttttctatgagactgaagcccggaaagttttttgtgaggtgtacaaggagcgtctctttgggaagaagtacgtctggttcctcattgggtggtatgctgacaattggttcaagatctacgacccttctatcaactgcacagtggatgagatgactgaggcggtggagggccacatcacaactgagattgtcatgctgaatcctgccaatacccgcagcatttccaacatgacatcccaggaatttgtggagaaactaaccaagcgactgaaaagacaccctgaggagacaggaggcttccaggaggcaccgctggcctatgatgccatctgggccttggcactggccctgaacaagacatctggaggaggcggccgttctggtgtgcgcctggaggacttcaactacaacaaccagaccattaccgaccaaatctaccgggcaatgaactcttcgtcctttgagggtgtctctggccatgtggtgtttgatgccagcggctctcggatggcatggacgcttatcgagcagcttcagggtggcagctacaagaagattggctactatgacagcaccaaggatgatctttcctggtccaaaacagataaatggattggagggtcccccccagctgaccagaccctggtcatcaagacattccgcttcctgtcacagaaactctttatctccgtctcagttctctccagcctgggcattgtcctagctgttgtctgtctgtcctttaacatctacaactcacatgtccgttatatccagaactcacagcccaacctgaacaacctgactgctgtgggctgctcactggctttagctgctgtcttccccctggggctcgatggttaccacattgggaggaaccagtttcctttcgtctgccaggcccgcctctggctcctgggcctgggctttagtctgggctacggttccatgttcaccaagatttggtgggtccacacggtcttcacaaagaaggaagaaaagaaggagtggaggaagactctggaaccctggaagctgtatgccacagtgggcctgctggtgggcatggatgtcctcactctcgccatctggcagatcgtggaccctctgcaccggaccattgagacatttgccaaggaggaacctaaggaagatattgacgtctctattctgccccagctggagcattgcagctccaggaagatgaatacatggcttggcattttctatggttacaaggggctgctgctgctgctgggaatcttccttgcttatgagaccaagagtgtgtccactgagaagatcaatgatcaccgggctgtgggcatggctatctacaatgtggcagtcctgtgcctcatcactgctcctgtcaccatgattctgtccagccagcaggatgcagcctttgcctttgcctctcttgccatagttttctcctcctatatcactcttgttgtgctctttgtgcccaagatgcgcaggctgatcacccgaggggaatggcagtcggaggcgcaggacaccatgaagacagggtcatcgaccaacaacaacgaggaggagaagtcccggctgttggagaaggagaaccgtgaactggaaaagatcattgctgagaaagaggagcgtgtctctgaactgcgccatcaactccagtctcggcagcagctccgctcccggcgccacccaccgacacccccagaaccctctgggggcctgcccaggggaccccctgagccccccgaccggcttagctgtgatgggagtcgagtgcatttgctttataagtgagggtagggtgagggaggacaggccagtagggggagggaaagggagaggggaagggcaggggactcaggaagcagggggtccccatccccagctgggaagaacatgctatccaatctcatctcttgtaaatacatgtccccctgtgagttctgggctgatttgggtctctcatacctctgggaaacagacctttttctctcttactgcttcatgtaattttgtatcacctcttcacaatttagttcgtacctggcttgaagctgctcactgctcacacgctgcctcctcagcagcctcactgcatctttctcttcccatgcaacaccctcttctagttaccacggcaacccctgcagctcctctgcctttgtgctctgttcctgtccagcaggggtctcccaacaagtgctctttccaccccaaaggggcctctccttttctccactgtcataatctctttccatcttacttgcccttctatactttctcacatgtggctccccctgaattttgcttcctttgggagctcattcttttcgccaaggctcacatgctccttgcctctgctctgtgcactcacgctcagcacacatgcatcctcccctctcctgcgtgtgcccactgaacatgctcatgtgtacacacgcttttcccgtatgctttcttcatgttcagtcacatgtgctctcgggtgccctgcattcacagctacgtgtgcccctctcatggtcatgggtctgcccttgagcgtgtttgggtaggcatgtgcaatttgtctagcatgctgagtcatgtctttcctatttgcacacgtccatgtttatccatgtactttccctgtgtaccctccatgtaccttgtgtactttcttcccttaaatcatggtattcttctgacagagccatatgtaccctaccctgcacattgttatgcacttttccccaattcatgtttggtggggccatccacaccctctccttgtcacagaatctccatttctgctcagattccccccatctccattgcattcatgtactaccctcagtctacactcacaatcatcttctcccaagactgctcccttttgttttgtgtttttttgaggggaattaaggaaaaataagtgggggcaggtttggagagctgcttccagtggatagttgatgagaatcctgaccaaaggaaggcacccttgactgttgggatagacagatggacctatggggtgggaggtggtgtccctttcacactgtggtgtctcttggggaaggatctccccgaatctcaataaaccagtgaacagtgtgactcggcaaaaaaaaaaaa

SEQ ID NO: 1300 - DNA, 4294 bp, Homo sapiens
cgctccccgctcccgtggctgccgccgccccggggaagaagagacaggggtggggtttgggggaagcgagagaggaggggagagaccctggccaggctggagcctggattcgaggggaggagggacgggaggaggagaaaggtggaggagaagggaggggggagcggggaggagcggccgggcctggggccttgaggcccggggagagccggggagccgggcccgcgcgccgagatgttgctgctgctgctactggcgccactcttcctccgccccccgggcgcgggcggggcgcagacccccaacgccacctcagaaggttgccagatcatacacccgccctgggaagggggcatcaggtaccggggcctgactcgggaccaggtgaaggctatcaacttcctgccagtggactatgagattgagtatgtgtgccggggggagcgcgaggtggtggggcccaaggtccgcaagtgcctggccaacggctcctggacagatatggacacacccagccgctgtgtccgaatctgctccaagtcttatttgaccctggaaaatgggaaggttttcctgacgggtggggacctcccagctctggacggagcccgggtggatttccggtgtgaccccgacttccatctggtgggcagctcccggagcatctgtagtcagggccagtggagcacccccaagccccactgccaggtgaatcgaacgccacactcagaacggcgcgcagtgtacatcggggcactgtttcccatgagcgggggctggccagggggccaggcctgccagcccgcggtggagatggcgctggaggacgtgaatagccgcagggacatcctgccggactatgagctcaagctcatccaccacgacagcaagtgtgatccaggccaagccaccaagtacctatatgagctgctctacaacgaccctatcaagatcatccttatgcctggctgcagctctgtctccacgctggtggctgaggctgctaggatgtggaacctcattgtgctttcctatggctccagctcaccagccctgtcaaaccggcagcgtttccccactttcttccgaacgcacccatcagccacactccacaaccctacccgcgtgaaactctttgaaaagtggggctggaagaagattgctaccatccagcagaccactgaggtcttcacttcgactctggacgacctggaggaacgagtgaaggaggctggaattgagattactttccgccagagtttcttctcagatccagctgtgcccgtcaaaaacctgaagcgccaggatgcccgaatcatcgtgggacttttctatgagactgaagcccggaaagttttttgtgaggtgtacaaggagcgtctctttgggaagaagtacgtctggttcctcattgggtggtatgctgacaattggttcaagatctacgacccttctatcaactgcacagtggatgagatgactgaggcggtggagggccacatcacaactgagatcgtcatgctgaatcctgccaatacccgcagcatttccaacatgacatcccaggaatttgtggagaaactaaccaagcgactgaaaagacaccctgaggagacaggaggcttccaggaggcaccgctggcctatgatgccatctgggccttggcactggccctgaacaagacatctggaggaggcagccgttccggcgtgcgcctggaggacttcaactacaacaaccagaccattaccgaccaaatctaccgggcaatgaactcctcgtcctttgagggtgtctctggccatgtggtgtttgatgccagcggctctcggatggcatggacgcttatcgagcagcttcagggtggcagctacaagaagattggctactatgacagcaccaaggatgatctttcctggtccaaaacagataaatggattgttatatccagaactcacagcccaacctgacaacctgactgctgtgggctgctcactggctttagctgctgtcttccccctggggctcgatggttaccacattgggaggaaccagtttcctttcgtctgccaggcccgcctctggctcctgggcctgggctttagtctgggctacggttccatgttcaccaagatttggtgggtccacacggtcttcacaaagaaggaagaaaagaaggagtggaggaagactctggaaccctggaagctgtatgccacagtgggcctgctggtgggcatggatgtcctcactctcgccatctggcagatcgtggaccctctgcaccggaccattgagacatttgccaaggaggaacctaaggaagatattgacgtctctattctgccccagctggagcattgcagctccaggaagatgaatacatggcttggcattttctatggttacaaggggctgctgctgctgctgggaatcttccttgcttatgagaccaagagtgtgtccactgagaagatcaatgatcaccgggctgtgggcatggctatctacaatgtggcagtcctgtgcctcatcactgctcctgtcaccatgattctgtccagccagcaggatgcagcctttgcctttgcctctcttgccatagttttctcctcctatatcactcttgttgtgctctttgtgcccaagatgcgcaggctgatcacccgaggggaatggcagtcggaggcgcaggacaccatgaagacagggtcatcgaccaacaacaacgaggaggagaagtcccggctgttggagaaggagaaccgtgaactggaaaagatcattgctgagaaagaggagcgtgtctctgaactgcgccatcaactccagtctcggcagcagctccgctcccggcgccacccaccgacacccccagaaccctctgggggcctgcccaggggaccccctgagccccccgaccggcttagctgtgatgggagtcgagtgcatttgctttataagtgagggtagggtgagggaggacaggccagtagggggagggaaagggagaggggaagggcaggggactcaggaagcagggggtccccatccccagctgggaagaacatgctatccaatctcatctcttgtaaatacatgtccccctgtgagttctgggctgatttgggtctctcatacctctgggaaacagacctttttctctcttactgcttcatgtaattttgtatcacctcttcacaatttagttcgtacctggcttgaagctgctcactgctcacacgctgcctcctcagcagcctcactgcatctttctcttcccatgcaacaccctcttctagttaccacggcaacccctgcagctcctctgcctttgtgctctgttcctgtccagcaggggtctcccaacaagtgctctttccaccccaaaggggcctctccttttctccactgtcataatctctttccatcttacttgcccttctatactttctcacatgtggctccccctgaattttgcttcctttgggagctcattcttttcgccaaggctcacatgctccttgcctctgctctgtgcactcacgctcagcacacatgcatcctcccctctcctgcgtgtgcccactgaacatgctcatgtgtacacacgcttttcccgtatgctttcttcatgttcagtcacatgtgctctcgggtgccctgcattcacagctacgtgtgcccctctcatggtcatgggtctgcccttgagcgtgtttgggtaggcatgtgcaatttgtctagcatgctgagtcatgtctttcctatttgcacacgtccatgtttatccatgtactttccctgtgtaccctccatgtaccttgtgtactttcttcccttaaatcatggtattcttctgacagagccatatgtaccctaccctgcacattgttatgcacttttccccaattcatgtttggtggggccatccacaccctctccttgtcacagaatctccatttctgctcagattccccccatctccattgcattcatgtactaccctcagtctacactcacaatcatcttctcccaagactgctcccttttgttttgtgtttttttgaggggaattaaggaaaaataagtgggggcaggtttggagagctgcttccagtggatagttgatgagaatcctgaccaaaggaaggcacccttgactgttgggatagacagatggacctatggggtgggaggtggtgtccctttcacactgtggtgtctcttggggaaggatctccccgaatctcaataaaccagtgaacagtgtgactcggcaaaaaaaaaaaa

SEQ ID NO: 1301 - DNA, 3925 bp, Homo sapiens
gtccaaaccggaagaccgtgggtagctgcggcggggctgacccgtcccgagtgccaaagctggggttctacttgagatttccctcgtggtgccagggtccggcgagcatcacgccgaggcccattttccagacgaccacgacgaggccggggtcacgaactctggcgccccttaccagcttccagtctctcgaggtggccagtgtggtgcttggtccttgtttccaggatggacttccccagctccctccgccctgcattgtttctgaccggcccccttggtctgagcgacgtccctgacctctctttcatgtgcagctggcgagacgcactgactctgccagaggcccagccccagaactcagagaatggggcactgcatgtgaccaaggacctgctgtgggagccggcaacccctgggcctctccccatgctgcctcccctcatcgatccctgggaccctggcctgactgcccgggacctgcttttccgcggagggtgccggtatcggaagcggccccgagtcgtgctggatgtgactgagcagatcagccggttcctcttggatcatggagacgtagcctttgcgcccctggggaagctgatgctggagaatttcaagctggagggagcggggagccgcactaagaagaagacagtggtcagtgtgaagaagctgctccaggacctcggtggacaccagccctgggggtgtccctgggcttacctcagcaaccgacagcgccgcttctctatcctcgggggccccatcctgggcacgtcggtggcgagccacttggcagagctgctgcacgaggagctggtgctgcggtgggagcagctgcttctggatgaggcctgcactgggggcgcgctggcctgggttcctggaaggacaccccagttcgggcagctggtctaccctgctggaggcgcccaggacaggctgcatttccaagaggtcgttctgaccccaggtgacaatccccaattccttgggaaacctggacgcatccagctccagggacctgtccggcaagtggtgacatgcaccgtccagggagaaagtaaggcccttatatacactttcctccctcactggctgacctgctacctgacccctggccctttccatccctcctcagctctgctggccgtccgctctgactaccactgtgccgtgtggaagtttggtaaacagtggcagccaacccttctgcaggcaatgcaggtggagaaaggggccacggggatcagcctcagccctcacctgcccggggagctggccatctgcagccgctcgggagccgtctgcctgtggagccctgaggatgggctgcggcaaatctacagggaccctgagaccctcgtgttccgggactcctcttcgtggcgttgggcagacttcactgcgcaccctcgggtgctgaccgtgggtgaccgcaccggagtgaagatgctggacactcagggcccgccgggctgtggtctgttgctttttcgtttgggggcagaggcttcgtgccagaaaggggaacgtgtcctgcttacccagtacctggggcactccagccccaaatgcctcccccctactcttcatctcgtctgtacccagttctctctctacctagtggacgagcgccttcccctggtgccgatgctgaagtggaaccatggcctcccctccccgctcctgctggcccgactgctgcctccgccccggcccagctgcgtgcagcccctgctcctcggaggccagggtgggcagctgcagctgctgcacctggcaggagaaggggcgtcggtgccccgcctggcaggccccccccagtctcttccttccaggatcgactccctccctgcatttcctctgctggagcctaagatccagtggcggctgcaggagcgcctgaaagcaccgaccataggtctggctgccgtcgtcccgcccttgccctcagcgcccacaccaggcctggtgctcttccagctctcggcggcgggagatgtcttctaccagcagctccgcccccaggtggactccagcctccgcagagatgctgggcctcctggcgacacccaacctgactgccatgcccccacagcttcctggacctcccaggacactgccggctgcagccagtggctgaaggccctgctaaaagtgcccctggctcctcctgtgtggacagcacccaccttcacccaccgccagatgctgggcagcacagagctgcggagggaggaagaggaagggcagcggctgggtgtgctccgcaaggccatggcccgagggcagctcctgctgcagagagacctgggctccctccctgcggcagagccaccccctgcacccgagtcaggcctagaggacaagctcagtgagcgcctgggggaagcctgggcaggccgaggggctgcctggtgggagaggcagcagggcaggacctcggagcccgggagacagaccaggcggcccaagcgccggacccagctgtccagcagcttttcgctcagtggccatgtggatccctcagaggacaccagctcccctcatagccctgagtggccacctgctgatgctctgcccctgccccccacgaccccgccctcccaggagttgactccggatgcatgcgcccagggcgtcccatcagagcagcggcagatgctccgtgactacatggccaagctaccaccccagagggacaccccaggctgtgccaccacacctccccactcccaggcctccagcgtccgggccactcgctcccagcagcacacacccgtcctctctagctctcagcccctccggaagaagcctcgaatgggcttctgaggacacaaggtgggctgccctcaagccccagagagcccctcatccttcctctgggaccagatgtgccttccacagttgaaacttgagaagcagagctcgccaccttctggaggccactgtgatgatgagccaagcaatttggagccaagttgaagggacagggcaacaaaatacagtagtagtttcttttgtattttgtatattcgcctgaagatcatcccgcaaggcaggctggaggtgccggtgggcctgtgttgctgggattttagtctgtgctgggaggcagggctccgctgcgcctcagctgtgggggcctcaggcaggtccctcagttctcacgccttcctgtccagtggaatgggggccaggagtgctggctcctcgtgtttggtgagggtggagtgaggcccctgcagagctgctgatgaggtgggcacagcggccgttggcagctgctgttgtgggttgctttgtcaatctctgccccggtctgatgtttcctacagggagatgccttggatccaggttcagggactaaatacacttggcagctgaagatgaattggaatggtcacgttttttaggctggacagcgtcccgccacagctactacctgacactgagctcatgcagagagatgatggctgatgttccttctcccttgggacatgggtctggcacctgtgggctgtcgatagtgccctctgagcagagggtcacggtcatgtcagtttgggggaattctctgttgtgcctcacagactcccccctttctttcctccctccccttctcattttgatgtctaaagcatcaagtccctcttcctcggagtttctctagctgcagtggaagattctgttttcctgtggggaaaatgctcacttgagattttgcagggacccgggtctgtctggtttctgatgacatagtaagagaaaggtcttttttcaggttggctggtgaaaggaattgcatgtgactcacacaaacaggagctagcccaatcatacactgactcgcgtgggtgttaaaatgtttatcatgcctaagggagacatttatgattaaaccatttatgctacataa

SEQ ID NO: 1302 - DNA, 3741 bp, Homo sapiens
gtccaaaccggaagaccgtgggtagctgcggcggggctgacccgtcccgagtgccaaagctggggttctacttgagatttccctcgtggtgccagggtccggcgagcatcacgccgaggcccattttccagacgaccacgacgaggccggggtcacctggcgagacgcactgactctgccagaggcccagccccagaactcagagaatggggcactgcatgtgaccaaggacctgctgtgggagccggcaacccctgggcctctccccatgctgcctcccctcatcgatccctgggaccctggcctgactgcccgggacctgcttttccgcggagggtgccggtatcggaagcggccccgagtcgtgctggatgtgactgagcagatcagccggttcctcttggatcatggagacgtagcctttgcgcccctggggaagctgatgctggagaatttcaagctggagggagcggggagccgcactaagaagaagacagtggtcagtgtgaagaagctgctccaggacctcggtggacaccagccctgggggtgtccctgggcttacctcagcaaccgacagcgccgcttctctatcctcgggggccccatcctgggcacgtcggtggcgagccacttggcagagctgctgcacgaggagctggtgctgcggtgggagcagctgcttctggatgaggcctgcactgggggcgcgctggcctgggttcctggaaggacaccccagttcgggcagctggtctaccctgctggaggcgcccaggacaggctgcatttccaagaggtcgttctgaccccaggtgacaatccccaattccttgggaaacctggacgcatccagctccagggacctgtccggcaagtggtgacatgcaccgtccagggagaaactctgctggccgtccgctctgactaccactgtgccgtgtggaagtttggtaaacagtggcagccaacccttctgcaggcaatgcaggtggagaaaggggccacggggatcagcctcagccctcacctgcccggggagctggccatctgcagccgctcgggagccgtctgcctgtggagccctgaggatgggctgcggcaaatctacagggaccctgagaccctcgtgttccgggactcctcttcgtggcgttgggcagacttcactgcgcaccctcgggtgctgaccgtgggtgaccgcaccggagtgaagatgctggacactcagggcccgccgggctgtggtctgttgctttttcgtttgggggcagaggcttcgtgccagaaaggggaacgtgtcctgcttacccagtacctggggcactccagccccaaatgcctcccccctactcttcatctcgtctgtacccagttctctctctacctagtggacgagcgccttcccctggtgccgatgctgaagtggaaccatggcctcccctccccgctcctgctggcccgactgctgcctccgccccggcccagctgcgtgcagcccctgctcctcggaggccagggtgggcagctgcagctgctgcacctggcagaaggggcgtcggtgccccgcctggcaggccccccccagtctcttccttccaggatcgactccctccctgcatttcctctgctggagcctaagatccagtggcggctgcaggagcgcctgaaagcaccgaccataggtctggctgccgtcgtcccgcccttgccctcagcgcccacaccaggcctggtgctcttccagctctcggcggcgggagatgtcttctaccagcagctccgcccccaggtggactccagcctccgcagagatgctgggcctcctggcgacacccaacctgactgccatgcccccacagcttcctggacctcccaggacactgccggctgcagccagtggctgaaggccctgctaaaagtgcccctggctcctcctgtgtggacagcacccaccttcacccaccgccagatgctgggcagcacagagctgcggagggaggaagaggaagggcagcggctgggtgtgctccgcaaggccatggcccgagggcagctcctgctgcagagagacctgggctccctccctgcggcagagccaccccctgcacccgagtcaggcctagaggacaagctcagtgagcgcctgggggaagcctgggcaggccgaggggctgcctggtgggagaggcagcagggcaggacctcggagcccgggagacagaccaggcggcccaagcgccggacccagctgtccagcagcttttcgctcagtggccatgtggatccctcagaggacaccagctcccctcatagccctgagtggccacctgctgatgctctgcccctgccccccacgaccccgccctcccaggagttgactccggatgcatgcgcccagggcgtcccatcagagcagcggcagatgctccgtgactacatggccaagctaccaccccagagggacaccccaggctgtgccaccacacctccccactcccaggcctccagcgtccgggccactcgctcccagcagcacacacccgtcctctctagctctcagcccctccggaagaagcctcgaatgggcttctgaggacacaaggtgggctgccctcaagccccagagagcccctcatccttcctctgggaccagatgtgccttccacagttgaaacttgagaagcagagctcgccaccttctggaggccactgtgatgatgagccaagcaatttggagccaagttgaagggacagggcaacaaaatacagtagtagtttcttttgtattttgtatattcgcctgaagatcatcccgcaaggcaggctggaggtgccggtgggcctgtgttgctgggattttagtctgtgctgggaggcagggctccgctgcgcctcagctgtgggggcctcaggcaggtccctcagttctcacgccttcctgtccagtggaatgggggccaggagtgctggctcctcgtgtttggtgagggtggagtgaggcccctgcagagctgctgatgaggtgggcacagcggccgttggcagctgctgttgtgggttgctttgtcaatctctgccccggtctgatgtttcctacagggagatgccttggatccaggttcagggactaaatacacttggcagctgaagatgaattggaatggtcacgttttttaggctggacagcgtcccgccacagctactacctgacactgagctcatgcagagagatgatggctgatgttccttctcccttgggacatgggtctggcacctgtgggctgtcgatagtgccctctgagcagagggtcacggtcatgtcagtttgggggaattctctgttgtgcctcacagactcccccctttctttcctccctccccttctcattttgatgtctaaagcatcaagtccctcttcctcggagtttctctagctgcagtggaagattctgttttcctgtggggaaaatgctcacttgagattttgcagggacccgggtctgtctggtttctgatgacatagtaagagaaaggtcttttttcaggttggctggtgaaaggaattgcatgtgactcacacaaacaggagctagcccaatcatacactgactcgcgtgggtgttaaaatgtttatcatgcctaagggagacatttatgattaaaccatttatgctacataaaaaaaaaaaaaaaaaaaaaaaaaaaaaaaaaaaaaaaaaaaaaaaaaaaaaaaaaaaa

SEQ ID NO: 1303 - DNA, 2816 bp, Homo sapiens
cacgcactacgggttggcgccagagtcaaaaggcgtcggccctctggcaagatggctgctgcggaggcgttggagcgcggaaatctggaaccgggatggcgacgtctacactgagtcggaggcgaaggagcttactccacgggaacagcctctagataatctgagttgttgaaaatacgaagcctgttactcgtgaacagtggctgacaacagtgttgttgtgagcctggctgtctgcttggacccagaggtttcgtctgccagggtttttggttgtatttaggatttcagggaaaagtgtccaagctttcagtgttggagcaggtatggacgacaaaggcgacccgagcaatgaggaggcacctaaggccatcaaacccaccagcaaagagttcaggaaaacatggggttttcgaaggaccactatcgccaagcgagagggcgcaggggacgcggaggctgacccactggagccgccacccccacagcagcagctgggcctgtccctgcggcgcagtgggaggcagcccaagcgcactgagcgcgtggagcagttcctgaccattgcgcggcgccgcggcaggaggagcatgcctgtctccctggaggattctggtgagcccacgtcctgccccgccacagacgccgagacagcctccgagggcagcgtggaaagcgcttctgagaccagaagcggcccccagtctgcttccacagctgtgaaggaacgaccagcctcttctgaaaaggtgaaaggaggggatgaccacgatgacacctccgatagtgacagcgatggcctgaccttgaaagagcttcagaatcgccttcgcaggaagcgggaacaggagcccactgagaggcccctgaaagggatccagagtcgcctgcggaagaagcgccgggaggagggtcccgccgagactgtgggctccgaggccagtgacactgtggagggcgtcctgcccagtaagcaggagcccgagaacgatcagggggttgtgtcccaggctgggaaagatgacagagagagtaagttggagggaaaggcggctcaggacatcaaagatgaggagcctggagacttgggccgaccgaagcctgaatgtgagggttacgaccccaacgccctgtattgcatttgccgccagcctcacaacaacaggtttatgatttgctgtgaccgctgtgaagaatggtttcatggcgattgtgtgggcatttctgaggctcgagggaggcttttggaaaggaatggggaagactatatctgcccaaactgcaccattctgcaagtgcaggatgagactcattcagaaacggcagatcagcaggaagctaaatggagacctggagatgctgatggcaccgattgtacaagtataggaacaatagagcagaagtctagcgaagaccaagggataaagggtagaattgagaaagctgcaaatccaagtggcaagaagaaactcaagatcttccagcctgtgatagaggcgcctggtgcctcaaaatgtattggccccgggtgctgtcacgtggcgcagcccgactcggtgtactgcagtaatgactgtatcctcaaacacgccgcagcgacaatgaagtttctaagctcaggtaaagaacagaagccaaagcctaaagaaaagatgaagatgaagccagagaagcccagtcttccgaaatgcggtgctcaggcaggtattaaaatctcttctgtgcacaagagaccagctccagaaaaaaaagagaccacagtgaagaaggcagtggtggtccctgcgcggagtgaagcactcgggaaggaagcagcttgtgagagcagcacgccgtcgtgggcgagcgatcacaattacaatgcagtaaagccagaaaagactgctgctccctcgccgtcactgttgtataaatgtatgtatcacctaggggttggcctcctggacccctcccgttctttctggatagccatcccctgggcctgtccaggactgggagttgcagctttgtgttaagctgatcacagacaccggctgcaccatcagcgggaagcagagcccatgtccaggatgcctcctgctgccctgtgtccatccctagtctgtcaggacttcctgtcactgttttccaaagctgtaaacctcactggtgaacgttcaccttaatgattgattctttaatctctgttttcactctcaggctctggtaagtattcgtattctcttcatcccagtctgattgcatagccacactgcccggcacgccacatccacccctgtctgcacatgagttgttctgacaacagcgctgtatacgcttcagtttttccacattgtccacggccagcacatgaaagcatcacttcttttttatgttgtgggaatctttgcaagttagtgttgcatctgattttcaggtgtacatttatttttgactgggcagataggggatttttttttttccatgtccgattcacacgctacacacccacatgaacacattcgaacttcgaaggccacacactcctgcttcataggccccacggtaagtgagttcacacctagaacactgtcctgaccgcaggacgcgtgccttggacttggtattctacatgtgactggctttcttgccctcgtctcttgaatgtttagactcttaagatcatatcctgccccaaatttcaaattaatgaaatgaagatatttcaaacagatctttgaaacctcagattctgtggtgcaattttaatgttttcttgtttctcagttttctgctataaaactattttcaattcagtcaaaaaaaaaaaaaaaaaa

SEQ ID NO: 1304 - DNA, 8562 bp, Homo sapiens
cacgcactacgggttggcgccagagtcaaaaggcgtcggccctctggcaagatggctgctgcggaggcgttggagcgcggaaatctggaaccgggatggcgacgtctacactgagtcggaggcgaaggagcttactccacgggaacagcctctagataatctgagttgttgaaaatacgaagcctgttactcgtgaacagtggctgacaacagtgttgttgtgagcctggctgtctgcttggacccagaggtttcgtctgccagggtttttggttgtatttaggatttcagggaaaagtgtccaagctttcagtgttggagcaggtatggacgacaaaggcgacccgagcaatgaggaggcacctaaggccatcaaacccaccagcaaagagttcaggaaaacatggggttttcgaaggaccactatcgccaagcgagagggcgcaggggacgcggaggctgacccactggagccgccacccccacagcagcagctgggcctgtccctgcggcgcagtgggaggcagcccaagcgcactgagcgcgtggagcagttcctgaccattgcgcggcgccgcggcaggaggagcatgcctgtctccctggaggattctggtgagcccacgtcctgccccgccacagacgccgagacagcctccgagggcagcgtggaaagcgcttctgagaccagaagcggcccccagtctgcttccacagctgtgaaggaacgaccagcctcttctgaaaaggtgaaaggaggggatgaccacgatgacacctccgatagtgacagcgatggcctgaccttgaaagagcttcagaatcgccttcgcaggaagcgggaacaggagcccactgagaggcccctgaaagggatccagagtcgcctgcggaagaagcgccgggaggagggtcccgccgagactgtgggctccgaggccagtgacactgtggagggcgtcctgcccagtaagcaggagcccgagaacgatcagggggttgtgtcccaggctgggaaagatgacagagagagtaagttggagggaaaggcggctcaggacatcaaagatgaggagcctggagacttgggccgaccgaagcctgaatgtgagggttacgaccccaacgccctgtattgcatttgccgccagcctcacaacaacaggtttatgatttgctgtgaccgctgtgaagaatggtttcatggcgattgtgtgggcatttctgaggctcgagggaggcttttggaaaggaatggggaagactatatctgcccaaactgcaccattctgcaagtgcaggatgagactcattcagaaacggcagatcagcaggaagctaaatggagacctggagatgctgatggcaccgattgtacaagtataggaacaatagagcagaagtctagcgaagaccaagggataaagggtagaattgagaaagctgcaaatccaagtggcaagaagaaactcaagatcttccagcctgtgatagaggcgcctggtgcctcaaaatgtattggccccgggtgctgtcacgtggcgcagcccgactcggtgtactgcagtaatgactgtatcctcaaacacgccgcagcgacaatgaagtttctaagctcaggtaaagaacagaagccaaagcctaaagaaaagatgaagatgaagccagagaagcccagtcttccgaaatgcggtgctcaggcaggtattaaaatctcttctgtgcacaagagaccagctccagaaaaaaaagagaccacagtgaagaaggcagtggtggtccctgcgcggagtgaagcactcgggaaggaagcagcttgtgagagcagcacgccgtcgtgggcgagcgatcacaattacaatgcagtaaagccagaaaagactgctgctccctcgccgtcactgttgtataaatccacgaaggaagacaggaggtccgaggagaaagcggcagccatggcagcctcaaagaaaacagcccctccaggctccgcggtgggcaagcagcctgcacctagaaacctcgtgccaaagaagtcttcttttgctaatgtggcagcagccacaccagccattaaaaagccaccctcaggtttcaagggcaccatccccaagaggccatggctctccgctaccccatcgagtggtgcttcagctgccaggcaggccggaccggcacctgcagcggcaacggctgcctccaagaagttccctggctccgctgctttggtgggagccgtaaggaagccagtggtaccttctgttccaatggcctcgccagccccaggacgccttggggctatgagtgctgcaccatcgcagccaaattcacaaattcggcaaaatatcagacgctccttaaaagagattttgtggaaaagagtcaatgacagcgatgacttaatcatgacagaaaacgaagtaggaaaaattgccctccatattgagaaggagatgtttaacttgtttcaagttacagataatcgctacaagagtaaatatcgcagcatcatgttcaacctgaaggaccctaaaaatcagggactcttccatcgtgttctgcgtgaggaaatctctttggcgaaacttgtgagactgaagccagaagaacttgtatctaaagagctttccacgtggaaagagaggccagcgagatctgtgatggagtccagaactaaactgcacaatgaaagcaagaagacggcccccaggcaggaggccatccccgatctggaggactctccgccagtgtcggattcagaggaacagcaagagtcagcacgtgctgtccctgagaagagcacagcgccgcttctcgacgtcttcagcagcatgttgaaagacaccaccagtcagcaccgcgcacacctcttcgatctcaactgtaaaatttgcacaggccaggttccctccgcagaagatgagccagctccgaaaaaacaaaaattgtcagcttctgttaagaaagaagacttaaaatcaaagcatgacagctctgcacctgacccagctccggattcagctgatgaggtgatgccggaggctgtgcctgaagttgcctctgagccaggcctagaaagtgcttctcatccaaatgtggacagaacgtatttccctgggcctccaggagatggccatcccgagccctccccgctggaagacctgtccccctgcccagcctcctgtgggagcggggtggtcaccaccgtcacagtgtccggccgggaccccaggaccgctccaagcagttcatgcacagccgtggcctccgcagcatcccgcccagacagcacccacatggtggaagccagacaggatgtgccgaagcctgtcttgacttctgtgatggtgcccaagtccatactagctaagccatcctcatctcctgacccaagatacctgtcagttcctccgtcaccaaatatcagcacttcagaatcacgttcccctccagagggagacacgaccctctttttgtctcgactcagcaccatttggaaaggatttattaacatgcagagtgtggcaaaatttgtcactaaggcgtatcctgtctctgggtgttttgattacctcagtgaggatttgcctgacacaattcacattggtgggaggatcgcaccgaagacagtttgggattatgttggcaaactcaagtcttctgtgtctaaggagctctgtctgatccgcttccaccccgccacagaggaagaggaggtcgcctatatctctctctactcctatttcagcagccgtggccgctttggtgttgtagctaataacaacaggcacgtcaaggacctctacctgatcccgctgagcgcccaggaccctgttccatccaaactcttgccctttgagggaccaggtcttgagtcaccacgtccgaatataattcttgggttagtaatctgccaaaaaatcaaacgtcccgcaaacagtggagagttagacaagatggacgaaaagcggacccgacttcaaccggaagaagcggacgttccggcctatccaaaagtagccacagtcccgcagtcggaaaagaagccctccaagtatccactctgctctgcagacgcggctgtcagcaccacacctcctgggtcgccgccgcctccgccccctcttccagaaccaccggtgctaaaagtgctgtcatccctcaaacctgcagcccccagcccagccacagcagccacaacagcagcggcagcctccacggcagcttcctccaccgcttcgtctgcttccaaaacagcatcaccgctggagcacatcctgcagactctctttggaaagaagaaatcattcgacccgtccgccagagagcctcccgggtccaccgcaggtctcccccaggagcccaaaaccacagcagaggacggggtgccggcacctccgttgttagatccgatcgtccagcagttcggtcagttctcaaaagataaggctctagaggaagaggaggacgacaggccatacgaccctgaggaggagtacgacccggagagggccttcgacactcagcttgtggagcgagggcggcgccacgaggtggaaagggctcctgaagcagctgcagccgagcgggaagaggtggcctatgaccccgaggatgagaccatcttagaagaagcgaaagtgactgttgatgacctgcccaacaggatgtgtgccgacgtgagaaggaactccgtggagaggcctgccgagccggtggccggggctgcgacgccctccctggtggagcaacagaagatgctagaagagctgaacaaacagatcgaggagcagaagagacagctggaggagcaagaagaagctctcaggcagcagagggccgccgtcggggtctccatggcccacttctcggtgtcggacgccttgatgtctccaccaccaaagtcgtccttgcccaaggcagagctgttccagcaagagcagcagtctgcagacaagcccgcctcactgccccccgccagccaggcgtcaaaccacagggacccccggcaggcgaggcgcctggccgctgagaccggtgagggggagggggagcctctctccaggctctcggcacgtggtgcccagggtgccctgcccgagagagatgcttccaggggtggcctcgtgggccaggcgcccatgccagtcccggaggaaaaagagccagcctcttccccctgggcttcgggcgaaaagcccccagcggggtccgagcaggacggctggaaggcagagcctggggagggcacccgccccgccacggttggagacagctcggccaggcctgcccggagggtgctgctgcccacaccgccttgcggcgccctgcagcccggcttcccgctgcagcacgacggtgagagggaccctttcacctgcccggggttcgcgtcgcaggacaaggctctcggctcagcccagtatgaggacccaagaaatcttcattctgctggaaggagcagcagccctgcaggtgaaacagagggggacagagagccacaggccagacccggcgagggcaccgccccgctccccccaccaggacagaaagtggggggctctcagcccccgtttcagggtcagcgggaacctggacctcatgctttggggatgtcagggcttcacggccccaatttcccgggaccaagggggccagcccctccgtttccagaagagaatatcgcttctaacgatgggccacgagggcctccgccagccagattcggagcccagaaggggcccatcccttccttattctcggggcaacatgggccacctccttatggggacagcagaggcccctcaccctcttaccttggtggaccacgaggagtggcaccatcccaatttgaagaacgcaaggatccccatggggagaagagggagttccaggacgccccgtataacgaggtgacgggcgcccccgcccagtttgaagggacagagcaagccccatttctgggaagcagaggcggcgcgcctttccagttcggaggccagagaaggccactgctgtctcagctgaaaggcccccgaggcggcccccctccctctcagtttggaggtcagagaggaccaccccctggtcatttcgtgggcccaagagggccccatcctagtcagtttgaaactgcccggggccctcatcccaaccagtttgaaggacccagaggccaagcgcctaactttatgccaggtcccaggggcattcagcctcagcagttcgaagaccagagggtccattcaccaccaagattcacaaaccaaagggcgcctgcacccctgcagtttggtggactacgggggtccgcacccttttctgaaaaaaatgagcagaccccttcgcgatttcacttccagggccaggccccgcaggtgatgaagccgggccccaggcccctgctggagcttcccagccaccccccgcagcaccggaaggaccgctgggaggaggccgggccgccctccgcgctctcctccagtgcgcccggacagggccccgaggccgacggacagtgggcatcggccgacttccgagaggggaaaggccacgaatacagaaaccagactttcgaagggaggcagagagagcggtttgacgtggggcccaaagagaagccgctggaggagcccgacgcccagggccgggcgtccgaggacaggaggagagagcgcgagcgcggccgaaactggagccgagagcgggactgggaccggccccgggagtgggaccgacaccgggacaaggactccagccgggactgggacagaaaccgggagaggagcgccaaccgcgaccgagagcgcgaggccgaccggggcaaggagtgggaccgcagccgggagcggagcaggaaccgagagcgcgagcgagaccggaggcgcgaccgggaccggtcccggagcagagagcgggaccgagacaaggccagggacagggagcggggccgcgaccgcaaggaccggagcaagagcaaagagagcgctcgggacccgaagcccgaggcctcgagggcctccgacgctggcaccgcctcgcaggcctagacgccccggccgggcagagaccctttttaaagccacgttcgtaagatgcgttgaacaaatagcttttgaaatagccacgatcttagattcaggatagaatattctggacttaaacattactgtaattttgtgtaaatggtttcttacaagatttcacatctttacaattctgatgcttttttaaaaaaactaaactttaatatttccatttaaaattaaaagaaatgggaaattgcctacggagcatattgcttttcagatcatagttatcttttccaataactttattgtaaattttaagggagtttcgttggaccctagagccataccttcactgacatctcatccgtttgtgtttccaaaagctgcttttacaggtcttagccgccgccccggaggccggtgtgggcgtgacctgcaggcgtccaccctgcggctacgggagaagtcttagtagcttgtatctggagtcttgagaaacacaaaccttacaaatgcatctttcttttgtcataaaattggaattacaattttcaactgggaaacagaaacacatttcttagcgtgctcagattttatatatcaccttatcaattttttccaaaacatgatttaaagcaacatctgtcctagtataattgttgcattttaaataacaatttattgaaaaatgttaagttttaccagcctaaaaaaagtaacaaaccaattaagtgtactttgggggcagggaggagtccttgatttgaataatcaggagttttgttggtccagtttcgccttctgagcagttcttctgtatcccgggaaaagtacgctcggccccaaactggtatttgtcagacgatacatgtaaaagtttgtccttgaacgtggaacaagacttgtgtaaagtctgagacgggaactagtgatcactagctcaagaactgcaaatgagacaggaagctgttcactgtgaaacagtctcttgcttgtcgtgtatttttcgagtacttctgaagtgtgaagtaaaaaaatctggctaatttatttgtacaaatacactttgataattttttatattttcataaacttttacagatgtaaaattaaagaacttcacttgttctttggagtctgttattccattgtacgtcactacagatttttcactttatagcacagattttttaagttaagaaaacattgagaatgtatcagtttgagatgtttggtgttgaaagccaagtgtccataggttaaattacattaaagtaggtgtcacgttccaacatctagtacgatgagaaggttttgtttgtttaacatataaagcaaatttttctaatttaaatacacaaatgtaaaaatcaagtgtgtttctttagtttacttgatagagattcctgtacattgtattttatattgcggaggcttatatcactgtacatgagaacatggaacgacctaggttttgttactcgcagtagaataaacagctacaggaagtttcaaaaaaaaaaaaaaaaaa

SEQ ID NO: 1305 - DNA, 2751 bp, Homo sapiens
gtccgcccactccgcggcgttcggggaaatggctgcgagaccctagaggcctgcggcctgcggagcttactccacgggaacagcctctagataatctgagttgttgaaaatacgaagcctgttactcgtgaacagtggctgacaacagtgttgttgtgagcctggctgtctgcttggacccagaggtttcgtctgccagggtttttggttgtatttaggatttcagggaaaagtgtccaagctttcagtgttggagcaggtatggacgacaaaggcgacccgagcaatgaggaggcacctaaggccatcaaacccaccagcaaagagttcaggaaaacatggggttttcgaaggaccactatcgccaagcgagagggcgcaggggacgcggaggctgacccactggagccgccacccccacagcagcagctgggcctgtccctgcggcgcagtgggaggcagcccaagcgcactgagcgcgtggagcagttcctgaccattgcgcggcgccgcggcaggaggagcatgcctgtctccctggaggattctggtgagcccacgtcctgccccgccacagacgccgagacagcctccgagggcagcgtggaaagcgcttctgagaccagaagcggcccccagtctgcttccacagctgtgaaggaacgaccagcctcttctgaaaaggtgaaaggaggggatgaccacgatgacacctccgatagtgacagcgatggcctgaccttgaaagagcttcagaatcgccttcgcaggaagcgggaacaggagcccactgagaggcccctgaaagggatccagagtcgcctgcggaagaagcgccgggaggagggtcccgccgagactgtgggctccgaggccagtgacactgtggagggcgtcctgcccagtaagcaggagcccgagaacgatcagggggttgtgtcccaggctgggaaagatgacagagagagtaagttggagggaaaggcggctcaggacatcaaagatgaggagcctggagacttgggccgaccgaagcctgaatgtgagggttacgaccccaacgccctgtattgcatttgccgccagcctcacaacaacaggtttatgatttgctgtgaccgctgtgaagaatggtttcatggcgattgtgtgggcatttctgaggctcgagggaggcttttggaaaggaatggggaagactatatctgcccaaactgcaccattctgcaagtgcaggatgagactcattcagaaacggcagatcagcaggaagctaaatggagacctggagatgctgatggcaccgattgtacaagtataggaacaatagagcagaagtctagcgaagaccaagggataaagggtagaattgagaaagctgcaaatccaagtggcaagaagaaactcaagatcttccagcctgtgatagaggcgcctggtgcctcaaaatgtattggccccgggtgctgtcacgtggcgcagcccgactcggtgtactgcagtaatgactgtatcctcaaacacgccgcagcgacaatgaagtttctaagctcaggtaaagaacagaagccaaagcctaaagaaaagatgaagatgaagccagagaagcccagtcttccgaaatgcggtgctcaggcaggtattaaaatctcttctgtgcacaagagaccagctccagaaaaaaaagagaccacagtgaagaaggcagtggtggtccctgcgcggagtgaagcactcgggaaggaagcagcttgtgagagcagcacgccgtcgtgggcgagcgatcacaattacaatgcagtaaagccagaaaagactgctgctccctcgccgtcactgttgtataaatgtatgtatcacctaggggttggcctcctggacccctcccgttctttctggatagccatcccctgggcctgtccaggactgggagttgcagctttgtgttaagctgatcacagacaccggctgcaccatcagcgggaagcagagcccatgtccaggatgcctcctgctgccctgtgtccatccctagtctgtcaggacttcctgtcactgttttccaaagctgtaaacctcactggtgaacgttcaccttaatgattgattctttaatctctgttttcactctcaggctctggtaagtattcgtattctcttcatcccagtctgattgcatagccacactgcccggcacgccacatccacccctgtctgcacatgagttgttctgacaacagcgctgtatacgcttcagtttttccacattgtccacggccagcacatgaaagcatcacttcttttttatgttgtgggaatctttgcaagttagtgttgcatctgattttcaggtgtacatttatttttgactgggcagataggggatttttttttttccatgtccgattcacacgctacacacccacatgaacacattcgaacttcgaaggccacacactcctgcttcataggccccacggtaagtgagttcacacctagaacactgtcctgaccgcaggacgcgtgccttggacttggtattctacatgtgactggctttcttgccctcgtctcttgaatgtttagactcttaagatcatatcctgccccaaatttcaaattaatgaaatgaagatatttcaaacagatctttgaaacctcagattctgtggtgcaattttaatgttttcttgtttctcagttttctgctataaaactattttcaattcagtcaaaaaaaaaaaaaaaaaa

SEQ ID NO: 1306 - DNA, 7610 bp, Homo sapiens
cacgcactacgggttggcgccagagtcaaaaggcgtcggccctctggcaagatggctgctgcggaggcgttggagcgcggaaatctggaaccgggatggcgacgtctacactgagtcggaggcgaaggagcttactccacgggaacagcctctagataatctgagttgttgaaaatacgaagcctgttactcgtgaacagtggctgacaacagtgttgttgtgagcctggctgtctgcttggacccagaggtttcgtctgccagggtttttggttgtatttaggatttcagggaaaagtgtccaagctttcagtgttggagcaggtatggacgacaaaggcgacccgagcaatgaggaggcacctaaggccatcaaacccaccagcaaagagttcaggaaaacatggggttttcgaaggaccactatcgccaagcgagagggcgcaggggacgcggaggctgacccactggagccgccacccccacagcagcagctgggcctgtccctgcggcgcagtgggaggcagcccaagcgcactgagcgcgtggagcagttcctgaccattgcgcggcgccgcggcaggaggagcatgcctgtctccctggaggattctggtgagcccacgtcctgccccgccacagacgccgagacagcctccgagggcagcgtggaaagcgcttctgagaccagaagcggcccccagtctgcttccacagctgtgaaggaacgaccagcctcttctgaaaaggtgaaaggaggggatgaccacgatgacacctccgatagtgacagcgatggcctgaccttgaaagagcttcagaatcgccttcgcaggaagcgggaacaggagcccactgagaggcccctgaaagggatccagagtcgcctgcggaagaagcgccgggaggagggtcccgccgagactgtgggctccgaggccagtgacactgtggagggcgtcctgcccagtaagcaggagcccgagaacgatcagggggttgtgtcccaggctgggaaagatgacagagagagtaagttggagggaaaggcggctcaggacatcaaagatgaggagcctggagacttgggccgaccgaagcctgaatgtgagggttacgaccccaacgccctgtattgcatttgccgccagcctcacaacaacaggtttatgatttgctgtgaccgctgtgaagaatggtttcatggcgattgtgtgggcatttctgaggctcgagggaggcttttggaaaggaatggggaagactatatctgcccaaactgcaccattctgcaagtgcaggatgagactcattcagaaacggcagatcagcaggaagctaaatggagacctggagatgctgatggcaccgattgtacaagtataggaacaatagagcagaagtctagcgaagaccaagggataaagggtagaattgagaaagctgcaaatccaagtggcaagaagaaactcaagatcttccagcctgtgatagaggcgcctggtgcctcaaaatgtattggccccgggtgctgtcacgtggcgcagcccgactcggtgtactgcagtaatgactgtatcctcaaacacgccgcagcgacaatgaagtttctaagctcaggtaaagaacagaagccaaagcctaaagaaaagatgaagatgaagccagagaagcccagtcttccgaaatgcggtgctcaggcaggtattaaaatctcttctgtgcacaagagaccagctccagaaaaaaaagagaccacagtgaagaaggcagtggtggtccctgcgcggagtgaagcactcgggaaggaagcagcttgtgagagcagcacgccgtcgtgggcgagcgatcacaattacaatgcagtaaagccagaaaagactgctgctccctcgccgtcactgttgtataaatccacgaaggaagacaggaggtccgaggagaaagcggcagccatggcagcctcaaagaaaacagcccctccaggctccgcggtgggcaagcagcctgcacctagaaacctcgtgccaaagaagtcttcttttgctaatgtggcagcagccacaccagccattaaaaagccaccctcaggtttcaagggcaccatccccaagaggccatggctctccgctaccccatcgagtggtgcttcagctgccaggcaggccggaccggcacctgcagcggcaacggctgcctccaagaagttccctggctccgctgctttggtgggagccgtaaggaagccagtggtaccttctgttccaatggcctcgccagccccaggacgccttggggctatgagtgctgcaccatcgcagccaaattcacaaattcggcaaaatatcagacgctccttaaaagagattttgtggaaaagagtcaatgacagcgatgacttaatcatgacagaaaacgaagtaggaaaaattgccctccatattgagaaggagatgtttaacttgtttcaagttacagataatcgctacaagagtaaatatcgcagcatcatgttcaacctgaaggaccctaaaaatcagggactcttccatcgtgttctgcgtgaggaaatctctttggcgaaacttgtgagactgaagccagaagaacttgtatctaaagagctttccacgtggaaagagaggccagcgagatctgtgatggagtccagaactaaactgcacaatgaaagcaagaagacggcccccaggcaggaggccatccccgatctggaggactctccgccagtgtcggattcagaggaacagcaagagtcagcacgtgctgtccctgagaagagcacagcgccgcttctcgacgtcttcagcagcatgttgaaagacaccaccagtcagcaccgcgcacacctcttcgatctcaactgtaaaatttgcacaggccaggttccctccgcagaagatgagccagctccgaaaaaacaaaaattgtcagcttctgttaagaaagaagacttaaaatcaaagcatgacagctctgcacctgacccagctccggattcagctgatgaggtgatgccggaggctgtgcctgaagttgcctctgagccaggcctagaaagtgcttctcatccaaatgtggacagaacgtatttccctgggcctccaggagatggccatcccgagccctccccgctggaagacctgtccccctgcccagcctcctgtgggagcggggtggtcaccaccgtcacagtgtccggccgggaccccaggaccgctccaagcagttcatgcacagccgtggcctccgcagcatcccgcccagacagcacccacatggtggaagccagacaggatgtgccgaagcctgtcttgacttctgtgatggtgcccaagtccatactagctaagccatcctcatctcctgacccaagatacctgtcagttcctccgtcaccaaatatcagcacttcagaatcacgttcccctccagagggagacacgaccctctttttgtctcgactcagcaccatttggaaaggatttattaacatgcagagtgtggcaaaatttgtcactaaggcgtatcctgtctctgggtgttttgattacctcagtgaggatttgcctgacacaattcacattggtgggaggatcgcaccgaagacagtttgggattatgttggcaaactcaagtcttctgtgtctaaggagctctgtctgatccgcttccaccccgccacagaggaagaggaggtcgcctatatctctctctactcctatttcagcagccgtggccgctttggtgttgtagctaataacaacaggcacgtcaaggacctctacctgatcccgctgagcgcccaggaccctgttccatccaaactcttgccctttgagggaccaggtaagcgccggctttctgggtggaggtgaggcccacctgcacctgcacccctcctcccactgacatgccctgctgagtcctgaccagcccagggctctctgggagcaggagttaggagcacagacgcagcggttagcaataggattcatctttgagggcgtaggactgtggcacgagaagtacccctgattcacagcataaattgtcttaggagagttttttagagagggaaaaacccacagcctgcaaccagctcatcttggcctcaggtcagagaagactcagtgcccagaagcccaaggctcagccagaaagggaggtgacactcccagcggccctgctctttcctctagacagactcgggagccagcacacaccgggaagtggctccatcagggatcacttctctaacagggatggatttccaggagacttaacaataatgacatagaaaactatttctagaaataattattttaaaatctgcagctcaaattgtaataggttcattcatctttggcaagctattttgtgtttgcacgttccttggaaagtactgtatttaaacgattatttacaaatagcctaaaatacatctttgtcaagggttgagggtgattccaggggccacgtgctctgttagtgaccagctctttcatagccccttagaagaagctgatgtgacttcagttaggggttagtatctgatgcccaactgaagtgtctccgtggccatgcagtccccagaggattggtgttctctcaaagcgggtgtgtggatcacacagtgtcctctgaagtgcttcgtcataaaggcaggtgctgtctggaccctgtgcctcagtgccctctgtccctgtcaccaggcctcggcgggtgttcctgccatagctgtgcagggtgttcccacccacacccctcatgccgcaccctagctagctggggtcctgtaggggccactccacatcttgggcgggacttctgtcgccccaggcacagcccacgttcctactggagcccattcttcacagctggagtgggctcagcctatgcctgtgttgtggaattatatgtccataaagggattggttggtatcagtaatttcagggttaaatatttgctggcgtggtgcattaaattattttagtgccagataaatttttaaaagcaaagtgctttagtgtgtcccctcaaatcctacttgggataaagagatgccacctaatgggtggcagaaaggaccctggtagaggttcttggtgttgcttgtgaagagctctggccagctccacgtgaccagggagaggaaaagcccggccctcctggaggtgaagaccgagaagctggcctctccgcacctgtgaagacccactggtcagttgcaagtgcgacagtgtgtgcactcagtgcagacactgcagcacctcagcacctccctaccggggtggaaagagcactttttctttacagaaacatgattcttagatagcgagcctcccctttttaaaacaattgaggcgatatttcatcctttcttgagcttctctccctgctcatctccaaacttggagctgtcaggtgagcacggttgtagggtgttgagcgagccccggcgcatgccgggcaccgggttccccacactgggcagtgacggggcccagggaggccaccagaggagcggcgcctccattctccccacagcaagggctggctgtgcaggtgcagccccggggcagagggaaaggacaggtctcccagcacctcccggatggcaccgggacaaggagggctgggctggggtcactcaccttgtctgctgagtgcgatggcaccaaccacccacactgtcagctccgcgaccagctgggggaacgtcacactcgcccaccaaggcacttgctgaggccacgacgccgcctgacggggacacacaaaagccccagggactttgatccacgataaagagcagaggcgtctgggtaaagtaacacagggcaagggactttagaaaagtaacagctagtgaaacctttccatacacttcagaaatgttttaacttaagacttcagtataatgttaacttctcctgatgtccttgttgacatgaatgcgtgtgcgtgaaatctcacacacttccatggtcactaaacagccttcaccccgggccaggccatcgggtactcggcccgcttcacgtactgattacttgacttggcgttttctagatataaacatgtacatgtgtgtcctggctttgtggtgtaaatgtgtagtgcgtgtgcatgtgcgcgcgtgtgtgtgtgtaaggctaggtcctggcatgtttcccctgtctcagcggaccctgtcctcacggagatagcccagaagcccttggacagcacaggccacacctgagggtgctgatggtggtgactccacagagctgtggtcaggggtgagcgtgtgctgcgcagcttggagtcacgcccccagaagtgctgggtgagggtctgcaggacccagctccattccacagcctcagttctctgcggcacatgcagcacaggcctgaaggagacctggcgccccagccttgagctgcccgtctgcatcagggcactgatgtgggagcatcttcccctggggatgttaaggagaaggtcctgttgggggtagagattcacgcagaaaagagtgactgactcgtccatgtgcctcagtttataccacacaattgcaggtgtccatgcctcccacacatggggacctagtgggttttgacagcgtggtgtccagtcctagccccctcagtgcttgctgttcacacttaagcaagtgaaggcctgaaggtgcccagctgtgccctcaggggaaacttaagtcacccgccctgtcagcacttggcccttgtcgggcagtgagagtggagctgcccccgcagcaccctcaggagccatgcagttcacagcagtagctggatctccctgaggacatttgtccttgcatatcttaatgatttgtccacagaaacaccgggttgtcttcctctgcccctctgccccgcagtgggggcactctctgtaactcagcatcacggtggggggcagctgggaggcctggttccaggtgaccttctccacctagatgttcaccccactcagttccagctttaccaacagggccccccgcagggacttggggtcgcagagtcccggcctgtctcagggccttgttcatggaagggagatgagtcaggttgaaagctcatcgtgtagggttctgtgcagggcccttacaggactggaccgcagccaagatgcctgcctgttaaccatgcccagcccccgtcatttccgcgtgaagccgcaggcctcggagccttggtctgaaatgcctgtggagtaacctcggtccataaacatgggtgcacagtctgttctccccaagtacagggcaggaggaaacaccgccctctgtagctgctcgaatggaaagggctcttttctctgaggtctttatacattagaaagctcttctgggaagaatgtttgaatccatagtgtctttctgtattcacttttaattgctttctaaattagctgagaaattctgacttgaaatattgtcaggtaagcatttcttcagttttcatgtgtgtatgtaacagtagctttgcatggaaattgtaatcagagtcaaatacagtattgaatggaatgtactgccttctcctcctaaatcaataaacatctttcatgg

SEQ ID NO: 1307 - DNA, 2053 bp, Homo sapiens
acatctcccggcaggctgcggaagggggtcgagtagaaggaccgccgctccggcctcccgcgacttctcgaaggtgggcaggtcccaccttgtggaggatggaggtgaccggggacgccggggtaccagaatctggcgagatccggactctaaagccgtgtctgctgcgccgcaactacagccgcgaacagcacggcgtggccgcctcctgcctcgaagacctgaggagcaaggcctgtgacattctggccattgataagtccctgacaccagtcaccctggtcctggcagaggatggcaccatagtggatgatgacgattactttctgtgtctaccttccaatactaagtttgtggcattggctagtaatgagaaatgggcatacaacaattcagatggaggtacagcttggatttcccaagagtcctttgatgtagatgaaacagacagcggggcagggttgaagtggaagaatgtggccaggcagctgaaagaagatctgtccagcatcatcctcctatcagaggaggacctccagatgcttgttgacgctccctgctcagacctggctcaggaactacgtcagagttgtgccaccgtccagcggctgcagcacacactccaacaggtgcttgaccaaagagaggaagtgcgtcagtccaagcagctcctgcagctgtacctccaggctttggagaaagagggcagcctcttgtcaaagcaggaagagtccaaagctgcctttggtgaggaggtggatgcagtagacacgggtatcagcagagagacctcctcggacgttgcgctggcgagccacatccttactgcactgagggagaagcaggctccagagctgagcttatctagtcaggatttggagttggttaccaaggaagaccccaaagcactggctgttgccttgaactgggacataaagaagacggagactgttcaggaggcctgtgagcgggagctcgccctgcgcctgcagcagacgcagagcttgcattctctccggagcatctcagcaagcaaggcctcaccacctggtgacctgcagaatcctaagcgagccagacaggatcccacatagcagcagcgggaagtgtgccaaggaagctctgtggcgttgtgttattggtagacaccctcagcctcatcatttgactacctatgtactactctaccccctgccttagagcaccttccagagaagctattccaggtctcaacatacgccgttccaccaattttttttttagccccaccagcttcaggacttctgccaattttgaatgatatagctgcaccaacaatatcccgcctcctctaattacatatgatgttctctgttcaaaagtaattggcagtgattggccaggcgcagtggctcacgcctgtaatcccagcactgggaggccgaggggggcggatcgtgaagtcaggagatcgagaccatcctggctaacatggtgaaaccctgtctctactaaaaatacaaaaaaaattagccagccatggtggcgggcgcctgtaatcccagctacttgggaggctgaggcaggagaatggcatgaacctgggaggcagagcttgcagtgagctgagattgcgccactgcactccagcctgggcaacagagcgagactccgtctcaaaaaaaaaaaaaaaaaaagtaattggcagtgactatgggcgcactgcctaacatttagccctgccccatatggaacatgttaaaaaaaaaaaaagccaggccgagcgtgttggctcacgcttgtaatcccagcactttgggaggccgaggcgggtggatcacgaggtcaggagatcgagaccatcctggctaacacagtgaaacgtgtttttactaaaagtacaaaaaactagctgggcgtggtggcaggagcctgtagtcccagctactcgggaggctgaggcaggagaattgcttgaaccggggaggcagaagttgcagtgagccgagattatgccactgtactccagcctgggtgacagagtgacactctgtctcaaaaaaaaaaaaaaaaa

SEQ ID NO: 1308 - DNA, 3408 bp, Homo sapiens
acatctcccggcaggctgcggaagggggtcgagtagaaggaccgccgctccggcctcccgcgacttctcgaaggtgggcaggtcccaccttgtggaggatggaggtgaccggggacgccggggtaccagaatctggcgagatccggactctaaagccgtgtctgctgcgccgcaactacagccgcgaacagcacggcgtggccgcctcctgcctcgaagacctgaggagcaaggcctgtgacattctggccattgataagtccctgacaccagtcaccctggtcctggcagaggatggcaccatagtggatgatgacgattactttctgtgtctaccttccaatactaagtttgtggcattggctagtaatgagaaatgggcatacaacaattcagatggaggtacagcttggatttcccaagagtcctttgatgtagatgaaacagacagcggggcagggttgaagtggaagaatgtggccaggcagctgaaagaagatctgtccagcatcatcctcctatcagaggaggacctccagatgcttgttgacgctccctgctcagacctggctcaggaactacgtcagagttgtgccaccgtccagcggctgcagcacacactccaacaggtgcttgaccaaagagaggaagtgcgtcagtccaagcagctcctgcagctgtacctccaggctttggagaaagagggcagcctcttgtcaaagcaggaagagtccaaagctgcctttggtgaggaggtggatgcagtagacacgggtatcagcagagagacctcctcggacgttgcgctggcgagccacatccttactgcactgagggagaagcaggctccagagctgagcttatctagtcaggatttggaggtgggcggaaaccagggtcactgagctacagaggaggacatgccctgggatgtagtagtatcatgcagaggtgtgtgggcccttttgttcacctctgcagactgtgaatcctagctgccagtttgcctattatatgccaaggcatttgcaaaaatctcattaatctaaatcaaaatagctttaaagaaaaatgcatacacttcctcagatcatcaaacagactctggtccaaggttggtaatgaaatgactgttcctgacagggaggaatagcagggcccaatcttctgagatggcttctgggtctttccatggtcagagaagatctatagtccgtcctgaggtctgtcaatgtcacaggaaaaggcaaacttgaggggatcgtcgcctgctggctaagaccagggagctaaaaacttgaggaagggaacctgcctgggtgggtgctacttctgattcattgtccttgtccctgtcataagtacctccctattgtagatagaagggaaggaaactgttgacttgagcttggctaaatttcctgaaggtggaggaccttagagttgctccaagtaaactttccaaggacttcttcctgttggtgttgtaagaaaaggcccatgcttgtccgggcacagtggcttacgcctgttaatgccagtactttgggaggccgaggcaggtggatcacctgaggtcaggagttcgagaccagcctgaccaacatggcgaaaccccatctctactaaaaatacaaaaattagcctggcatggtggtgggaggctgaagcaagagaatcacttgaacccaggaggtggaggttgcgtgagctaagatcgcgccactgcactccagcctgggcgacaagagtgaaactccgtcttaaaaaagcccatggcaggctgggcgcggtggctcacgcctgtaatcccagcactttgggaggccaaggtgggcggatcacaaggtcaggagatcgagaccatcctggcgaacacggtgaaaccccgtctctactaaaaaaaatacaaaaaaattagccaggcgtggtcgtgggcacctgtagtcccagctactcagggggctgaggcaggagaatggcgtgaatccgggaggcggagcttgcagggagccgagatagtgtcactgcactccagcctgggtgacagagcgagactccgtctcaaaaaacaaaaagcccgtggcaattaatggtaaaggaaacccggcatttcagtgtaaagaggtaacataaacggatactgcctcattgcactccccaaaagagagtcaggagagcagcaggagaggcgcacagaaggcccagttctcaggggtttttattcttgctgcagttggttaccaaggaagaccccaaagcactggctgttgccttgaactgggacataaagaagacggagactgttcaggaggcctgtgagcgggagctcgccctgcgcctgcagcagacgcagagcttgcattctctccggagcatctcagcaagcaaggcctcaccacctggtgacctgcagaatcctaagcgagccagacaggatcccacatagcagcagcgggaagtgtgccaaggaagctctgtggcgttgtgttattggtagacaccctcagcctcatcatttgactacctatgtactactctaccccctgccttagagcaccttccagagaagctattccaggtctcaacatacgccgttccaccaattttttttttagccccaccagcttcaggacttctgccaattttgaatgatatagctgcaccaacaatatcccgcctcctctaattacatatgatgttctctgttcaaaagtaattggcagtgattggccaggcgcagtggctcacgcctgtaatcccagcactgggaggccgaggggggcggatcgtgaagtcaggagatcgagaccatcctggctaacatggtgaaaccctgtctctactaaaaatacaaaaaaaattagccagccatggtggcgggcgcctgtaatcccagctacttgggaggctgaggcaggagaatggcatgaacctgggaggcagagcttgcagtgagctgagattgcgccactgcactccagcctgggcaacagagcgagactccgtctcaaaaaaaaaaaaaaaaaaagtaattggcagtgactatgggcgcactgcctaacatttagccctgccccatatggaacatgttaaaaaaaaaaaaagccaggccgagcgtgttggctcacgcttgtaatcccagcactttgggaggccgaggcgggtggatcacgaggtcaggagatcgagaccatcctggctaacacagtgaaacgtgtttttactaaaagtacaaaaaactagctgggcgtggtggcaggagcctgtagtcccagctactcgggaggctgaggcaggagaattgcttgaaccggggaggcagaagttgcagtgagccgagattatgccactgtactccagcctgggtgacagagtgacactctgtctcaaaaaaaaaaaaaaaaa

SEQ ID NO: 1309 - DNA, 2030 bp, Homo sapiens
gtaaacattacgagattggcttggattctgtcggatggacttggggctagctgcggcggggctggaggaggccagataaccatgtcagccacagttgtagatgcagttaatgctgcacccctatcggggtccaaagaaatgagtttggaagaaccaaagaagatgaccagagaggactggagaaagaagaaggagctagaagaacagcgaaaattgggcaatgctcctgcagaagttgatgaagaaggaaaagacatcaacccccatattcctcagtatatttcttcagtgccatggtatattgatccttcaaaaagacctactttaaaacaccagagaccacaaccagaaaaacaaaagcagttcagctcatctggagaatggtacaagaggggtgtaaaagagaattccataattactaagtaccgcaaaggagcatgtgaaaattgtggggccatgacacacaaaaagaaagactgctttgagagacctaggcgagttggagccaaatttacaggtactaatatagctccagatgaacatgtccagcctcaactgatgtttgactatgatgggaagagggatcggtggaatggctacaatccagaagaacacatgaaaattgttgaagagtatgccaaagttgatttggcaaaacgaacattgaaagcccagaaactccaagaggaattagcctcaggaaaattagtggaacaggctaattctccaaaacaccagtggggagaagaggaaccaaattctcagatggaaaaagatcataatagtgaagatgaggatgaagataaatatgcagatgatattgacatgcctggacagaattttgactccaagagacgaattactgtccggaatctcaggattcgagaagatattgcaaaatatttgaggaatttagatccaaattctgcctactatgatccaaaaactagagcaatgagagagaatccttatgccaatgcaggaaagaatccagatgaagtgagttatgctggagataactttgttaggtacacaggagataccatttcaatggctcagacacagttgtttgcatgggaagcctatgacaagggatctgaagtgcatctacaggcagatcctacaaagctagagctgttgtataagtccttcaaagtcaaaaaagaagatttcaaagaacagcagaaagaaagcatcctggaaaagtatggtggccaagaacatttggatgcccctccagctgaattgcttttagcccagactgaagactatgtggagtactcaagacatgggacagtcatcaaaggacaggagcgggctgttgcctgctctaagtatgaggaggatgtgaagatccacaatcacacacatatctggggatcgtactggaaagaaggccgatggggatacaaatgctgtcactcttttttcaagtattcctattgtactggagaagctgggaaggagattgttaactctgaggagtgtattataaatgagataactggggaagaatctgtgaaaaaacctcaaaccctcatggagctgcatcaagaaaaactgaaagaggaaaagaagaagaagaaaaagaaaaagaagaagcatcgaaagagcagttcagatagtgatgatgaagaaaagaagcatgaaaaattgaaaaaggcactgaacgcagaggaggcccgccttcttcatgtcaaggagaccatgcagattgatgagaggaagcggccttacaatagcatgtatgaaactcgagaacctactgaagaggaaatggaggcatatagaatgaaacgtcagaggccagatgaccccatggcctctttccttggacagtagcaactagtcagaagaccatccaagatagatgcagctgatacattcttttcagcttcttattgatgattgtagatagaaaaatccttgtttattcttcttgctgcctggctttaataaatatttcagatgcctcacaaaaaaaaaaaaaaaaaaaaaaaaaaaaaaaaaaaaaaaaaaaaaaaaaaaaa

SEQ ID NO: 1310 - DNA, 3136 bp, Homo sapiens
ggagagcgcgccacagaacgacttttacgcaggcgcagaagcctgtttcccctcacccgcggcttccaccctgcgcaggcgcaaaaagccgcgctggcaacctccgcagcggtcgcgcgcacccttcacccctcttgctgcttttgtctggcacaaccttctcaggccctccgcgaggccggccctttttttctttcactttccccacccggagagccaggtgccgagaactaggacctcgtccccttctctatcccttcccctgatccatctcgtctctgttctccttcccttttccgttcccgaagccggaaggagccgaggtacccacggaaaaagtcgaagctgtccccggagagtgaggccttcacgaagcggtggcggaaggagccgaagttctctgatcggaggcgtgagcaagtggcatctccggaaagagccgaaacacggactcgagcttaatcccaggaggggcccgagggcgagatccggaaatctccggaaagagccgaaggccgggacggttaggattgtcggaagtggccgattgcttggacagggccggcggagaagatcggagcaagtccgtggaagaagccaaagactgggacggattgaattgttggaagaacccgaactcgcagaggggactgggcgcagtggcacacgaggacacacggaaacctccgaacgttgaggagataatctcggaaaagttacggaaacctgggaagtcggcgaaaccctacgttcgggtgttttcggaagcagccgaagcggccgcctgcttcgccttcgtccagtatccggagatagccgaggcgcttcggagccaggctcggggggaggggcaagctcgcgggcgggcgggcgggtgagggggcggagcccgggcggggcggggagggctgccggaggcttgattaggtaggaggtggcgaagcgccggcggcggccggaagtagccgaagccagcggcggaagtagccgaagcggctggagcgggcggcaaggcgaggcgaaagctgcacagggccctacgcggccgcctcagcatgtcggacttcgacgagttcgagcggcagctcaacgagaataaacaagagcgggacaaggagaaccggcatcggaagcgcagccacagccgctctcggagccgggaccgcaaacgccggagccggagccgcgaccggcgcaaccgggaccagcggagcgcctcccgggacaggcgacgacgcagcaaacctttgaccagaggcgctaaagaggagcacggtggactgattcgttccccccgccacgagaagaagaagaaggtccgtaaatactgggacgtgccacccccaggctttgagcacatcaccccaatgcagtacaaggccatgcaagctgcgggtcagattccagccactgctcttctccccaccatgacccctgacggtctggctgtgaccccaacgccggtgcccgtggtcgggagccagatgaccagacaagcccggcgcctctacgtgggcaacatcccctttggcatcactgaggaggccatgatggatttcttcaacgcccagatgcgcctgggggggctgacccaggcccctggcaacccagtgttggctgtgcagattaaccaggacaagaattttgcctttttggagttccgctcagtggacgagactacccaggctatggcctttgatggcatcatcttccagggccagtcactaaagatccgcaggcctcacgactaccagccgcttcctggcatgtcagagaacccctccgtctatgtgcctggggttgtgtccactgtggtccccgactctgcccacaagctgttcatcgggggcttacccaactacctgaacgatgaccaggtcaaagagctgctgacatcctttgggcccctcaaggccttcaacctggtcaaggacagtgccacggggctctccaagggctacgccttctgtgagtacgtggacatcaacgtcacggatcaggccattgcggggctgaacggcatgcagctgggggataagaagctgctggtccagagggcgagtgtgggagccaagaatgccacgctgagcaccatcaatcagacgcctgtgaccctgcaagtgccgggcttgatgagctcccaggtgcagatgggcggccacccgactgaggtcctgtgcctcatgaacatggtgctgcctgaggagctgctggacgacgaggagtatgaggagatcgtggaggatgtgcgggacgagtgcagcaagtacgggcttgtcaagtccatcgagatcccccggcctgtggacggcgtcgaggtgcccggctgcggaaagatctttgtggagttcacctctgtgtttgactgccagaaagccatgcagggcctgacgggccgcaagttcgccaacagagtggttgtcacaaaatactgtgaccccgactcttatcaccgccgggacttctggtagaggcggctgggggagggtgggggcagggctggctgggggcttctccccactcccgccccccccttatccccctctgaagacgatgggcagaggagtgacagccgcagacacacgacagccggcagcaactggaatggcagcaattaagggtggggggcgggggttggggggttggggggttagggcagggaggggactggggaagtgcgcacacagcccacacagacaacacgcacccacacagacacagagggaaggggttgggatggggacagggtgcacagcagggcggggtaggaccccagcccctcccaaaacagcctctccttctcccatagacccctttcttctccccttccccacggtaggaacatagcgtgtttatattttatggccaaactattttgaattttgttgtccggccctcagtgccctgccctctcccttaccaggaccacagctctgttccttcggcctctggtcctctctggtcccctcctgggtttcttacgtagttgatttttcctctttagtctcccccgacctgcgcccagccccgtggcccctgcccctctcctactctctgtggcagtttcatatttgctaagacgaatttgctcattaaacattttgttgtattttactttaaaaaaaaaaaaaaaaaa

SEQ ID NO: 1311 - DNA, 3148 bp, Homo sapiens
ggagagcgcgccacagaacgacttttacgcaggcgcagaagcctgtttcccctcacccgcggcttccaccctgcgcaggcgcaaaaagccgcgctggcaacctccgcagcggtcgcgcgcacccttcacccctcttgctgcttttgtctggcacaaccttctcaggccctccgcgaggccggccctttttttctttcactttccccacccggagagccaggtgccgagaactaggacctcgtccccttctctatcccttcccctgatccatctcgtctctgttctccttcccttttccgttcccgaagccggaaggagccgaggtacccacggaaaaagtcgaagctgtccccggagagtgaggccttcacgaagcggtggcggaaggagccgaagttctctgatcggaggcgtgagcaagtggcatctccggaaagagccgaaacacggactcgagcttaatcccaggaggggcccgagggcgagatccggaaatctccggaaagagccgaaggccgggacggttaggattgtcggaagtggccgattgcttggacagggccggcggagaagatcggagcaagtccgtggaagaagccaaagactgggacggattgaattgttggaagaacccgaactcgcagaggggactgggcgcagtggcacacgaggacacacggaaacctccgaacgttgaggagataatctcggaaaagttacggaaacctgggaagtcggcgaaaccctacgttcgggtgttttcggaagcagccgaagcggccgcctgcttcgccttcgtccagtatccggagatagccgaggcgcttcggagccaggctcggggggaggggcaagctcgcgggcgggcgggcgggtgagggggcggagcccgggcggggcggggagggctgccggaggcttgattaggtaggaggtggcgaagcgccggcggcggccggaagtagccgaagccagcggcggaagtagccgaagcggctggagcgggcggcaaggcgaggcgaaagctgcacagggccctacgcggccgcctcagcatgtcggacttcgacgagttcgagcggcagctcaacgagaataaacaagagcgggacaaggagaaccggcatcggaagcgcagccacagccgctctcggagccgggaccgcaaacgccggagccggagccgcgaccggcgcaaccgggaccagcggagcgcctcccgggacaggcgacgacgcagcaaacctttgaccagaggcgctaaagaggagcacggtggactgattcgttccccccgccacgagaagaagaagaaggtccgtaaatactgggacgtgccacccccaggctttgagcacatcaccccaatgcagtacaaggccatgcaagctgcgggtcagattccagccactgctcttctccccaccatgacccctgacggtctggctgtgaccccaacgccggtgcccgtggtcgggagccagatgaccagacaagcccggcgcctctacgtgggcaacatcccctttggcatcactgaggaggccatgatggatttcttcaacgcccagatgcgcctgggggggctgacccaggcccctggcaacccagtgttggctgtgcagattaaccaggacaagaattttgcctttttggagttccgctcagtggacgagactacccaggctatggcctttgatggcatcatcttccagggccagtcactaaagatccgcaggcctcacgactaccagccgcttcctggcatgtcagagaacccctccgtctatgtgcctggggttgtgtccactgtggtccccgactctgcccacaagctgttcatcgggggcttacccaactacctgaacgatgaccaggtcaaagagctgctgacatcctttgggcccctcaaggccttcaacctggtcaaggacagtgccacggggctctccaagggctacgccttctgtgagtacgtggacatcaacgtcacggatcaggccattgcggggctgaacggcatgcagctgggggataagaagctgctggtccagagggcgagtgtgggagccaagaatgccacgctggtgagccccccgagcaccatcaatcagacgcctgtgaccctgcaagtgccgggcttgatgagctcccaggtgcagatgggcggccacccgactgaggtcctgtgcctcatgaacatggtgctgcctgaggagctgctggacgacgaggagtatgaggagatcgtggaggatgtgcgggacgagtgcagcaagtacgggcttgtcaagtccatcgagatcccccggcctgtggacggcgtcgaggtgcccggctgcggaaagatctttgtggagttcacctctgtgtttgactgccagaaagccatgcagggcctgacgggccgcaagttcgccaacagagtggttgtcacaaaatactgtgaccccgactcttatcaccgccgggacttctggtagaggcggctgggggagggtgggggcagggctggctgggggcttctccccactcccgccccccccttatccccctctgaagacgatgggcagaggagtgacagccgcagacacacgacagccggcagcaactggaatggcagcaattaagggtggggggcgggggttggggggttggggggttagggcagggaggggactggggaagtgcgcacacagcccacacagacaacacgcacccacacagacacagagggaaggggttgggatggggacagggtgcacagcagggcggggtaggaccccagcccctcccaaaacagcctctccttctcccatagacccctttcttctccccttccccacggtaggaacatagcgtgtttatattttatggccaaactattttgaattttgttgtccggccctcagtgccctgccctctcccttaccaggaccacagctctgttccttcggcctctggtcctctctggtcccctcctgggtttcttacgtagttgatttttcctctttagtctcccccgacctgcgcccagccccgtggcccctgcccctctcctactctctgtggcagtttcatatttgctaagacgaatttgctcattaaacattttgttgtattttactttaaaaaaaaaaaaaaaaaa

SEQ ID NO: 1312 - DNA, 5109 bp, Homo sapiens
cgtcattgtcccccgccgggcggctgggctgtgtgcggcggcggcggcggcggccgagggggatggagcgagcgccgagccgggtcagagttgaacaatgaccatagttgacaaagcttctgaatcttcagacccatcagcctatcagaatcagcctggcagctccgaggcagtctcacctggagacatggatgcaggttctgccagctggggtgctgtgtcttcattgaatgatgtgtcaaatcacacactttctttaggaccagtacctggtgctgtagtttattcgagttcatctgtacctgataaatcaaaaccatcaccacaaaaggatcaagccctaggtgatggcatcgctcctccacagaaagttcttttcccatctgagaagatttgtcttaagtggcaacaaactcatagagttggagctgggctccagaatttgggcaatacctgttttgccaatgcagcactgcagtgtttaacctacacaccacctcttgccaattacatgctatcacatgaacactccaaaacatgtcatgcagaaggcttttgtatgatgtgtacaatgcaagcacatattacccaggcactcagtaatcctggggacgttattaaaccaatgtttgtcatcaatgagatgcggcgtatagctaggcacttccgttttggaaaccaagaagatgcccatgaattccttcaatacactgttgatgctatgcagaaagcatgcttgaatggcagcaataaattagacagacacacccaggccaccactcttgtttgtcagatatttggaggatacctaagatctagagtcaaatgtttaaattgcaagggcgtttcagatacttttgatccatatcttgatataacattggagataaaggctgctcagagtgtcaacaaggcattggagcagtttgtgaagccggaacagcttgatggagaaaactcgtacaagtgcagcaagtgtaaaaagatggttccagcttcaaagaggttcactatccatagatcctctaatgttcttacactttctctgaaacgttttgcaaattttaccggtggaaaaattgctaaggatgtgaaataccctgagtatcttgatattcggccatatatgtctcaacccaacggagagccaattgtctacgtcttgtatgcagtgctggtccacactggttttaattgccatgctggccattacttctgctacataaaagctagcaatggcctctggtatcaaatgaatgactccattgtatctaccagtgatattagatcggtactcagccaacaagcctatgtgctcttttatatcaggtcccatgatgtgaaaaatggaggtgaacttactcatcccacccatagccccggccagtcctctccccgccccgtcatcagtcagcgggttgtcaccaacaaacaggctgcgccaggctttatcggaccacagcttccctctcacatgataaagaatccacctcacttaaatgggactggaccattgaaagacacgccaagcagttccatgtcgagtcctaacgggaattccagtgtcaacagggctagtcctgttaatgcttcagcttctgtccaaaactggtcagttaataggtcctcagtgatcccagaacatcctaagaaacaaaaaattacaatcagtattcacaacaagttgcctgttcgccagtgtcagtctcaacctaaccttcatagtaattctttggagaaccctaccaagcccgttccctcttctaccattaccaattctgcagtacagtctacctcgaacgcatctacgatgtcagtttctagtaaagtaacaaaaccgatcccccgcagtgaatcctgctcccagcccgtgatgaatggcaaatccaagctgaactccagcgtgctggtgccctatggcgccgagtcctctgaggactctgacgaggagtcaaaggggctgggcaaggagaatgggattggtacgattgtgagctcccactctcccggccaagatgccgaagatgaggaggccactccgcacgagcttcaagaacccatgaccctaaacggtgctaatagtgcagacagcgacagtgacccgaaagaaaacggcctagcgcctgatggtgccagctgccaaggccagcctgccctgcactcagaaaatccctttgctaaggcaaacggtcttcctggaaagttgatgcctgctcctttgctgtctctcccagaagacaaaatcttagagaccttcaggcttagcaacaaactgaaaggctcgacggatgaaatgagtgcacctggagcagagaggggccctcccgaggaccgcgacgccgagcctcagcctggcagccccgccgccgaatccctggaggagccagatgcggccgccggcctcagcagcaccaagaaggctccgccgccccgcgatcccggcacccccgctaccaaagaaggcgcctgggaggccatggccgtcgcccccgaggagcctccgcccagcgccggcgaggacatcgtgggggacacagcaccccctgacctgtgtgatcccgggagcttaacaggcgatgcgagcccgttgtcccaggacgcaaaggggatgatcgcggagggcccgcgggactcggcgttggcggaagccccggaagggttgagtccggctccgcctgcgcggtcggaggagccctgcgagcagccactccttgttcaccccagcggggaccacgcccgggacgctcaggacccatcccagagcttgggcgcacccgaggccgcagagcggccgccagctcctgtgctggacatggccccggccggtcacccggaaggggacgctgagcctagccccggcgagagggtcgaggacgccgcggcgccgaaagccccaggcccttccccagcgaaggagaaaatcggcagcctcagaaaggtggaccgaggccactaccgcagccggagagagcgctcgtccagcggggagcccgccagagagagcaggagcaagactgagggccaccgtcaccggcggcgccgcacctgcccccgggagcgcgaccgccaggaccgccacgccccggagcaccaccccggccacggcgacaggctcagccctggcgagcgccgctctctgggcaggtgcagtcaccaccactcccgacaccggagcggggtggagctggactgggtcagacaccactacaccgagggcgagcgtggctggggccgggagaagttctaccccgacaggccgcgctgggacaggtgccggtactaccatgacaggtacgccctgtacgctgcccgggactggaagcccttccacggcggccgcgagcacgagcgggccgggctgcacgagcggccgcacaaggaccacaaccggggccgtaggggctgcgagccggcccgggagagggagcggcaccgccccagcagcccccgcgcaggcgcgccccacgccctcgccccgcaccccgaccgcttctcccacgacagaactgcacttgtagccggagacaactgtaacctctctgatcggtttcacgaacacgaaaatggaaagtcccggaaacggagacacgacagtgtggagaacagtgacagtcatgttgaaaagaaagcccggaggagcgaacagaaggatcctctagaagagcctaaagcaaagaagcacaaaaaatcaaagaagaaaaagaaatccaaagacaaacaccgagaccgcgactccaggcatcagcaggactcagacctctcagcagcgtgctctgacgctgacctccacagacacaaaaaaaagaagaagaaaaagaagagacattcaagaaaatcagaggactttgttaaagattcagaactgcacttacccagggtcaccagcttggagactgtcgcccagttccggagagcccagggtggctttcctctctctggtggcccgcctctggaaggcgtcggacctttccgtgagaaaacgaaacacttacggatggaaagcagggatgacaggtgtcgtctctttgagtatggccagggtgattgaaaactcagcctcaaaacaaaaaattcactagttatgattcaacgcgttcaacagaagccatccccagcccagcttaaattataaagatagacaataactctgttccaatctgcgtggtgcttctttagtaaatactgtacagattttaccatggagaactttttttttagtttttaccttttcttaattacccttattccgaatggacgaacactttctaccactgctgaccattgtaaaataccgtgtatataaatcccattgaaataatgccctggaatagaacatctcaaatgctgcttaattacagactcaggtcgattacttgtatttcatgtaatgttcctccaagttagacatctggtgcaagaccaaccgggagaccatggaattgtcaaaagtacaaactgacagtgtgtatatttaatttaaagacttatttaaaaactcacaagctctcacctagactttggagagcagtctgttttctgtaatgtctgatactagaaactaatttgcttattttagttgtattcaagatttgaagatgtattttatagacaagttctgtttttgaactttgtggaactgttccaatcaatcaatttcccagttatgatgagtatttacattatgaatgtataacccagacatgatttgtaaagccgacagtatgtttctattacacaacactttttgatacagcgtctcttgtcttcactgatactggagtctccgttgtctgcttggtcccttcgagtttctagttacagacacaatcatactgtgattttatttttaatatggatatgctatcaaactgtgatacacttataattcactggtcctgcatcaggagatggagtggggaaaactgtatttaatacagtttgtatctgaataatctgtatggtttatacagtttgtgttgttcagagatgtttaaagtttgatctttgtttttctaaagattaaaaaagcacttgccccactgtaaatatacagcatgtaaaatttctatagtatataaatggcagcaaatcacaaaaaaaaaaaaaaaa

SEQ ID NO: 1313 - DNA, 1661 bp, Homo sapiens
tgctgcagccgctgccgccgattccggatctcattgccacgcgcccccgacgaccgcccgacgtgcattcccgattccttttggttccaagtccaatatggcaactctaaaggatcagctgatttataatcttctaaaggaagaacagaccccccagaataagattacagttgttggggttggtgctgttggcatggcctgtgccatcagtatcttaatgaaggacttggcagatgaacttgctcttgttgatgtcatcgaagacaaattgaagggagagatgatggatctccaacatggcagccttttccttagaacaccaaagattgtctctggcaaagactataatgtaactgcaaactccaagctggtcattatcacggctggggcacgtcagcaagagggagaaagccgtcttaatttggtccagcgtaacgtgaacatatttaaattcatcattcctaatgttgtaaaatacagcccgaactgcaagttgcttattgtttcaaatccagtggatatcttgacctacgtggcttggaagataagtggttttcccaaaaaccgtgttattggaagtggttgcaatctggattcagcccgattccgttacctgatgggggaaaggctgggagttcacccattaagctgtcatgggtgggtccttggggaacatggagattccagtgtgcctgtatggagtggaatgaatgttgctggtgtctctctgaagactctgcacccagatttagggactgataaagataaggaacagtggaaagaggttcacaagcaggtggttgagagtgcttatgaggtgatcaaactcaaaggctacacatcctgggctattggactctctgtagcagatttggcagagagtataatgaagaatcttaggcgggtgcacccagtttccaccatgattaagggtctttacggaataaaggatgatgtcttccttagtgttccttgcattttgggacagaatggaatctcagaccttgtgaaggtgactctgacttctgaggaagaggcccgtttgaagaagagtgcagatacactttgggggatccaaaaggagctgcaattttaaagtcttctgatgtcatatcatttcactgtctaggctacaacaggattctaggtggaggttgtgcatgttgtcctttttatctgatctgtgattaaagcagtaatattttaagatggactgggaaaaacatcaactcctgaagttagaaataagaatggtttgtaaaatccacagctatatcctgatgctggatggtattaatcttgtgtagtcttcaactggttagtgtgaaatagttctgccacctctgacgcaccactgccaatgctgtacgtactgcatttgccccttgagccaggtggatgtttaccgtgtgttatataacttcctggctccttcactgaacatgcctagtccaacattttttcccagtgagtcacatcctgggatccagtgtataaatccaatatcatgtcttgtgcataattcttccaaaggatcttattttgtgaactatatcagtagtgtacattaccatataatgtaaaaagatctacatacaaacaatgcaaccaactatccaagtgttataccaactaaaacccccaataaaccttgaacagtg

SEQ ID NO: 1314 - DNA, 6694 bp, Homo sapiens
atgccagccccgtagcactgcccaccccacccactgtggtctgttgtaccccactgctggggtggtggttccaatgagacagggcacaccaaactccatctggctgttactgaggcggagacacgggtgatgattggctttctggggagagaggaagtcctgtgattggccagatctctggagcttgccgacgcggtgtgaggacgctcccacggaggccggaattggctgtgaaaggactgaggcagccatctgggggtagcgggcactcttatcagagcggctggagccggaccatcgtcccagagagctggggcagggggccgtgcccaatctccagggctcctggggccactgctgacctggctggatgcatcgggcagtggaccctccaggggcccgcgctgcacgggaagcctttgcccttgggggcctgagctgtgctggggcctggagctcctgcccgcctcatccccctcctcgtagcgcatggctgcctggaggcagatgctcagccagcattgggcagcccccgcttcctgctcccctacccccttcacatggcagtagttctgggcaccccagcaaaccatattatgctccaggggcgcccactccaagacccctccatgggaagctggaatccctgcatggctgtgtgcaggcattgctccgggagccagcccagccagggctttgggaacagcttgggcaactgtacgagtcagagcacgatagtgaggaggccacacgctgctaccacagcgcccttcgatacggaggaagcttcgctgagctggggccccgcattggccgactgcagcaggcccagctctggaactttcatactggctcctgccagcaccgagccaaggtcctgcccccactggagcaagtgtggaacttgctacaccttgagcacaaacggaactatggagccaagcggggaggtcccccggtgaagcgagctgctgaacccccagtggtgcagcctgtgcctcctgcagcactctcaggcccctcaggggaggagggcctcagccctggaggcaagcgaaggagaggctgcaactctgaacagactggccttcccccagggctgccactgcctccaccaccattaccaccaccaccaccaccaccaccaccaccaccaccacccctgcctggcctggctaccagccccccatttcagctaaccaagccagggctgtggagtaccctgcatggagatgcctggggcccagagcgcaagggttcagcacccccagagcgccaggagcagcggcactcgctgcctcacccatatccatacccagctccagcgtacaccgcgcacccccctggccaccggctggtcccggctgctcccccaggcccaggcccccgccccccaggagcagagagccatggctgcctgcctgccacccgtccccccggaagtgaccttagagagagcagagttcagaggtcgcggatggactccagcgtttcaccagcagcaaccaccgcctgcgtgccttacgccccttcccggccccctggcctccccggcaccaccaccagcagcagcagtagcagcagcagcaacactggtctccggggcgtggagccgaacccaggcattcccggcgctgaccattaccaaactcccgcgctggaggtctctcaccatggccgcctggggccctcggcacacagcagtcggaaaccgttcttgggggctcccgctgccactccccacctatccctgccacctggaccttcctcaccccctccacccccctgtccccgcctcttacgccccccaccaccccctgcctggttgaagggtccggcctgccgggcagcccgagaggatggagagatcttagaagagctcttctttgggactgagggacccccccgccctgccccaccacccctcccccatcgcgagggcttcttggggcctccggcctcccgcttttctgtgggcactcaggattctcacacccctcccactcccccaaccccaaccaccagcagtagcaacagcaacagtggcagccacagcagcagccctgctgggcctgtgtcctttcccccaccaccctatctggccagaagtatagacccccttccccggcctcccagcccagcacagaacccccaggacccacctcttgtacccctgactcttgccctgcctccagcccctccttcctcctgccaccaaaatacctcaggaagcttcaggcgcccggagagcccccggcccagggtctccttcccaaagacccccgaggtggggccggggccacccccaggccccctgagtaaagccccccagcctgtgccgcccggggttggggagctgcctgcccgaggccctcgactctttgattttccccccactccgctggaggaccagtttgaggagccagccgaattcaagatcctacctgatgggctggccaacatcatgaagatgctggacgaatccattcgcaaggaagaggaacagcaacaacacgaagcaggcgtggccccccaacccccgctgaaggagccctttgcatctctgcagtctcctttccccaccgacacagcccccaccactactgctcctgctgtcgccgtcaccaccaccaccaccaccaccaccaccaccacggccacccaggaagaggagaagaagccaccaccagccctaccaccaccaccgcctctagccaagttccctccaccctctcagccacagccaccaccacccccaccccccagcccggccagcctgctcaaatccttggcctccgtgctggagggacaaaagtactgttatcgggggactggagcagctgtttccacccggcctgggcccttgcccaccactcagtattcccctggccccccatcaggtgctaccgccctgccgcccacctcagcggcccctagcgcccagggctccccacagccctctgcttcctcgtcatctcagttctctacctcaggcgggccctgggcccgggagcgcagggcgggcgaagagccagtcccgggccccatgacccccacccaaccgcccccacccctatctctgccccctgctcgctctgagtctgaggtgctagaagagatcagccgggcttgcgagacccttgtggagcgggtgggccggagtgccactgacccagccgacccagtggacacagcagagccagcggacagtgggactgagcgactgctgccccccgcacaggccaaggaggaggctggcggggtggcggcagtgtcaggcagctgtaagcggcgacagaaggagcatcagaaggagcatcggcggcacaggcgggcctgtaaggacagtgtgggtcgtcggccccgtgagggcagggcaaaggccaaggccaaggtccccaaagaaaagagccgccgggtgctggggaacctggacctgcagagcgaggagatccagggtcgtgagaagtcccggcccgatcttggcggggcctccaaggccaagccacccacagctccagcccctccatcagctcctgcaccttctgcccagcccacacccccgtcagcctctgtccctggaaagaaggctcgggaggaagccccagggccaccgggtgtcagccgggccgacatgctgaagctgcgctcacttagtgaggggccccccaaggagctgaagatccggctcatcaaggtagagagtggtgacaaggagacctttatcgcctctgaggtggaagagcggcggctgcgcatggcagacctcaccatcagccactgtgctgctgacgtcgtgcgcgccagcaggaatgccaaggtgaaagggaagtttcgagagtcctacctttcccctgcccagtctgtgaaaccgaagatcaacactgaggagaagctgccccgggaaaaactcaacccccctacacccagcatctatctggagagcaaacgggatgccttctcacctgtcctgctgcagttctgtacagaccctcgaaatcccatcacagtgatccggggcctggcgggctccctgcggctcaacttgggcctcttctccaccaagaccctggtggaagcgagtggcgaacacaccgtggaagttcgcacccaggtgcagcagccctcagatgagaactgggatctgacaggcactcggcagatctggccttgtgagagctcccgttcccacaccaccattgccaagtacgcacagtaccaggcctcatccttccaggagtctctgcaggaggagaaggagagtgaggatgaggagtcagaggagccagacagcaccactggaacccctcctagcagcgcaccagacccgaagaaccatcacatcatcaagtttggcaccaacatcgacttgtctgatgctaagcggtggaagccccagctgcaggagctgctgaagctgcccgccttcatgcgggtaacatccacgggcaacatgctgagccacgtgggccacaccatcctgggcatgaacacggtgcagctgtacatgaaggtgcccggcagccgaacgccaggccaccaggagaataacaacttctgctccgtcaacatcaacattggcccaggcgactgcgagtggttcgcggtgcacgagcactactgggagaccatcagcgctttctgtgatcggcacggcgtggactacttgacgggttcctggtggccaatcctggatgatctctatgcatccaatattcctgtgtaccgcttcgtgcagcgacccggagacctcgtgtggattaatgcggggactgtgcactgggtgcaggccaccggctggtgcaacaacattgcctggaacgtggggcccctcaccgcctatcagtaccagctggccctggaacgatacgagtggaatgaggtgaagaacgtcaaatccatcgtgcccatgattcacgtgtcatggaacgtggctcgcacggtcaaaatcagcgaccccgacttgttcaagatgatcaagttctgcctgctgcagtccatgaagcactgccaggtgcaacgcgagagcctggtgcgggcagggaagaaaatcgcttaccagggccgtgtcaaggacgagccagcctactactgcaacgagtgcgatgtggaggtgtttaacatcctgttcgtgacaagtgagaatggcagccgcaacacgtacctggtacactgcgagggctgtgcccggcgccgcagcgcaggcctgcagggcgtggtggtgctggagcagtaccgcactgaggagctggctcaggcctacgacgccttcacgctggtgagggcccggcgggcgcgcgggcagcggaggagggcactggggcaggctgcagggacgggcttcgggagcccggccgcgcctttccctgagcccccgccggctttctccccccaggccccagccagcacgtcgcgatgaggccggacgccccgcccgcctgcctgcccgcgcaaggcgccgcggggccaccagcacatgcctgggctggacctaggtcccgcctgtggccgagaagggggtcgggcccagcccttccaccccattggcagctcccctcacttaatttattaagaaaaactttttttttttttttagcaaatatgaggaaaaaaggaaaaaaaatgggagacgggggagggggctggcagcccctcgcccaccagcgcctcccctcaccgactttggcctttttagcaacagacacaaggaccaggctccggcggcggcgggggtcacatacgggttccctcaccctgccagccgcccgcccgcccggcgcagatgcacgcggctcgtgtatgtacatagacgttacggcagccgaggtttttaatgagattctttctatgggctttacccctcccccggaacctccttttttacttccaatgctagctgtgacccctgtacatgtctctttattcacttggttatgatttgtattttttgttcttttcttgtttttttgtttttaatttataacagtcccactcacctctatttattcatttttgggaaaacccgacctcccacacccccaagccatcctgcccgcccctccagggaccgcccgtcgccgggctctccccgcgccccagtgtgtgtccgggcccggcccgaccgtctccacccgtccgcccgcggctccagccgggttctcatggtgctcaaacccgctcccctcccctacgtcctgcactttctcggaccagtccccccactcccgacccgaccccagccccacctgagggtgagcaactcctgtactgtaggggaagaagtgggaactgaaatggtattttgtaaaaaaaataaataaaataaaaaaattaaaggttttaaagaaagaactatgaggaaaaggaaccccgtccttcccagccccggccaactttaaaaaacacagaccttcacccccacccccttttctttttaagtgtgaaacaacccagggccagggcctcactggggcagggacaccccggggtgagtttctctggggctttattttcgttttgttggttgttttttctccacgctggggctgcggaggggtggggggtttacagtcccgcaccctcgcactgcactgtctctctgccccaggggcagaggggtcttcccaaccctacccctattttcggtgatttttgtgtgagaatattaatattaaaaataaacggagaaaaaaaa

SEQ ID NO: 1315 - DNA, 4756 bp, Homo sapiens
ctggttgaagggtccggcctgccgggcagcccgagaggatggagagatcttagaagagctcttctttgggactgagggacccccccgccctgccccaccacccctcccccatcgcgagggcttcttggggcctccggcctcccgcttttctgtgggcactcaggattctcacacccctcccactcccccaaccccaaccaccagcagtagcaacagcaacagtggcagccacagcagcagccctgctgggcctgtgtcctttcccccaccaccctatctggccagaagtatagacccccttccccggcctcccagcccagcacagaacccccaggacccacctcttgtacccctgactcttgccctgcctccagcccctccttcctcctgccaccaaaatacctcaggaagcttcaggcgcccggagagcccccggcccagggtctccttcccaaagacccccgaggtggggccggggccacccccaggccccctgagtaaagccccccagcctgtgccgcccggggttggggagctgcctgcccgaggccctcgactctttgattttccccccactccgctggaggaccagtttgaggagccagccgaattcaagatcctacctgatgggctggccaacatcatgaagatgctggacgaatccattcgcaaggaagaggaacagcaacaacacgaagcaggcgtggccccccaacccccgctgaaggagccctttgcatctctgcagtctcctttccccaccgacacagcccccaccactactgctcctgctgtcgccgtcaccaccaccaccaccaccaccaccaccaccacggccacccaggaagaggagaagaagccaccaccagccctaccaccaccaccgcctctagccaagttccctccaccctctcagccacagccaccaccacccccaccccccagcccggccagcctgctcaaatccttggcctccgtgctggagggacaaaagtactgttatcgggggactggagcagctgtttccacccggcctgggcccttgcccaccactcagtattcccctggccccccatcaggtgctaccgccctgccgcccacctcagcggcccctagcgcccagggctccccacagccctctgcttcctcgtcatctcagttctctacctcaggcgggccctgggcccgggagcgcagggcgggcgaagagccagtcccgggccccatgacccccacccaaccgcccccacccctatctctgccccctgctcgctctgagtctgaggtgctagaagagatcagccgggcttgcgagacccttgtggagcgggtgggccggagtgccactgacccagccgacccagtggacacagcagagccagcggacagtgggactgagcgactgctgccccccgcacaggccaaggaggaggctggcggggtggcggcagtgtcaggcagctgtaagcggcgacagaaggagcatcagaaggagcatcggcggcacaggcgggcctgtaaggacagtgtgggtcgtcggccccgtgagggcagggcaaaggccaaggccaaggtccccaaagaaaagagccgccgggtgctggggaacctggacctgcagagcgaggagatccagggtcgtgagaagtcccggcccgatcttggcggggcctccaaggccaagccacccacagctccagcccctccatcagctcctgcaccttctgcccagcccacacccccgtcagcctctgtccctggaaagaaggctcgggaggaagccccagggccaccgggtgtcagccgggccgacatgctgaagctgcgctcacttagtgaggggccccccaaggagctgaagatccggctcatcaaggtagagagtggtgacaaggagacctttatcgcctctgaggtggaagagcggcggctgcgcatggcagacctcaccatcagccactgtgctgctgacgtcgtgcgcgccagcaggaatgccaaggtgaaagggaagtttcgagagtcctacctttcccctgcccagtctgtgaaaccgaagatcaacactgaggagaagctgccccgggaaaaactcaacccccctacacccagcatctatctggagagcaaacgggatgccttctcacctgtcctgctgcagttctgtacagaccctcgaaatcccatcacagtgatccggggcctggcgggctccctgcggctcaacttgggcctcttctccaccaagaccctggtggaagcgagtggcgaacacaccgtggaagttcgcacccaggtgcagcagccctcagatgagaactgggatctgacaggcactcggcagatctggccttgtgagagctcccgttcccacaccaccattgccaagtacgcacagtaccaggcctcatccttccaggagtctctgcaggaggagaaggagagtgaggatgaggagtcagaggagccagacagcaccactggaacccctcctagcagcgcaccagacccgaagaaccatcacatcatcaagtttggcaccaacatcgacttgtctgatgctaagcggtggaagccccagctgcaggagctgctgaagctgcccgccttcatgcgggtaacatccacgggcaacatgctgagccacgtgggccacaccatcctgggcatgaacacggtgcagctgtacatgaaggtgcccggcagccgaacgccaggccaccaggagaataacaacttctgctccgtcaacatcaacattggcccaggcgactgcgagtggttcgcggtgcacgagcactactgggagaccatcagcgctttctgtgatcggcacggcgtggactacttgacgggttcctggtggccaatcctggatgatctctatgcatccaatattcctgtgtaccgcttcgtgcagcgacccggagacctcgtgtggattaatgcggggactgtgcactgggtgcaggccaccggctggtgcaacaacattgcctggaacgtggggcccctcaccgcctatcagtaccagctggccctggaacgatacgagtggaatgaggtgaagaacgtcaaatccatcgtgcccatgattcacgtgtcatggaacgtggctcgcacggtcaaaatcagcgaccccgacttgttcaagatgatcaagttctgcctgctgcagtccatgaagcactgccaggtgcaacgcgagagcctggtgcgggcagggaagaaaatcgcttaccagggccgtgtcaaggacgagccagcctactactgcaacgagtgcgatgtggaggtgtttaacatcctgttcgtgacaagtgagaatggcagccgcaacacgtacctggtacactgcgagggctgtgcccggcgccgcagcgcaggcctgcagggcgtggtggtgctggagcagtaccgcactgaggagctggctcaggcctacgacgccttcacgctggccccagccagcacgtcgcgatgaggccggacgccccgcccgcctgcctgcccgcgcaaggcgccgcggggccaccagcacatgcctgggctggacctaggtcccgcctgtggccgagaagggggtcgggcccagcccttccaccccattggcagctcccctcacttaatttattaagaaaaactttttttttttttttagcaaatatgaggaaaaaaggaaaaaaaatgggagacgggggagggggctggcagcccctcgcccaccagcgcctcccctcaccgactttggcctttttagcaacagacacaaggaccaggctccggcggcggcgggggtcacatacgggttccctcaccctgccagccgcccgcccgcccggcgcagatgcacgcggctcgtgtatgtacatagacgttacggcagccgaggtttttaatgagattctttctatgggctttacccctcccccggaacctccttttttacttccaatgctagctgtgacccctgtacatgtctctttattcacttggttatgatttgtattttttgttcttttcttgtttttttgtttttaatttataacagtcccactcacctctatttattcatttttgggaaaacccgacctcccacacccccaagccatcctgcccgcccctccagggaccgcccgtcgccgggctctccccgcgccccagtgtgtgtccgggcccggcccgaccgtctccacccgtccgcccgcggctccagccgggttctcatggtgctcaaacccgctcccctcccctacgtcctgcactttctcggaccagtccccccactcccgacccgaccccagccccacctgagggtgagcaactcctgtactgtaggggaagaagtgggaactgaaatggtattttgtaaaaaaaataaataaaataaaaaaattaaaggttttaaagaaagaactatgaggaaaaggaaccccgtccttcccagccccggccaactttaaaaaacacagaccttcacccccacccccttttctttttaagtgtgaaacaacccagggccagggcctcactggggcagggacaccccggggtgagtttctctggggctttattttcgttttgttggttgttttttctccacgctggggctgcggaggggtggggggtttacagtcccgcaccctcgcactgcactgtctctctgccccaggggcagaggggtcttcccaaccctacccctattttcggtgatttttgtgtgagaatattaatattaaaaataaacggagaaaaaaaa

SEQ ID NO: 1316 - DNA, 6701 bp, Homo sapiens
atgccagccccgtagcactgcccaccccacccactgtggtctgttgtaccccactgctggggtggtggttccaatgagacagggcacaccaaactccatctggctgttactgaggcggagacacgggtgatgattggctttctggggagagaggaagtcctgtgattggccagatctctggagcttgccgacgcggtgtgaggacgctcccacggaggccggaattggctgtgaaaggactgaggcagccatctgggggtagcgggcactcttatcagagcggctggagccggaccatcgtcccagagagctggggcagggggccgtgcccaatctccagggctcctggggccactgctgacctggctggatgcatcgggcagtggaccctccaggggcccgcgctgcacgggaagcctttgcccttgggggcctgagctgtgctggggcctggagctcctgcccgcctcatccccctcctcgtagcgcatggctgcctggaggcagatgctcagccagcattgggcagcccccgcttcctgctcccctacccccttcacatggcagtagttctgggcaccccagcaaaccatattatgctccaggggcgcccactccaagacccctccatgggaagctggaatccctgcatggctgtgtgcaggcattgctccgggagccagcccagccagggctttgggaacagcttgggcaactgtacgagtcagagcacgatagtgaggaggccacacgctgctaccacagcgcccttcgatacggaggaagcttcgctgagctggggccccgcattggccgactgcagcaggcccagctctggaactttcatactggctcctgccagcaccgagccaaggtcctgcccccactggagcaagtgtggaacttgctacaccttgagcacaaacggaactatggagccaagcggggaggtcccccggtgaagcgagctgctgaacccccagtggtgcagcctgtgcctcctgcagcactctcaggcccctcaggggaggagggcctcagccctggaggcaagcgaaggagaggctgcaactctgaacagactggccttcccccagggctgccactgcctccaccaccattaccaccaccaccaccaccaccaccaccaccaccaccaccaccacccctgcctggcctggctaccagccccccatttcagctaaccaagccagggctgtggagtaccctgcatggagatgcctggggcccagagcgcaagggttcagcacccccagagcgccaggagcagcggcactcgctgcctcacccatatccatacccagctccagcgtacaccgcgcacccccctggccaccggctggtcccggctgctcccccaggcccaggcccccgccccccaggagcagagagccatggctgcctgcctgccacccgtccccccggaagtgaccttagagagagcagagttcagaggtcgcggatggactccagcgtttcaccagcagcaaccaccgcctgcgtgccttacgccccttcccggccccctggcctccccggcaccaccaccagcagcagcagtagcagcagcagcaacactggtctccggggcgtggagccgaacccaggcattcccggcgctgaccattaccaaactcccgcgctggaggtctctcaccatggccgcctggggccctcggcacacagcagtcggaaaccgttcttgggggctcccgctgccactccccacctatccctgccacctggaccttcctcaccccctccacccccctgtccccgcctcttacgccccccaccaccccctgcctggttgaagggtccggcctgccgggcagcccgagaggatggagagatcttagaagagctcttctttgggactgagggacccccccgccctgccccaccacccctcccccatcgcgagggcttcttggggcctccggcctcccgcttttctgtgggcactcaggattctcacacccctcccactcccccaaccccaaccaccagcagtagcaacagcaacagtggcagccacagcagcagccctgctgggcctgtgtcctttcccccaccaccctatctggccagaagtatagacccccttccccggcctcccagcccagcacagaacccccaggacccacctcttgtacccctgactcttgccctgcctccagcccctccttcctcctgccaccaaaatacctcaggaagcttcaggcgcccggagagcccccggcccagggtctccttcccaaagacccccgaggtggggccggggccacccccaggccccctgagtaaagccccccagcctgtgccgcccggggttggggagctgcctgcccgaggccctcgactctttgattttccccccactccgctggaggaccagtttgaggagccagccgaattcaagatcctacctgatgggctggccaacatcatgaagatgctggacgaatccattcgcaaggaagaggaacagcaacaacacgaagcaggcgtggccccccaacccccgctgaaggagccctttgcatctctgcagtctcctttccccaccgacacagcccccaccactactgctcctgctgtcgccgtcaccaccaccaccaccaccaccaccaccaccacggccacccaggaagaggagaagaagccaccaccagccctaccaccaccaccgcctctagccaagttccctccaccctctcagccacagccaccaccacccccaccccccagcccggccagcctgctcaaatccttggcctccgtgctggagggacaaaagtactgttatcgggggactggagcagctgtttccacccggcctgggcccttgcccaccactcagtattcccctggccccccatcaggtgctaccgccctgccgcccacctcagcggcccctagcgcccagggctccccacagccctctgcttcctcgtcatctcagttctctacctcaggcgggccctgggcccgggagcgcagggcgggcgaagagccagtcccgggccccatgacccccacccaaccgcccccacccctatctctgccccctgctcgctctgagtctgaggtgctagaagagatcagccgggcttgcgagacccttgtggagcgggtgggccggagtgccactgacccagccgacccagtggacacagcagagccagcggacagtgggactgagcgactgctgccccccgcacaggccaaggaggaggctggcggggtggcggcagtgtcaggcagctgtaagcggcgacagaaggagcatcagaaggagcatcggcggcacaggcgggcctgtaaggacagtgtgggtcgtcggccccgtgagggcagggcaaaggccaaggccaaggtccccaaagaaaagagccgccgggtgctggggaacctggacctgcagagcgaggagatccagggtcgtgagaagtcccggcccgatcttggcggggcctccaaggccaagccacccacagctccagcccctccatcagctcctgcaccttctgcccagcccacacccccgtcagcctctgtccctggaaagaaggctcgggaggaagccccagggccaccgggtgtcagccgggccgacatgctgaagctgcgctcacttagtgaggggccccccaaggagctgaagatccggctcatcaaggtagagagtggtgacaaggagacctttatcgcctctgaggtggaagagcggcggctgcgcatggcagacctcaccatcagccactgtgctgctgacgtcgtgcgcgccagcaggaatgccaaggtgaaagggaagtttcgagagtcctacctttcccctgcccagtctgtgaaaccgaagatcaacactgaggagaagctgccccgggaaaaactcaacccccctacacccagcatctatctggagagcaaacgggatgccttctcacctgtcctgctgcagttctgtacagaccctcgaaatcccatcacagtgatccggggcctggcgggctccctgcggctcaacttgggcctcttctccaccaagaccctggtggaagcgagtggcgaacacaccgtggaagttcgcacccaggtgcagcagccctcagatgagaactgggatctgacaggcactcggcagatctggccttgtgagagctcccgttcccacaccaccattgccaagtacgcacagtaccaggcctcatccttccaggagtctctgcaggaggagaaggagagtgaggatgaggagtcagaggagccagacagcaccactggaacccctcctagcagcgcaccagacccgaagaaccatcacatcatcaagtttggcaccaacatcgacttgtctgatgctaagcggtggaagccccagctgcaggagctgctgaagctgcccgccttcatgcgggtaacatccacgggcaacatgctgagccacgtgggccacaccatcctgggcatgaacacggtgcagctgtacatgaaggtgcccggcagccgaacgccaggccaccaggagaataacaacttctgctccgtcaacatcaacattggcccaggcgactgcgagtggttcgcggtgcacgagcactactgggagaccatcagcgctttctgtgatcggcacggcgtggactacttgacgggttcctggtggccaatcctggatgatctctatgcatccaatattcctgtgtaccgcttcgtgcagcgacccggagacctcgtgtggattaatgcggggactgtgcactgggtgcaggccaccggctggtgcaacaacattgcctggaacgtggggcccctcaccgcctatcagtaccagctggccctggaacgatacgagtggaatgaggtgaagaacgtcaaatccatcgtgcccatgattcacgtgtcatggaacgtggctcgcacggtcaaaatcagcgaccccgacttgttcaagatgatcaagttctgcctgctgcagtccatgaagcactgccaggtgcaacgcgagagcctggtgcgggcagggaagaaaatcgcttaccagggccgtgtcaaggacgagccagcctactactgcaacgagtgcgatgtggaggtgtttaacatcctgttcgtgacaagtgagaatggcagccgcaacacgtacctggtacactgcgagggctgtgcccggcgccgcagcgcaggcctgcagggcgtggtggtgctggagcagtaccgcactgaggagctggctcaggcctacgacgccttcacgctggtgagggcccggcgggcgcgcgggcagcggaggagggcactggggcaggctgcagggacgggcttcgggagcccggccgcgcctttccctgagcccccgccggctttctccccccaggccccagccagcacgtcgcgatgaggccggacgccccgcccgcctgcctgcccgcgcaaggcgccgcggggccaccagcacatgcctgggctggacctaggtcccgcctgtggccgagaagggggtcgggcccagcccttccaccccattggcagctcccctcacttaatttattaagaaaaactttttttttttttttagcaaatatgaggaaaaaaggaaaaaaaatgggagacgggggagggggctggcagcccctcgcccaccagcgcctcccctcaccgactttggcctttttagcaacagacacaaggaccaggctccggcggcggcgggggtcacatacgggttccctcaccctgccagccgcccgcccgcccggcgcagatgcacgcggctcgtgtatgtacatagacgttacggcagccgaggtttttaatgagattctttctatgggctttacccctcccccggaacctccttttttacttccaatgctagctgtgacccctgtacatgtctctttattcacttggttatgatttgtattttttgttcttttcttgtttttttgtttttaatttataacagtcccactcacctctatttattcatttttgggaaaacccgacctcccacacccccaagccatcctgcccgcccctccagggaccgcccgtcgccgggctctccccgcgccccagtgtgtgtccgggcccggcccgaccgtctccacccgtccgcccgcggctccagccgggttctcatggtgctcaaacccgctcccctcccctacgtcctgcactttctcggaccagtccccccactcccgacccgaccccagccccacctgagggtgagcaactcctgtactgtaggggaagaagtgggaactgaaatggtattttgtaaaaaaaaataaataaaataaaaaaattaaaggttttaaagaaagaactatgaggaaaaggaaccccgtccttcccagccccggccaactttaaaaaacacagaccttcacccccacccccttttctttttaagtgtgaaacaacccagggccagggcctcactggggcagggacaccccggggtgagtttctctggggctttattttcgttttgttggttgttttttctccacgctggggctgcggaggggtggggggtttacagtcccgcaccctcgcactgcactgtctctctgccccaggggcagaggggtcttcccaaccctacccctattttcggtgatttttgtgtgagaatattaatattaaaaataaacggagaaaaaaaa

SEQ ID NO: 1317 - DNA, 4757 bp, Homo sapiens
ctggttgaagggtccggcctgccgggcagcccgagaggatggagagatcttagaagagctcttctttgggactgagggacccccccgccctgccccaccacccctcccccatcgcgagggcttcttggggcctccggcctcccgcttttctgtgggcactcaggattctcacacccctcccactcccccaaccccaaccaccagcagtagcaacagcaacagtggcagccacagcagcagccctgctgggcctgtgtcctttcccccaccaccctatctggccagaagtatagacccccttccccggcctcccagcccagcacagaacccccaggacccacctcttgtacccctgactcttgccctgcctccagcccctccttcctcctgccaccaaaatacctcaggaagcttcaggcgcccggagagcccccggcccagggtctccttcccaaagacccccgaggtggggccggggccacccccaggccccctgagtaaagccccccagcctgtgccgcccggggttggggagctgcctgcccgaggccctcgactctttgattttccccccactccgctggaggaccagtttgaggagccagccgaattcaagatcctacctgatgggctggccaacatcatgaagatgctggacgaatccattcgcaaggaagaggaacagcaacaacacgaagcaggcgtggccccccaacccccgctgaaggagccctttgcatctctgcagtctcctttccccaccgacacagcccccaccactactgctcctgctgtcgccgtcaccaccaccaccaccaccaccaccaccaccacggccacccaggaagaggagaagaagccaccaccagccctaccaccaccaccgcctctagccaagttccctccaccctctcagccacagccaccaccacccccaccccccagcccggccagcctgctcaaatccttggcctccgtgctggagggacaaaagtactgttatcgggggactggagcagctgtttccacccggcctgggcccttgcccaccactcagtattcccctggccccccatcaggtgctaccgccctgccgcccacctcagcggcccctagcgcccagggctccccacagccctctgcttcctcgtcatctcagttctctacctcaggcgggccctgggcccgggagcgcagggcgggcgaagagccagtcccgggccccatgacccccacccaaccgcccccacccctatctctgccccctgctcgctctgagtctgaggtgctagaagagatcagccgggcttgcgagacccttgtggagcgggtgggccggagtgccactgacccagccgacccagtggacacagcagagccagcggacagtgggactgagcgactgctgccccccgcacaggccaaggaggaggctggcggggtggcggcagtgtcaggcagctgtaagcggcgacagaaggagcatcagaaggagcatcggcggcacaggcgggcctgtaaggacagtgtgggtcgtcggccccgtgagggcagggcaaaggccaaggccaaggtccccaaagaaaagagccgccgggtgctggggaacctggacctgcagagcgaggagatccagggtcgtgagaagtcccggcccgatcttggcggggcctccaaggccaagccacccacagctccagcccctccatcagctcctgcaccttctgcccagcccacacccccgtcagcctctgtccctggaaagaaggctcgggaggaagccccagggccaccgggtgtcagccgggccgacatgctgaagctgcgctcacttagtgaggggccccccaaggagctgaagatccggctcatcaaggtagagagtggtgacaaggagacctttatcgcctctgaggtggaagagcggcggctgcgcatggcagacctcaccatcagccactgtgctgctgacgtcgtgcgcgccagcaggaatgccaaggtgaaagggaagtttcgagagtcctacctttcccctgcccagtctgtgaaaccgaagatcaacactgaggagaagctgccccgggaaaaactcaacccccctacacccagcatctatctggagagcaaacgggatgccttctcacctgtcctgctgcagttctgtacagaccctcgaaatcccatcacagtgatccggggcctggcgggctccctgcggctcaacttgggcctcttctccaccaagaccctggtggaagcgagtggcgaacacaccgtggaagttcgcacccaggtgcagcagccctcagatgagaactgggatctgacaggcactcggcagatctggccttgtgagagctcccgttcccacaccaccattgccaagtacgcacagtaccaggcctcatccttccaggagtctctgcaggaggagaaggagagtgaggatgaggagtcagaggagccagacagcaccactggaacccctcctagcagcgcaccagacccgaagaaccatcacatcatcaagtttggcaccaacatcgacttgtctgatgctaagcggtggaagccccagctgcaggagctgctgaagctgcccgccttcatgcgggtaacatccacgggcaacatgctgagccacgtgggccacaccatcctgggcatgaacacggtgcagctgtacatgaaggtgcccggcagccgaacgccaggccaccaggagaataacaacttctgctccgtcaacatcaacattggcccaggcgactgcgagtggttcgcggtgcacgagcactactgggagaccatcagcgctttctgtgatcggcacggcgtggactacttgacgggttcctggtggccaatcctggatgatctctatgcatccaatattcctgtgtaccgcttcgtgcagcgacccggagacctcgtgtggattaatgcggggactgtgcactgggtgcaggccaccggctggtgcaacaacattgcctggaacgtggggcccctcaccgcctatcagtaccagctggccctggaacgatacgagtggaatgaggtgaagaacgtcaaatccatcgtgcccatgattcacgtgtcatggaacgtggctcgcacggtcaaaatcagcgaccccgacttgttcaagatgatcaagttctgcctgctgcagtccatgaagcactgccaggtgcaacgcgagagcctggtgcgggcagggaagaaaatcgcttaccagggccgtgtcaaggacgagccagcctactactgcaacgagtgcgatgtggaggtgtttaacatcctgttcgtgacaagtgagaatggcagccgcaacacgtacctggtacactgcgagggctgtgcccggcgccgcagcgcaggcctgcagggcgtggtggtgctggagcagtaccgcactgaggagctggctcaggcctacgacgccttcacgctggccccagccagcacgtcgcgatgaggccggacgccccgcccgcctgcctgcccgcgcaaggcgccgcggggccaccagcacatgcctgggctggacctaggtcccgcctgtggccgagaagggggtcgggcccagcccttccaccccattggcagctcccctcacttaatttattaagaaaaactttttttttttttttagcaaatatgaggaaaaaaggaaaaaaaatgggagacgggggagggggctggcagcccctcgcccaccagcgcctcccctcaccgactttggcctttttagcaacagacacaaggaccaggctccggcggcggcgggggtcacatacgggttccctcaccctgccagccgcccgcccgcccggcgcagatgcacgcggctcgtgtatgtacatagacgttacggcagccgaggtttttaatgagattctttctatgggctttacccctcccccggaacctccttttttacttccaatgctagctgtgacccctgtacatgtctctttattcacttggttatgatttgtattttttgttcttttcttgtttttttgtttttaatttataacagtcccactcacctctatttattcatttttgggaaaacccgacctcccacacccccaagccatcctgcccgcccctccagggaccgcccgtcgccgggctctccccgcgccccagtgtgtgtccgggcccggcccgaccgtctccacccgtccgcccgcggctccagccgggttctcatggtgctcaaacccgctcccctcccctacgtcctgcactttctcggaccagtccccccactcccgacccgaccccagccccacctgagggtgagcaactcctgtactgtaggggaagaagtgggaactgaaatggtattttgtaaaaaaaaataaataaaataaaaaaattaaaggttttaaagaaagaactatgaggaaaaggaaccccgtccttcccagccccggccaactttaaaaaacacagaccttcacccccacccccttttctttttaagtgtgaaacaacccagggccagggcctcactggggcagggacaccccggggtgagtttctctggggctttattttcgttttgttggttgttttttctccacgctggggctgcggaggggtggggggtttacagtcccgcaccctcgcactgcactgtctctctgccccaggggcagaggggtcttcccaaccctacccctattttcggtgatttttgtgtgagaatattaatattaaaaataaacggagaaaaaaaa

SEQ ID NO: 1318 - DNA, 1439 bp, Homo sapiens
ggctcgcctcggcgtgcagtgcgcgtgcgtggagctgggagctaggtcctcggagtgggccggagatggcggcggccgacggggctttgccggaggcggcggctttagagcaacccgcggagctgcctgcctcggtgcgggcgagtatcgagcggaagcggcagcgggcactgatgctgcgccaggcccggctggctgcccggccctactcggcgacggcggctgcggctactggaggcatggctaatgtaaaagcagccccaaagataattgacacaggaggaggcttcattttagaagaggaagaagaagaagaacagaaaattggaaaagttgttcatcaaccaggacctgttatggaatttgattatgtaatatgcgaagaatgtgggaaagaatttatggattcttatcttatgaaccactttgatttgccaacttgtgataactgcagagatgctgatgataaacacaagcttataaccaaaacagaggcaaaacaagaatatcttctgaaagactgtgatttagaaaaaagagagccacctcttaaatttattgtgaagaagaatccacatcattcacaatggggtgatatgaaactctacttaaagttacagattgtgaagaggtctcttgaagtttggggtagtcaagaagcattagaagaagcaaaggaagtccgacaggaaaaccgagaaaaaatgaaacagaagaaatttgataaaaaagtaaaagaattgcggcgagcagtaagaagcagcgtgtggaaaagggagacgattgttcatcaacatgagtatggaccagaagaaaacctagaagatgacatgtaccgtaagacttgtactatgtgtggccatgaactgacatatgaaaaaatgtgattttttagttcagtgacctgttttatagaattttatatttaaataaaggaaatttagattggtccttttcaaaattcaaaaaaaaaagcaacatcttcatagatgaatgaaacccttgtataagtaatacttcagtaataattatgtatgttatggcttaaaagcaagtttcagtgaaggtcacctggcctggttgtgtgcacaatgtcatgtctgtgattgccttcttacaacagagatgggagctgagtgctagagtaggtgcagaagtggtaggtcagctacaaatttgaggacaagataccaaggcaaaccctagattggggtagagggaaaagggttcaacaaaggctgaactggattcttaaccaagaaacaaataatagcaatggtggtgcaccactgtaccccaggttctagtcatgtgttttttaggacgatttctgtctccacgatggtggaaacagtggggaactactgctggaaaaagccctaatagcagaaataaacattgagttgtacgagtctgaaaaaaaaaaaaaaaaaaaaaaa

SEQ ID NO: 1319 - DNA, 2136 bp, Homo sapiens
gtgtgtggaggggaccctgtggttagcagcagctatcgcagcgtcggatgttcagagcagcagaagccggcgtcgtcggatgttgtgttgcccgccaccatgagctacacaggctttgtccagggatctgaaaccactttgcagtcgacatactcggataccagcgctcagcccacctgtgattatggatatggaacttggaactctgggacaaatagaggctacgagggctatggctatggctatggctatggccaggataacaccaccaactatgggtatggtatggccacttcacactcttgggaaatgcctagctctgacacaaatgcaaacactagtgcctcgggtagcgccagtgccgattccgttttatccagaattaaccagcgcttagatatggtgccgcatttggagacagacatgatgcaaggaggcgtgtacggctcaggtggagaaaggtatgactcttatgagtcctgcgactcgagggccgtcctgagtgagcgcgacctgtaccggtcaggctatgactacagcgagcttgaccctgagatggaaatggcctatgagggccaatacgatgcctaccgcgaccagttccgcatgcgtggcaacgacaccttcggtcccagggcacagggctgggcccgggatgcccggagcggccggccaatggcctcaggctatgggcgcatgtgggaagaccccatgggggcccggggccagtgcatgtctggtgcctctcggctgccctccctcttctcccagaacatcatccccgagtacggcatgttccagggcatgcgaggtgggggcgccttcccgggcggctcccgctttggtttcgggtttggcaatggcatgaagcagatgaggcggacctggaagacctggaccacagccgacttccgaaccaagaagaagaagagaaagcagggcggcagtcctgatgagccagatagcaaagccacccgcacggactgctcggacaacagcgactcagacaatgatgagggcaccgagggggaagccacagagggccttgaaggcaccgaggctgtggagaagggctccagagtggacggagaggatgaggagggaaaagaggatgggagagaagaaggcaaagaggatccagagaagggggccctaaccacccaggatgaaaatggccagaccaagcgcaagttgcaggcaggcaagaagagtcaggacaagcagaaaaagcggcagcgagaccgcatggtggaaaggatccagtttgtgtgttctctgtgcaaataccggaccttctatgaggacgagatggccagccatcttgacagcaagttccacaaggaacactttaagtacgtaggcaccaagctccctaagcagacggctgactttctgcaggagtacgtcactaacaagaccaagaagacagaggagctccgaaaaaccgtggaggaccttgatggcctcatccaccaaatctacagagaccaggatctgacccaggaaattgccatggagcattttgtgaagaaggtggaggcagcccattgtgcagcctgcgacctcttcattcccatgcagtttgggatcatccagaagcatctgaagaccatggatcacaaccggaaccgcaggctcatgatggagcagtccaagaagtcctccctcatggtggcccgcagtattctcaacaacaagctcatcagcaagaagctggagcgctacctgaagggcgagaaccctttcaccgacagccccgaggaggagaaggagcaggaggaggctgagggcggtgccctggacgagggggcgcagggcgaagcggcagggatctcggagggcgcagagggcgtgccggcgcagcctcccgtgcccccagagccagcccccggggccgtgtcgccgccaccgccgccgcccccagaggaggaggaggagggcgccgtgcccttgctgggaggggcgctgcaacgccagatccgcggcatcccgggcctcgacgtggaggacgacgaggagggcggcgggggcgccccgtgacccgagctcggggcgggcggagcccgcgtggccgaagctggaaaccaaacctaataaagttttcccatcccaccaaaaaaaaaaaaaaaaaaaaaa

SEQ ID NO: 1320 - DNA, 1685 bp, Homo sapiens
ggcgtgcaagtatccgctgcggtgttctggtgctagagtggagaggctggcaaagaagaaggcacacgcatggtgagaatccggcctgagccgaagcggagtttgctatggacagcaaccatcaaagtaattacaaactcagtaaaactgagaagaagttcttaaggaaacagattaaagccaagcatactttgctgagacatgaaggcattgagacagtatcctatgccactcagagcctggttgttgccaatggtggtttgggtaatggtgtgagtcggaaccagctgctcccggttttagagaaatgtggactggtggatgctctcttaatgccacctaacaagccgtactcatttgcaagatacagaactacagaagaatctaagagagcctatgttaccctcaatggaaaagaagtagtggatgatttaggacaaaagatcactctgtatttgaattttgtggaaaaagtgcagtggaaggagttgaggcctcaagccttaccaccaggactcatggtagtagaagaaataatttcttctgaggaggagaaaatgcttttggaaagtgttgattggacagaagatacagacaatcaaaactctcaaaaatccttaaaacacagaagagtaaagcattttggttatgagttccactatgagaacaacaatgtagataaagataagccattatctgggggtcttcctgacatttgtgaaagctttttggagaaatggttgaggaaaggttacattaaacataaacctgatcaaatgaccataaatcagtatgaacctgggcaagattgtcatggattttaagcacccagatggcattgcagtgccagttatgttgcctcgtcggagtttgctggtgatgacaggagaatctagatacctttggacccatggaatcacgtgcagaaaatttgatactgttcaagcatctgagagtcttaaaagtggaattatcaccagtgatgttggagacttaactttaagcaagaggggactacgaacatcatttacatttaggaaagtgaggcaaacaccttgtaactgtagagcgtagagtggcagctctccaagaaattgttcgactcctgagaccaggtgggaaggcactcatttatgtctgggcaatggaacaagaatataataagcagaagtccaagtatcttagaggaaacagaaatagccaaggaaagaaagaggagatgaacagtgatacctcagtgcagaggtcacttgtggagcaaatgcgtgacatgggcagtcgagactcggcatcttctgtcccccgcattaatgactctcaggaaggaggatgtaattcaaggcaagtttctaattccaagctgcctgttcatgttaacaggacttctttttattctcaagatgtactggttccctggcaccttaagggaaatcctgataaaggcaaacctgttgagccatttggtcccataggatcccaggacccaagtcctgtgtttcatcgttactaccatgtgttccgtgagggagaactggaaggtgcctgcaggactgtgagtgatgtcagaattctgcaaagctactacgatcaaggaaactggtgtgtgattcttcaaaaggcctgattatttacctgaacacatcatatataaagaagaaatgctcacttaaaaaaaaaaaaaaaaa

SEQ ID NO: 1321 - DNA, 1522 bp, Homo sapiens
agtcgctatgcgtgtcttgtgggtgagggagggcagaaagggagagtgctgggcgggcttagtcggagattgaggactgggaatccgcttccgggagggcactgtctagtgcacaggcaacctggccttcgcctcctagcccgagaagccgaatctccctaatccctgtgacctgtgtcacctctgcatcgcgaggagggggataagtggggagaagtctggtgtcagatgggatggcgccggaagagggtgccacagcggggacggaaggcgcccccaccccaactccacgggaatataaacaatttgtattttccgatcaggtggcgggacaggcttcattgggacagccctaacccagctgctgaatgccagaggcacgaagtgacgttggtctcccgaaagcccgggcccggccggatcacgtgggatgagctcgctgcatcggggctgccgagctgcgatgccgccgtcaacctggccggagagaacatcctcaaccctctccgaagatggaatgaaaccttccaaaaagaggttctcggcagccgcctagagaccacccaattgctggctaaagccatcaccaaagccccacaaccccccaaggcctgggtcttagtcacaggtgtagcttactaccagcccagtctgactgcggagtatgatgaagacagcccaggaggggactttgactttttctccaacctcgtaaccaaatgggaagctgcagccaggcttcctggagattctacacgccaggtggtggtgcgctcaggggttgtgctgggccgtgggggtggtgccatgggccacatgctgctgccctttcgcctgggcctggggggccccatcggctcaggccaccaattcttcccctggatacacatcggggacctggcaggaatcctgacccatgcccttgaagcaaaccacgtgcacggggtcctgaatggagtggctccatcctccgccactaatgctgagtttgcccagaccttgggtgctgccctgggccgccgagccttcatccctctccccagcgctgtggtgcaagctgtctttgggcgacagcgtgccatcatgctgctggagggccagaaggtgatcccacagcgaacactggccactggctaccagtattccttcccagagctaggggctgccttaaaggaaattgtagcctaagtaggtcgtggcaagggcctgaggcctgttcctcacaggcttccaggttaggcactgtgaataggctcagctcctctagagagctgaagccatctggttcttagattcctctcccagtcctctttcccattgttctgttgctccaccttattgtctcaaggccgtaatctcatcaggttgggacattaatcttttcaactccttgtaagatttcccagtttggtttctctacatgtcctgcagctgccccacttctcctttacgctgtgtagagaatgctctgcagtttaggcaataaaaataaattgtctcactaaaaaaaaaaaaaaaaaaa

SEQ ID NO: 1322 - DNA, 7207 bp, Homo sapiens
ggccgcgtcgaccatgaaaaagcggcggcggcgggagagaggaggaggcggcggcggggcagtgaaactacggtagctgccccctgagctggtggtgtggctttgtggggagggcgtagttcctaatcccctttccgggcagccgccggggctcggggctgtgagcggccgtgaggctgcctccccgggccccctgcctccgccatgttccgcagggcacgccttagcgtgaagccgaatgtcaggcctggtgtaggcgccaggggctccacagcttccaatccccagcgtggacgggagtctcccaggccgccggagcctgccacggactctgcttccaagcccgcggagcccacagatgtgcccacagtcgatttcggtggagcggagccccaagaaaaggctcctaggagcagtactgaaaagactggtggtgacaatgatgttgaagaatccagtagatcttcctctactgtttcacagagaagaaagcgaatatcaagtacttctagcctggttaagtctagtgtcagtgttccttcagaatctcatcccttatctacaattaatcaagaggctccacagccaactgccacttcaacaaaagagaaacagccatgctcagacagataccgaatatacaaagcccagaaactgagggaaatgttaaaagaagaattgagaaaagagaagaaacaatggaaaaacaaatatgctataaatgaaagtcagaggccaccagatcgttcaaaaatgactatgagagacttcatatattatctaccagataataatccaatgacttcttcactggaacaagaaaagaaaactgaaaagccatcgactccagtccagacaagagagcaagaaggtaagagtactcctaatgctgaagataatgaaatggaagaagagacagatgatgggccattactggttcctcgagtaaaagtggcagaagatggttccattattttggatgaagaaagtttaactgtagaagttttaagaacaaaaggcccttgtgttgttgaagaaaatgaccccatatttgagcgcggttctacaactacatactccagctttaggaaaaactattactctaaaccatggtcaaataaagaaacagatatgttttttttagccatcagcatggtaggaactgacttttctatgatcggacaactttttcctcacagagcaaggatagaaattaagaataaatttaaacgggaagagaaaacaaatggatggagaatagacaaagcattccaggaaaagcgcccttttgacttcgatttttttgctcatttgcttcagaaagttcttgctgaagaagagaaaagaaaacaaaaatctgttaaaaatcacagtttaaaggagaagaaatccaccaaaccacggaaaaatgtaaaagtgaaaaaagttgcctgtgaaggagtgaataatgatccagatgagtctatgagttctagaatttcagacacggaaagatctcagaaggatgctcagacagttgaagaagagtctctgaccttatcaagggaggatgcagagcaggttgcattagaagtagacctaaatcaaaagaaaagaaggaggaagaagcaagatggagctaatgaactgggagtaaacaatcttttagaaaatgccactgttcaggcgggtccttctaaaggagaaaaacacaagaataaatgtcaggctataaggcctgagctaaaggaaggtgaatgcagtaaggagcagatgctttcctgcacacaaaacatagatggcattgtgggttttgcctccactgaaaaagttgagaaaagaactgaccccatcctttcattaagtaatcaacaagatgccacatcagtagcaactgagtcttcagaatcaagcacttcagatttgccttcattcgaagttggaattagagcattgtgtgaggtgaataatgctgagggtagttgtatagaagaaagaaatgttgacctaaaaaataattcactggaaattgatcaaacagaaaatgttaaaccaatgttgagaggtcgcttccaaagacctaaacccaatttgtcaagggctgggaagaaatcagttctttcacaaggcaaaacagagtcagagagcaagaattcacattcaaaaacttcagttgaaaagaaccacgtggaaaaagataaaatgaatacattggacattttgagaatggagactacagagagagagaatccagaagctgaaactgtatctgttttgggtgaaaaaaattgtctgcaggaagggagtcaactaaaggctttaagacctgtacaagtgaggggccgattgcaaaagccaaagccaaatgcaggtaaagctgctgaaagaaaagaaattctcatatcacaggaagaaattggggccaatgtagagaagaatgaaaatgaatcctgtgctgatagagatactcctcaacacatggaagatcaatcgcgtaaagattttgaagaggaagatgtcatattacagcctgagaaaaatgattcttttcaaaatgtgcagccagatgagcccaaggttcttaatgaatgtctaagcgttcaagagaataataaggcaaataaacttaaccaagtcccaattctaaggactcgatttcagaaaccaaagccaaatataggaagaggaactggaaggagagaaatttcctcaaaggaagaggtactagagaagattcttgtctctggggaaatggcggcagcattgagagaaactgtaagactagacacctcaccaaaggagatggtaccagcagagattaatactaaagaaatgcagtcagatttaaaagaaactggaagaagagccatttctcccagggagaagattctagatgtgattgatgacaccatagaaatggagacaggtctgaaagcaatgggaagagagatttgtctaagggagaagacgccagaggtgattgatgccactgaggaaatagacaaagatttggaagaagctggaagaagagaaatatccccacagaaaaatggcccagaggaggttaagcctctaggtgaagtggagacagatttgaaagcaactggaaatgagagttccccaagggagaagacaccagagggtactgatgccactgaggaaatagacaaaaatttggaagaaactggaagaagaaaaatatccccaagggaaaatggcccagaggaggtcaagcctgtagatgaaatggagacagatttgaacgcaactggaagagagagttctccaagggagaagacaccagaggtgattgatgctactgaggaaatagatttggaagaaactgaaagagaagtatccccacaggaaaatggactagaggaggtcaagcctctaggtgaaatggagacggatttgaaagcaactggaagagacagtttcccaagggggaagacaccagaggtgattgatgccattgaggaaatagagatagatttggaagaaactgaaagagaaatatccccacaggaaaatggcctagaggaggttaagcctctaggtgaaatgcaaacagatttgaaagcaaccggaagggagatttccccaagggagaagacaccagaggtgattgatgccactgaggaaatagacaaagatctggaagaaactggaagaagagaaatatccccagaggaaaatggcccagaggaggtcaagcctgtagatgaaatggagacagacttgaaaacaactggaagagagggttcctcaagggagaagacacgagaggtgattgatgctgctgaggtaatagagacagatttggaagaaactgaaagagaaatatcgccacaggaaaatggcccagaggaggtcaagcctgtaggtaaaatggagacagatttgaaagaaattagagaagaaatttcccaaagggaaaaggtgctagcagagttcagtgctataagggaaaaggagattgatttgaaagaaactggaaaaagagacattcccatcatggagaaagtatcaggaaagatggctgttgttgaagaaatggaggcagatttgaaagaaactggaaaagaaaattttagagagagaggatctgaagagatctgtgttactgaggaaaaggtggcagaattgaaacaaactggaaaaacagacatttctccaagggaaaacgagctagaggagaccagtacctcaagacaaactgacacacatttaatgcagagcggtagcaatgacttcagtgctatgccttcactagatattcagaacattagcagtgaagtactgtcgatgatgcatacacctgtagaagaaaaaagaaattctgaaaaagaagtatcaagtcacttcagtcatttcaagatttcttcacagactcatgaatctgataaaacagaagtccaggggattcaatctccagatgttccagagcagttttcagatattaatttaagcaaatctcttcctcaagaacagaagccacttgaaattaaaccagcaccttttgtgaggagccgattcaaaagaccaaaaccaaacttagcaagagcagctttgaagagagagactacagaatcagaaaaatatatatatgagaagaaatcagaaaccaagaaaatggagactattgtgatgcaagaaaataatgaacaaactgatactctcccttctcaacatgatgaagcttccctaatgatatcaagagaaaaagacacattaggtcacaggaatgaggaggctgtgatattgccatgtacacagactgaaaggaacctttcaccttcaaattcttgtgaacctaaagaggagtctcagtcagcaccagtccagaaaaatgactcagttgtttctgtggggactaataatgtaaacactttccagcaagaaatgaaggaaagtgttatccaaactgctcgacaagtaaggggccgacttcagagaccgagaccaaatataagaaagacaggacagaggcaaatagtagacaaaggtgaagccaaaggcataattaaggaaggaagaacgatattaccaaaagatgaaactgaaaagaaagtcttaactgtgtcaaattctcaaattgaaactgaaattgaagttccatcgtccgcagttccagaacacagaatgtatgaaaatcaaagtcaggtggttcttgtagaaaaccttcatgttaacaaaacaaatgaaacaatcagacatgaaaataaaccgtatgttcctagttcagcacaaatgacaagaaggaaattccaaaaggctaagccaaatttgggaagagcacacagtaagaaagaggaaccagttttagaaaaagtcacaacagatcagagcaaggaaggcaagccagaagatcatttgctgcagaaaggagcttccaacacccagctccttctaaaagaaaaagctgagcttctgacatctctggaggtttcagcaagaaaagattgtgtaggttccaaagagtctgctttggcaaaaatagatgcggaattagaagaagttggaccatcaagaagggttggagaggaaactgtaggagataattcaccatcttcagttgttgaagagcaatatctcaataaactaacaagctgtccacaaccgttaaacgaaacaagttactctaaaattgccctggatgggaaaacaactatctcttctacatctgagtatgagagaaatcgtggtgaaaggagaagtcataaaaagttcaaaccaaatgtcaccagaggtcgtggatcaaaacgagttcggggtaagacctctaagaaggaacctagagcttccaaggccatgctggtgactcttcgggcttcccaggaagaagatgatgatgctgacgattttgagtctgactatgaggaagaaagctatcatcttgctcccgaagaagtaaacaaagctccagtatttgtacctgttggtctcagatctcctgaacctgtttctgctcagattgaggaaacaatggaagagcttgaaataactgtgaatgtcccagatgtaggatgcatagctgttgttgaacatgagctaccaaacacagatgtgactactgaagaaatgaaacaagaagaaaatttgagtgtaccgtttgaaatgaccacaagtgaacatatccaagatgaaccaggtaccaatgatggaagcaccgaagctgcaataactttacttacaatgggagatctagtattgcagtcagagatcagtagtgaacagggtgatgtaggagtatgtatacttcctcatgttcattcaaaggataaaagccatattccttctagcctagataatgtaaatcacaaaattgttcatgaatgtcaggaactttcttcacctgtcattactacatctcctgcatcatttgaagaaaacaagattgtattggaggaacaaagttccagagaagaaataagtttaatggagaaagtaaaggagaatgctacaccaaccaggaatacaatttctaaagtgaccagtaatttgagaataagaagtaggcttgctaagcctaaaccaaatcttgagaagactttagggaccaacaggcttgatgattatcaggaagtttccagtttgtgtgtaaccaaaggggcagaaatggaaactcaaagagaaacagagaaaaatgcttccaaagcaacagaattggaaaataaaaaccttggaccagttacaacagcagagaataaggatcagagcaaattggcatgtgtacatggtatcaaagggaccagtatttcttcagaagtaaacctaactgaaagaaacgaaaatcaagaagagagctctcaggaggttcacatgttgtcagttgctccagttgcttcctctgagacagggccctgcacacttggtttggataggggtcttggtgaaaattctgttgaagagccccagataaaggactctaaaggagacagtgtgcttacacttcctgtgccagaggtaaaagaatgtacagtataataagggatagcaaggtgttttcctccatttaaaaaaaaaaaaggtataatttacatacaataaacttcacctcttttatcttcatttttctttatttcttcttttttttttggagacagtcttgttctgttgcccaggcaagagtgcagtggtatgatctcagctcactgcagcctctgccacccagattcaacagattctcctgcctcggcctgccgggtagctgggactacaggca

SEQ ID NO: 1323 - DNA, 1911 bp, Homo sapiens
ccctgcgcggctgctggaccgacgggcgcacccaggtaggggggcggctgagccgcgcagtgcggaccctcgcggggaactgcgccgccgccaccatgtctcaggaaggtgtggagctggagaagagcgtccggcgcctccgggagaagtttcatgggaaggtatcctccaagaaggcgggggctctgatgaggaaattcggcagcgaccacacgggagtggggcgctccatcgtgtacggggtaaagcaaaaagatggccaagaactaagtaacgatctggatgcccaggatccaccagaagatatgaagcaggaccgggacattcaggcagtggcgacctccctcctgccactgacagaagccaacctacgcatgtttcaacgtgcccaggacgaccttatccctgctgtggaccggcagtttgcctgctcctcctgcgaccacgtctggtggcgccgcgtgccccagcggaaggaggtatcccggtgccggaaatgccggaagcgctacgagccagtgccagctgacaagatgtggggcctggctgagttccactgcccgaagtgtcggcacaacttccggggctgggcacagatggggtccccgtccccctgctacgggtgcggcttccccgtgtatccaacacggatcctccccccgcgccgggaccgggacccggatcgccgcagcacccacactcactcctgctcagctgccgactgctacaaccggcgagagccccacgtgcctgggacatcctgtgctcaccccaagagccggaagcagaaccacctgcccaaagtgctccaccccagcaaccctcacattagcagtggccccactgtggccacctgcttgagccagggtggcctcctggaagacctggacaacctcatcctggaggacctgaaggaggaggaggaggaagaggaggaggtggaggacgaggagggcgggcccagggagtgacccctgccaggtgcagatacaaaccagacacggtctgtggctactttgtgttattataagatatgagctcaaaccgagatatgaatgaccttggggagccatctgaggccaagatattgacgggggggattcctgggtcccattttcagcgcccagggtcacagatccacagtgggaagttctgtgggacacattggcactgagccacaaagaaggtgtggccagaacaacttgggctcctgctgaccaatgtcctctagggcctaggggacagaggaacacagagtcacagcttcaggggccgaatgagcatggcggccttcctgagagaatatgccccaccacgaaactcagcccagtagacaccatcctggtagcggcttcggtagtggccgccgtggtgccacacaccgttgaggttggagtgggcacaggcatggtaccaccagcctccccgctggtacagggcacagttacctgaggggagagagagagtccatgtcctctcaccagaataaaagcctctacctgcacctcacagtgcaaggcttttgccaggcatcccctggcccctcccattcttattgaatacaagccctgatcttccatctcctcagcaaaaaaataggagccctggccccccaactttcttcagagtaatagccttaattccttccctatctccttaccaaagtacaagtcacatctttcccaccttttctgcaaactaggagtctaccgttcattcctttatcaaagaaaagtatctacttcctttctagaataagagtactagctctcaccctctgccctttacttgaacaggagtcttgattctttttttgcctcatcagagaaggaatctggactccccatccccccaccaggataaaagtcctgacctttgttctcttgacggaataaaagcttgcttatcctt

SEQ ID NO: 1324 - DNA, 6035 bp, Homo sapiens
ctccccaggcccaggcgagcgctggtgtggacgggaagctcccggcccggcgaactaactggagcacggagctgcagccggttgggccggtgtactttcccgctctggaaaggaagagaaatggaagtgagaaagttgagcatttcctggcagttcttgatagttctggttctgatcctgcaaattctgtctgcgttggattttgacccatacagagtcctaggggtcagccgaacagccagtcaggctgatattaaaaaggcttataagaagctcgcccgggaatggcatcctgacaaaaacaaagatcctggagcagaagacaagttcattcaaatcagtaaggcttacgagattctttcaaatgaagaaaagagatcaaattatgatcaatatggagacgctggagagaaccagggctaccagaagcagcaacagcagcgagagtatcgcttccgccatttccatgaaaatttttattttgatgaatccttttttcacttcccttttaattctgaacggcgggactcaattgacgaaaagtatttattgcacttttcacattatgtgaatgaagtggttccagatagcttcaagaaaccctacctcatcaagatcacctccgattggtgctttagctgcattcatatcgagcctgtgtggaaagaagtcattcaagaactggaagaattgggtgtaggaattggcgtggtccatgctgggtatgagagacgcctggcccatcacctaggggcacacagcacgccctctatcctaggaatcattaacgggaaaatctccttcttccacaatgcagttgtccgtgaaaatctgcgacaatttgtagaaagtcttcttccagggaacttggtggagaaagttacaaataaaaattacgtcagattcctctctggctggcagcaagagaataagcctcatgtccttctgtttgaccaaacgcccattgtgccactgttatacaagttgactgcctttgcatacaaagattatttatcatttggatatgtatatgtgggtttgagagggacggaagagatgacaaggcggtacaacatcaatatctacgcccctaccctcttggtctttaaagaacatataaacaggcctgccgatgttatccaggcccgaggtatgaagaagcaaatcattgacgacttcatcacccgaaacaaatatctattggcagccaggctcaccagccagaagttgttccatgaactctgccctgtgaaacggtcgcatcgacagaggaagtactgtgtggttttattgactgctgagactaccaagttgagcaaaccctttgaggctttcctgtcctttgccctggcaaacactcaagacacagtgagatttgtgcatgtctacagcaatcggcagcaggagtttgccgacaccttactaccagacagtgaggcgtttcaagggaaatcagcggtgtctattttagaaaggcgcaacacagcaggaagggtggtgtataaaaccctggaagacccttggattgggagtgagagtgacaaatttatcctcttgggctatctcgaccagctgcgtaaagatccagctcttctgtcctctgaagcagtgcttcctgacctgaccgatgaacttgcccctgtttttctccttcgatggttctactctgcttctgactacatctcagactgctgggatagcatttttcacaacaactggagggaaatgatgcccctgctgtccctgatcttctctgccctcttcatcctcttcggcactgtcatcgttcaggctttcagcgactctaatgatgagcgagagtcaagccctccagaaaaagaggaagcccaagagaagactgggaaaactgagccaagcttcaccaaagaaaacagcagcaagattcctaaaaaaggctttgtggaggtaactgaactcacagatgtaacatacaccagtaacttggtacgtctgaggccaggccacatgaatgtggtcctcatcctgtcgaattctaccaagaccagcctactacagaaatttgctttggaggtctacacatttactgggagcagctgcctacacttctccttcctgagtctagataaacacagagaatggctagaatacttactagaatttgctcaagatgcagctccaatcccaaaccaatatgataagcatttcatggagcgtgactacactggttatgtactggctctgaatggccacaagaaatacttctgcctcttcaagccccaaaagacagtcgaagaggaggaagccatagggtcgtgcagtgatgttgactcttccctctacctgggtgaatctcgagggaaaccttcctgtggccttggatccaggcccatcaaaggaaagttgagcaagctctctttatggatggaacgcctgctggagggctccttacagaggttttatatcccatcatggcctgaactagactgagaggattttccaaagagatttgaactcttcagactttttaacatgcccctgtgaacaggtattttcaggactcaaactaccacaatgaacagagtatagattttagattgctcttctagaaccatggctagaagaatctttcctttgtcctgttctaacctaggaatgaaaaacaccaccagtttgaatcgcctagatgaaaatcttttcctctgggtgttatttttccccactgaatgccacaccattgaaaatagactgctcatcccctcttcctttcttgtccttgtcccatgctcaccccaccctcctgtcctgtgtcttggagaagcacagggctccaccctgcaagcggcatctggcggaccctcatgagcctgtcgtgcaggccaggtcattggccccttccccaatcccggccctgctgtgctgctgccatggcgcatgctcctaactctgaacaacccacggcagcttctagccccgcatctggaaaaaggcccctttccaagcaatctcacgtttactggttgttctgggagtaagtggctaaatgtatattttgggggtatcccccaacaacagtttgttggccacaggttgaaaaggaaaggaataaacgggagttctgcatgtgagttctcaagaaaaggaaagggaggctgagcagtggctgaagcgatgcagccttgagacacgctgtgagcatcccatccgccgccccagcgctgctggtagccaggggaggggtctgcacagcgagaagtactgtgatgactttgagccgttgacatgtatgtcttcagatgcctttctgcctctgtcgattttagggtatggatattaggagccataacttgtaatcttgttctctgaacgtagagataagctgctataaagccagtagatgttaaactgaagagaaattattcccacctgctatgagtcaggcttaaggaatctcttcaatagtgtctctttagtaaaataccaaacatgtctttgtatcaaggaacttaaaatttctcaacaattgtattttgaacactgttaccctaaaagtgctgtctcttcaagtcatcttttgcaggaagtgagccaagatttgttctagactcccattttgcaaaaggcttactttccacttctgggctgtattttgatgtctcatcttcattgttttcactcttaacttagagctgcttcaccagtattggggtcagactggccatcagcacctgagcgtgctgagctccaggtatagtggaccccagggtgcctcataccagccagttagagagcataccttttatttttcagggcagaatgaccagtggttctgagtttgagtttggacagcttcaaagagtggtccgttcaaatgtcaaagcaaggtgcctttggtggctttgtgaagggtgaaaatcagtgatgggacatttactaagtatttctttttttttttttttttttagttgttgagacagagtttcactcttgttgcccaggctggagtgaaatggtgcgatctcggttcaccgcaacctccacatcccaggttcaagtgattctcctgcctcagcctcctgagtagctaggattacaggcatgtgccaccatgtaattagcccggctaattttgtatttttagtagagacgggatttctccatgttgatcaggctggtcatgaactcctgacctcaggtgatctgcctgcctcagcctcccaaagtgctgctgggattacaggcgtgagccaccactcccggctaagttagtatttctttaatcttaatgctttaaactaagccacttggatcctgaataatttaaatcttgagctacattggtaagtaataaattatttaaggccaggaattcctgtagttttcatggagtctgtagctttattaaaaaataaatcactgccaggcttcattcttccatatgatcctctaaaaatggacacttcctctgaatgctgtatctcatggcacctggtccaactagaaatggtcaaggaattcatttggctccttgatacatcagtcctcaatattactttctaggtattttatggccagattgcttatatgagtggtcttttggtttggtagtaggtttttatttttaatttctgtactaatgaaattcctgactttaatttctgaaaaccaaaaactctccaagtgtatttatttatattttttttaatagagacgaggtcttgctatgttgcccaggctggtcccaaactcctggcctcaagcagtccttccaccttggcctcccaaagtgctgggattatcaatatgagccaccatgccagatttgttcatttttaaacatttttatctcttcaagtcatcttttgatcttttaaaaagcaccttcaaacagctgcaccttccatttgcactaggaaatgaaggtagtgatgggattggcaatgttcctggcagatgtttcagcccaaaagctcttctacagaccggtttagagctggtgccctatgagaatattagggagcttttattttaaattgaactttacccttgtccatgcaaggcattcctcctgaatgcatccatgaatttgtttacttttgcgtcaaacatatgagccattgtcatgctcagcctgtgccaccattgctctgtctgatgtatgtaatcatacaagacctgattttggttctaacacagtggtctttgactatcaacattgatgtttttagagatgggttcttctggttgatacagactatgcattgcgtttagcagatggggtaaaactggcctaaaacaagtctttgcagaatacatgccaatttccaaaaaaaaaaaaaaatttgttgctcaggtgttgcacaatttttatctaacactgaggctatcagctccaactaaacaacatttcagtgggtgaggctgccctaacttccattaggggccatggtctcactgccatcacttattagccatgagaatttggttgtagttttcaggtaggttggtttcttcctcatttgcagcttgttgatacttgttcctttttatttattaacatcccaatcaatttgcagctgccatcattacataaatatttttctgttataaaaagaagtgtgatctgtttttttagtgatttcctttgtttgggaatagagattggaagcacatactcagacctgttttgttaactagaattctttaaaagctgatgccaaacatctttacagaggaactgtagttcacatccacctgtctgacattgtcccctaaaaacaagtgcagtgtggcagctgctgaatctgtctgttcagtttgtcaaggaggataattatgcttgggagagatctgaaaagaaggtgaatattttgcacttttgatactcttaggaacaaataacttatttggcaaattgtttcttttttatgttttgggtgttgtttttgttttttgactttttttgtattgtgaacaggcactgaagctgatgttattttaagattacagaatggaaaaagaaataaactattttaatgtctgataaaaaaaaaaac

SEQ ID NO: 1325 - DNA, 1201 bp, Homo sapiens
gcaggagcaagcgtctgccgcggtggccgggtgccgatttgacaagatcaaagctgcaggaaaatggacagtgaggttcagagagatggaaggatcttggatttgattgatgatgcttggcgagaagacaagctgccttatgaggatgtcgcaataccactgaatgagcttcctgaacctgaacaagacaatggtggcaccacagaatctgtcaaagaacaagaaatgaagtggacagacttagccttacagtacctccatgagaatgttccccccattggaaactgacgcttggctcctttcttgtggatggattttctcaaagtacacagataaagcacggtttgtttcagtctccaaattcaaacctttgagtaataaatcagcactcaaaaatgtacacccatttagtttgtggtagcaaagtgcaatgcgaaattgaatgagaaactgagatttctcagtaatggtgaatatttcgctctttaaacctaaaactcttcattgagtagcttatatttgaacatgattggttaaacatttgcctctacctctgattttgctttgctgtcaaagtttaacaccttccaactacttatgtgtgtcctgtaacacaggtgattgaacgtatgagagggaaaggcaaagaaaaaggaagccagacactaggagaattattaacttctcatacttccccacattgagaagcattcggagtgtatttagcctgtagatgttgtgatatgcaaatatcccattccctggttactggcattcctaagattcttcatggtattttcaaactttggataaatttacagattagaaagatatctgacagttaatctctgttctccttacaaattccttttgtgctgctggaaaggatctttggctaggtggatgactagttttattcaaagccttttctcaaagccctttcagttacaaccaccccactatggaatcagtatttagttatacatttgtataagaacctgtattttgaaaaacacattcatgtatatttattcctggaattatttgcctgttaaacagtgtctttcatgttctctccccagattgtaaactctgtaagaagctgcttgtatctgtatcccttgttgaaactctgaaaacactgaataactaaaatctcttctcatccttacaaaaaaaaaaaaaaaaaaaaaaaaaaaaa

SEQ ID NO: 1326 - DNA, 7667 bp, Homo sapiens
gtccgggttcgcttgcctcgtcagcgtccgcgtttttcccggccccccccaacccccccggacaggacccccttgagcttgtccctcagctgccaccatgagcgaccaagatcactccatggatgaaatgacagctgtggtgaaaattgaaaaaggagttggtggcaataatgggggcaatggtaatggtggtggtgccttttcacaggctcgaagtagcagcacaggcagtagcagcagcactggaggaggagggcaggagtcccagccatcccctttggctctgctggcagcaacttgcagcagaattgagtcacccaatgagaacagcaacaactcccagggcccgagtcagtcagggggaacaggtgagcttgacctcacagccacacaactttcacagggtgccaatggctggcagatcatctcttcctcctctggggctacccctacctcaaaggaacagagtggcagcagtaccaatggcagcaatggcagtgagtcttccaagaatcgcacagtctctggtgggcagtatgttgtggctgccgctcccaacttacagaaccagcaagttctgacaggactacctggagtgatgcctaatattcagtatcaagtaatcccacagttccagaccgttgatgggcaacagctgcagtttgctgccactggggcccaagtgcagcaggatggttctggtcaaatacagatcataccaggtgcaaaccaacagattatcacaaatcgaggaagtggaggcaacatcattgctgctatgccaaacctactccagcaggctgtccccctccaaggcctggctaataatgtactctcaggacagactcagtatgtgaccaatgtaccagtggccctgaatgggaacatcaccttgctacctgtcaacagcgtttctgcagctaccttgactcccagctctcaggcagtcacgatcagcagctctgggtcccaggagagtggctcacagcctgtcacctcagggactaccatcagttctgccagcttggtatcatcacaagccagttccagctcctttttcaccaatgccaatagctactcaactactactaccaccagcaacatgggaattatgaactttactaccagtggatcatcagggaccaactctcaaggccagacaccccagagggtcagtgggctacaggggtctgatgctctgaacatccagcaaaaccagacatctggaggctcattgcaagcaggccagcaaaaagaaggagagcaaaaccagcagacacagcagcaacaaattcttatccagcctcagctagttcaagggggacaggccctccaggccctccaagcagcaccattgtcagggcagacctttacaactcaagccatctcccaggaaaccctccagaacctccagcttcaggctgttccaaactctggtcccatcatcatccggacaccaacagtggggcccaatggacaggtcagttggcagactctacagctgcagaacctccaagttcagaacccacaagcccaaacaatcaccttagccccaatgcagggtgtttccttggggcagaccagcagcagcaacaccactctcacacccattgcctcagctgcttccattcctgctggcacagtcactgtgaatgctgctcaactctcctccatgccaggcctccagaccattaacctcagtgcattgggtacttcaggaatccaggtgcacccaattcaaggcctgccgttggctatagcaaatgccccaggtgatcatggagctcagcttggtctccatggggctggtggtgatggaatacatgatgacacagcaggtggagaggaaggagaaaacagcccagatgcccaaccccaagccggtcggaggacccggcgggaagcatgcacctgcccctactgtaaagacagtgaaggaaggggctcgggggatcctggcaaaaagaaacagcatatttgccacatccaaggctgtgggaaagtgtatggcaagacctctcacctgcgggcacacttgcgctggcatacaggcgagaggccatttatgtgtacctggtcatactgtgggaaacgcttcacacgttcggatgagctacagaggcacaaacgtacacacacaggtgagaagaaatttgcctgccctgagtgtcctaagcgcttcatgaggagtgaccacctgtcaaaacatatcaagacccaccagaataagaagggaggcccaggtgtagctctgagtgtgggcactttgcccctggacagtggggcaggttcagaaggcagtggcactgccactccttcagcccttattaccaccaatatggtagccatggaggccatctgtccagagggcattgcccgtcttgccaacagtggcatcaacgtcatgcaggtggcagatctgcagtccattaatatcagtggcaatggcttctgagatcaggcacccggggccagagacatatgggccataccccttaaccccgggatgcaaggtagcatgggtccaagagacatggaagagagagccatgaagcattaaaatgcatggtgttgagaagaatcaggagagggatacaagagaggagatggggtcccggcacccatctgtatcatcagtgcctctttgaaggtgggaaacattagtgaaaattctgttggtgccacgctttgatgagcatttgtttgaccccagtttcttcttacacttcttaccccagcctacccttcctgcatttctcttctcagctcttccatgatggattcccccccctttcctaaagccatcatgccttgataaatatatatgatcattgaaatactttttaacaaaaaacagattctatattattatatatatatatatatatataaagatatatagagatgcattcacaggggttggctgggaggaggaagaccattctgtgaccaaaataccttggtcattttttttatattgccttatttccctatggctgagccttgttgtgacacatcaagcttttctgtagatgttgtcttggcttcccaccagcttaagcgttcatatgctctgcttttagttcatatatacatacataatgtttttcctttcttaattttgtctttttgtttgggatcagcttcttgcactccttccctaactcaactgttgccgtctcatcttctctcatctgatcacttcatgttttgtttttgttactgcctggatgaggcacttctgtcaattttttcaggaccttagttccagcagcagaatggaaaaatccttgaagcccaggctgatgcttgaagtaactgtggagggagtgttcaaaatactactgacgcaggcaccttcttggcgctggagagtcaaaggcatctcccttcattagctgctctgagcatcaagaattagaagtctttcagtggaattgtacaagagtccctttgaagataataatcttggctcagtttgtataaactgtcaaattttcaaataataggtagggggctttcactaggaaaatcatgtgctcagaagaggaaatgactcgtagtcaggttcaggagttagtggagtatttggactttggtactgctgtcttccaaggtagctctaagttttgatgtgtgggcttctgagtttatattctgaaaggaaatacacttcttttgaacatccccactaggttcttttccattgtcaataaggagcatcagccagtgaatctgtttcaggtttccattctgcagaactcctccaaagcatgtgctagtggcaagacagtggttcttatgatgttttcccttaacttttccttgtatgttcttgggtggttcctaagggaaagggaagcacatgatcatgggaatgatagcccagaacaaaaagaaatcttgtcttaccacagtgttttataggagagattgggagaaatcatcctgttttctctgtgacctgatttcagaagagactgatccaaaaattataacggcagggaacctagtgcatttggcactgagatttaaatgcaaccagaattgtcctcaaggcccagccataaaagcattgtctctctcgaccttctggtatcttgttagagagcttttcactgtgaggaagtgtggaaaaatagctctgtgtgtgtgtgtgtgtgtgtgtgtgtgtgtgtgtgtaatctgttaggttggggataggttttctgctagccaatattaaaagagacctgcaataaaaaaattaccctgatctgatagaaagcaagtgtttttgtatgtgtgggtgaatgtgtgttcatgcccgtatatgtctacacacagatgacaaattatatttgaaatcgttggaaaataaattcagatcaaaatgcctttcaggcccattacctagaaatctatcttaaaacctgggtatgttcctaaggtcatttctttgcttatgctaaattaattacaattatgaatggaggatattctactgtacttttttaaaaagaaactatttttgtgtttgaaagtgaaaccaacatccagatctatagcagagtccttattcttctcataaatctttttactttggctacaaatagatgatggtatgattctattatatattttatataaaatccatccaaattaagttttgggtaagtgtgttgtttaatctgaactatagtaacttaatactctaaacaatagttcactccatttggtcctttctccacagatgtaattatgttttcaactcaggaactatggcaaggaactttccccagatcaaattctattaacgctgagatacaagtcatccatgcacagccactatcataccctttattctcactgaaaggcagaactcagaacctgttattttatgtctgtaatcatgtactttggcatcttttggaggaaaggggcaggataactcactggaatgtacagtattttgctagtgcatttcaaggaatggaatcttctccagtatgaaattaccagatataaaataatgtaatgatgctgaggatataagcttttagaaggtaatttgatggtatttctttctcgaatgaaaagctgctggtttaccctcaaccctattcattagcattaccatgagtgaatttatatctaattatttccacttgccctgttctcttcacaccaaggaagctccagatccagtatcttgtttggcctcaaaacagaagcagcttcttttgtctcccagcagtagtgagccactcagtctcttccacaggaagtttggagcctacattccttgagtcaggagcttattacagaaaaaccccgtttccctgaacttttggctaacagaaattaatttaactgacatgcatattgattctgaaatttttttcctaagtttttttcatttttttgaatgagttttttaaattttttagatgaccaaaacttgcagggcaggggatgcccagaagagtggtgagatagtaaaacacttattccctcatcctttcaggttttcaggttgcccatttatattcatttacatgtcatttgactgtctcactttttacccagaacagtaacaacccacaccgtcttccttcagggatttccaactggcactctgtgggtgctacacagaatgcaatttaatggatatttctcagcctggttcagaataaattgatcctttgatcccagaaagtatatactgaagtgtgggataaagattatgattaggggagggttggagacaaaagctgtaaattactatggctgatttatttctactatatacatatatattttttgcttttgtatatcctatataggaaactaagcattgtattttttttaacaaatctaaaaaagcactatgaactacaggtgtttgactttcaaaatatattttgtattgttaatatcttcacattgtgtgaatactggaagctgcagatctttgctaggacgcaataaatttatatactttttgaggggttcttctggggtgctaatcaggcccctgttatgcttagggggagccctggtgctacttgcttgaagttttcagtgtaagtaccctgatgccttttggaccttgggatcagatcaagagttttggagatcaggtaccaaggaaataaggacagtctagctgcctcaagtgaggggccctttgcatagctctccttccccctcactgaagctgggtagcctattggggttgagagggaaaatgtgaaatctcagaatttatctcccttagaagagagccagtaacttatgtacaaggatgaaagaaaggtcgcagcagtagctttggggaaagggaggaagatatggcacttctccaaccccggaaaacattgcttttgaaaactgctgataaaatatgagccggttattacttctgtttgggagactgtgctctctgtggtgcctctcttggctctactccacagataccagacctcttctaagaggatgagcagaccagctttgaggttgacctgtttctctttgtctgccttcccaaaacaccagcccccaggaagacattaagcagccttaagcttaaattcctactccctcttccaaatttggctcacttgccttagatccaaggcagggaaaggaaaagaaggggggtctctggctttattactcccctaagtctttactctgacttccccaaacccagaaagattttctccacagtgttcatttgaaagaggagtattttgtcccattttccccttcctcattatcaaacagccccagtcttccttgtctctgctaagaaagtagaggcatgatgatctgcctctcaactgccctaagtcctagctaagtatcaggggaaaaaaaaaaaaaaaaagcctaacaaatgggattagactagggctgcaagtagtgaggattttgttgatacctctgctgggatgtgtgctttcccatatcttgccttcaggaattacactgtgccttttccccagggatatgggctctgtctacccagtgctccagtttcccggtaactgctcttgaacattgtggacaagggcaggtcttcatatttttgatcatccctttctcccagtgaaatcccatagcccttacctagagtctagggcacaaagacttcggggaagatacactgagattgacctgaggagacatctacacacaccagtggcagctgccccagggcctgcttccccttcctaagtctgtcatcctctggaagggatgggtggtgctccaatctctggtgcctaaaaacccaagtttatttctctcttaacactggcaataaccagtccacaccactgttgccttttaaaacctcttaataatctcatgctgtgtttgttttgattccaatccaattatcaccagggctgtgtgggtaaatgcttttaaatgctctctcatcttgttcttccccctcaccccccactcttaggtatgtatgatgctaatcttgtccctaagtaagtttcttcctgctccttttgtatcttcctttcttgtctttcctcctaccttttgtctcttggtgttttgggacttttttttttttttttttggccttttgtacaaagattagtttcaatgtagtctgtagcctcctttgtaaaccaattaaaaagttttttaataaaaaaaaaaaa

SEQ ID NO: 1327 - DNA, 5105 bp, Homo sapiens
gtgtgcccgggggcgggcgggcggcagggcagcaggaccgcggccggtgccccagccgaagccggagtcgcgcggccgggagcacgggcgccggcatagtacaatgaggcagccagcggatcttggagcctgagcccttgtgaagccggcaatgacaagtctgtatggtcgccatgccgagaaaaccactgacatgccaaaaccatcagcccctaaagtgcacgtgcagaggtccgtgtcccgagataccatcgccattcacttctcggcatccggcgaggaggaggaggaagaggaggaggagttcagggagtactttgaggaggggctggatgaccaaagcattgtaacagggctggaagccaaggaagacctctatcttgaaccccaagttggccatgaccccgccggccctgctgcctcgcctgtcctggcagatggactgtccgtgtcccaggcccctgccattttgcccgtctccaagaacactgtaaagctgttggagtcccctgttccagcagcacaagtattaagtacagtgccattggctgtgtccccagggtcgtcttcgtcggggcccttagctagctctcccagtgtgtcatccctttctgagcagaaaaccagttcttcctccccattgtcctctccttctaagtctcccatcctctcatccagtgcctcaacctccaccctttccagtgcaaaacccttcatgagccttgtgaagtccctgtcgaccgaggtggagccaaaagaatccccacaccccgcaaggcacaggcacttgatgaagacattagtcaagtctctgtccacggacacttcccggcaggagtcggatacagtgtcctataagccacctgattccaaactgaacttacacctgttcaagcagttcacacagccccgaaacacaggtggagattccaaaactgcaccttcttccccactgacttctccctctgatactcgttccttttttaaagtgcccgaaatggaggctaaaattgaagatactaaacgacgcctttcagaagtcatctatgagccttttcagctccttagtaaaattataggggaagaaagtggcagccataggcccaaagccttatcttcaagtgcttcagaactctccaatctgtccagcttgaatgggcacttggaaagcaataacaactacagcatcaaggaggaggagtgtgattctgagggggatggctacggaagtgattccaacatccccagaagtgaccacccaaagtccactggtgagcccacaagagagatagaactgaaaagttcccaggggagcagtctgaaggatttaggcctgaagacaagttctctagttctggagaaatgttctttgtctgccttagtgagcaaagaagatgaagagttttgtgaactgtacactgaggacttcgatttggaaacggagggggagagtaaagttgataagctctcagatattcctctcaagccagaggtgctcgcggaagatggtgtggtccttgacagtgaggacgaggtggactcggccgtgcagcacccggaattgccagtgaagacgttgggcttctttataatgtgtgtctatgtgtacctcatcctccccctcccccactatgtgagtggactctttctgggaattggccttggattcatgactgcagtttgcgtgatttggttttttacaccaccaagtgctcataaatatcacaagttacacaaaaatctgcgacactggaacacaagatctctggatatcaaagaacctgaaatactgaagggatggatgaatgagatttacaactatgatccagaaacctaccatgcgactttgacacattcagtctttgttcgacttgagggtggaaccttaagactttcaaagcccaataaaaatatatccaggagggccagctacaatgaacccaagccagaggtcacctacatcagccagaaaatctatgacctctcagacagcaagatttatcttgtacctaaaactttggctcgaaagcgaatctggaataaaaagtaccccatttgtatcgagcttggtcagcaagatgactttatgtctaaagctcagactgataaggagacttcagaagagaagccgccagctgagggaagtgaggaccctaagaagccaccccgccctcaggagggaacaagatctagccagcgagatcagatactctatctctttgggagaactggccgagaaaaagaggaatggtttaggagatttattctggcatctaagctaaagtcggaaatcaagaagtcatcgggtgtctctggaggtaaaccagcccccgtcttcttggctccagggcttttgcctgcacacagcagacacaacagtccgtccgggcacctgacccacagccgcagcagcagcaaaggcagtgtggaggagatcatgtcacagccaaagcagaaggagctggcaggcagcgtgcggcagaagatgcttctcgactacagcgtgtacatgggcaggtgtgtcccccaggaaagccgaagcccccagaggagccccctgcagagtgcggagagcagccccacagctgggaagaagttgccagaggttccaccctctgaggaggaagaacaggaagcctgggtgaatgccttgcttggaagaatattttgggacttcttaggagagaaatactggtctgatctggtgtctaagaagatccaaatgaaactcagcaaaataaagctcccctactttatgaatgagctcactctgacggaacttgacatgggcgtggctgtgccaaaaatcctccaggccttcaagccttacgttgatcaccaaggactctggattgatttggaaatgtcctacaatgggtcctttctgatgactctcgagaccaaaatgaatttgaccaaactaggtaaagagcctcttgttgaagccctgaaggttggagaaattggcaaagaaggttgcaggccccgggcattctgtctggcggacagcgatgaggaatcctccagcgctggctcctccgaggaagacgatgccccagagcccagcgggggagacaaacagctcctcccaggggctgaagggtacgttggaggtcatcgaacaagtaagattatgaggtttgttgataaaattaccaagtcaaaatatttccaaaaagcaacagagacagagtttattaaaaagaagatcgaagaagtctccaacacacccctgctgctcactgttgaagtacaagaatgtagaggaaccttggcggtcaacattccaccacccccgactgaccgagtatggtatggtttccgaaagccaccacatgtggagctgaaagctcggccaaaacttggagagagagaagtgactttagttcatgtgacagactggatagagaagaaactggagcaagagtttcagaaagtttttgtcatgccaaacatggatgatgtttatatcactataatgcactcagccatggaccctcgctctacttcctgcctcctgaaagacccacctgtggaggctgctgatcagccatgatgggtgatgtcagatgttccccatattgtgacatcgagctggatgtgtggggttcttggccgccatctgtactgtagcactggcctctgtgccacagctactgtttcttaaaggactgcttctgccctctgcctgccagtgcccattccactgtgaggtgtcattccctgcatctagtgacaactgtctggattgcctgctgcaaagctttgatttggcaaaggagaccatggaagaatcatggtggatccagaagttatacgtgacccacaccatggcttttaaaagtctacccatgtttgtggcagcaaatgagcacagtaagagcaaagctgaacaacttgcctcctctactcctccaaagcttttcttcaggcagccggtgcacagtggactttttcacttctatactttgtatgcggccttccacacttccagagaatgtcagtgtgcaatgtgtctggagggtggggagaggaattctgtgagccttttcatttcggtgacagaagagatgggcagagcaacttattttccacattaaattgtgcatttgggaagcaagtagccatagtacacacacaacacgctatcagcttgggtaaggacagtgggatttatgtgaacatcaggcaaagccatgagatcaaaccatcccaagcctttcaccaatgaggtacaaccacctgggggctagctaatcttgaatgttttcctgagacaggagcgtatgtgaaaacatcaaacactgcacatgacaggatgggtcctctcatacagatgggatggggttagaaagccagagccagtttttccatctggcgtttcctgtgtcctccaggtttatatgggaatcgaaacagtttgttaatctgattgggagagttccatgggcagatttcccttcctgaaggccaaaacggagaactgctctctttaattatttcaagagtcaagaccaaaagtttgctcagcatcacactacatctcaaaattaatgttgccaacttaattttgtgcatttgtgtcagaatgtttagtttacaaggttgggggctctctttgcttcgagaagtaaacctaataccatttttttattgtttaaagctgcattcaacgtcaaaattaccttgggtaacttttgataacttacatgtgtggacaaagctaatagtggttttttaaacagcaccttgcctgaacatgactttaaagaaattaatatattgaaaacatgtttgaacccttattttaattgcaccattaaaacatttgacttaaattgtttgaccattccagttggtgtactgttctgatttttcgttgtgtaggccgatctgcctgtcagagtccacgtgtcctggtcactggtctttataattgttgtgcaataactaaaggctaaggactagatgcactatcgtgtaaagagattacacatgactgtaccatgttgcacttaatcaaatagtatgtggggatttaaaatcgcttgcattgtttcacaaaataaatatctcaatgtcaaatactaaaaaaaaaaaaaaaa

SEQ ID NO: 1328 - DNA, 1835 bp, Homo sapiens
gtggtgaggcctacagaagcggccttcagctggaccttggtctccccgccggacttcgagggtgtcatcgccgcccctgttgggggtgagcgccgcgcggctgcagcatgcctcacaggaagaaaaagccctttatagagaagaagaaagctgtgtcttttcacttggtccaccggagccaacgagatcctttagcagcagatgagagtgcaccccagagggttctattgcccacacaaaaaatagacaatgaagaaaggcgagcagaacagaggaagtatggagtgttctttgatgacgactatgactacctgcagcacctgaaggaaccatctgggccttcagagcttattccctcaagtaccttcagtgcacacaacaggagagaggagaaagaagaaacgctagtaattccaagcactggaattaagttgccttcatcagtgtttgcttcagagtttgaggaagatgttggattgttaaataaagcagctccagtttcaggacctcgactggattttgatcctgacattgttgcagctcttgatgatgattttgactttgatgatccagataatctgcttgaggatgactttattcttcaggccaataaggcaacaggagaggaagagggaatggatatacagaaatctgagaatgaagatgacagcgagtgggaagatgtggatgatgagaagggagatagcaatgatgactatgactctgcaggcctattgtcagatgaagactgtatgtctgtgcccggaaaaactcacagagctatagcagatcacttgttctggagtgaggaaacaaagagtcgcttcacggagtattcgatgacttcctcagtcatgaggagaaatgaacagctgaccctacatgatgagaggtttgagaagttttatgagcaatatgatgatgatgaaattggagctctggataatgcagaattggaaggttctattcaagtggacagcaatcgcttacaggaagttttgaatgactactataaagagaaggcagagaattgtgtaaaattgaatacccttgaacccttggaggatcaagacctgccaatgaatgagcttgatgagtctgaggaggaagaaatgattactgtagtccttgaagaagccaaagagaagtgggattgtgaatctatttgtagtacatactcaaatttatataaccatccacagcttatcaagtatcaaccaaagcccaaacaaattcgaatatcttctaaaacaggaatacctctcaatgtcttaccaaagaaaggactcacagcaaagcaaactgaaagaatacagatgattaatggcagtgatcttcctaaagtatcaactcagccacgttctaaaaatgaaagcaaagaagataaaagagcaagaaagcaagctataaaagaagagcgcaaggaacgaagagtggagaagaaagctaacaaattagcatttaaactggagaaaagaaggcaagaaaaagagctgctgaacttgaagaagaatgttgagggtctaaagctatagacagtggagcatacagggcaaggcactttattaggggctcctcatctttggttattgactagaaacttcagaaagacaaaactgtttgccatttttactggcagataagaggaaaatacaatatttgtattatttttatactagtaagtgtcccctgccaaccatcttgtaaatattgtaatactttaatttttaatattataagcttacatttgctctgaagtaaatgacttcatgaatgtgaaatgtttgataaattaaaggaaaatatcttcataaaaaaaaaaaaaaaaaaaaaaa

SEQ ID NO: 1329 - DNA, 1510 bp, Homo sapiens
gactataccactcccataccctataactttgtttgttctatttcacacatataattttccgagacaagatgttctcatttaagcaacaagaagattcgtctctcgctattactgtaactgctgtttatatcgtcatgtcccggaaaggtccctgtcttccctgaatggtctctaccaacttcacctccggttctaggtgtcatggctgccccaagagtctaggtaagagtttgttcccgtggtgcggagggtcaaggcccacacccggaaacctagcgaggtaaagttgcgtcttggttgtagagacgacaacttctccgcttcctcggcgatggcggcgtccgggagcggtatggcccagaaaacctgggaactggccaacaacatgcaggaagctcagagtatcgatgaaatctacaaatacgacaagaaacagcagcaagaaatcctggcggcgaagccctggactaaggatcaccattactttaagtactgcaaaatctcagcattggctctgctgaagatggtgatgcatgccagatcgggaggcaacttggaagtgatgggtctgatgctaggaaaggtggatggtgaaaccatgatcattatggacagttttgctttgcctgtggagggcactgaaacccgagtaaatgctcaggctgctgcatatgaatacatggctgcatacatagaaaatgcaaaacaggttggccgccttgaaaatgcaatcgggtggtatcatagccaccctggctatggctgctggctttctgggattgatgttagtactcagatgctcaatcagcagttccaggaaccatttgtagcagtggtgattgatccaacaagaacaatatccgcagggaaagtgaatcttggcgcctttaggacatacccaaagggctacaaacctcctgatgaaggaccttctgagtaccagactattccacttaataaaatagaagattttggtgtacactgcaaacaatattatgccttagaagtctcatatttcaaatcctctttggatcgcaaattgcttgagctgttgtggaataaatactgggtgaatacgttgagttcttctagcttgcttactaatgcagactataccactggtcaggtctttgatttgtctgaaaagttagagcagtcagaagcccagctgggacgagggagtttcatgttgggtttagaaacgcatgaccgaaaatcagaagacaaacttgccaaagctacaagagacagctgtaaaactaccatagaagctatccatggattgatgtctcaggttattaaggataaactgtttaatcaaattaacatctcttaaacagtctctgagaagtactttacctgaaagacagtatgagaaaaatattcaagtaacactttaaaaccagttacccaaaatctgattagaagtataaggtgctctgaagtgtcctaaatattaatatcctgtaataaagctctttaaaatgaaaaaaaaaaaaaaaaaaaaaaa

SEQ ID NO: 1330 - DNA, 3912 bp, Homo sapiens
gcgggcggctccagacttcacaggcagcagctagcgaggcggtctcgcccggcgcgaggccggcgctgtgctcgcctcggagatcgctgctctttagctgggtgcagaaggcggctccgcggctcgcggacgactggctgggcgcgaatcagattggggggctttctcccggtcccctcccacctcgtctgggctcgcggcgtctccggggaaagccgtggccccgagggcggatccgagaacacacaagtgaaagacacaatgaatggtcatatttctaatcatcccagtagttttggaatgtacccatctcagatgaatggctacggatcatcacctaccttttcccagacggacagagaacatggttcaaaaacaagtgcaaaggccctttatgaacaaaggaagaattatgcacgggacagtgtcagcagtgtgtcagatatatctcaataccgtgttgaacacttgactacctttgtcctggatcggaaagatgctatgatcactgttgatgatggaataaggaaattgaaattgcttgatgccaagggcaaagtgtggactcaagatatgattcttcaagtggatgacagagctgtgagcctgattgatttagaatcaaagaatgaactggagaattttcctttaaacacaatccagcactgccaagctgtgatgcattcatgcagctatgattcagttcttgcactggtgtgcaaagagccaacccagaacaagccagatcttcatctcttccagtgtgatgaggttaaggcaaacctaattagtgaagatattgaaagtgcaatcagtgacagtaaaggagggaaacagaagaggcggcccgacgccctgaggatgatttccaatgcagaccctagtataccgcctccacccagagctcctgcccctgcgccccctgggaccgtcacccaggtggatgttagaagtcgagtggcagcctggtctgcatgggcagccgaccaaggggactttgagaaaccaaggcagtatcatgagcaggaagaaacacctgagatgatggcagcccgcattgacagagatgtgcaaatcttaaaccacattttggatgacattgaattttttatcacaaaactccaaaaagcagcagaagcattttctgagctttctaaaaggaagaaaaacaagaaaggtaaaaggaaaggaccaggagagggtgttttaacgctgcgggcaaaacctccacctcctgatgaatttcttgactgtttccaaaagtttaaacacggatttaaccttctggccaaactgaagtctcatattcagaatcctagtgctgcagatttggttcactttttgtttactccattaaatatggtggtgcaggcaacaggaggtcctgaactagccagttcagtacttagtcccctattgaataaggacacaattgatttcttaaattatactgtcaatggtgatgaacggcagctgtggatgtcattgggaggaacttggatgaaagccagagcagagtggccaaaagaacagtttattccaccatatgttccacgattccgcaatggctgggagcccccaatgctgaactttatgggagccacaatggaacaagatctttatcaactggcagaatctgtggcaaatgtagcagaacatcagcgcaaacaggaaataaaaagattatccacagagcattccagtgtatcagagtatcatccagccgatggctatgcgttcagtagcaacatttacacaagaggatcccacctggaccaaggggaagctgctgttgcttttaagccaacttctaatcgccatatagatagaaattatgaaccactcaaaacacaacccaagaaatatgccaaatccaagtatgactttgtagcaaggaacaacagtgagctctcggttctaaaggatgatattttagagatacttgatgatcggaagcaatggtggaaagttcgaaatgcaagtggagactctggatttgtgccaaataacattttggatattgtgagacctccagaatctggattggggcgtgctgatccaccttatactcatactatacagaaacaaaggatggagtatggcccaagaccagctgatactccccctgctccatcacctcctccaacaccagctcctgttcctgttccccttcccccttccactccagcacctgttcctgtgtcaaaggtcccagcaaatataacacgtcaaaacagcagctccagtgacagtggtggcagtatcgtgcgagacagccagagacacaaacaacttccggtggaccgaaggaaatctcagatggaggaagtgcaagatgaactcatccacagactgaccattggtcggagtgccgctcagaagaaattccatgtgccacggcagaacgtgccagttatcaatatcacttacgactccacaccagaggatgtgaagacgtggttacagtcaaagggattcaaccctgtgactgtcaatagtcttggagtattaaatggtgcacaacttttctctctcaataaggatgaactgaggacagtctgccctgaaggggcgagagtctatagccaaatcactgtacaaaaagctgcattggaggatagcagtggcagctccgagttacaagaaattatgagaagacgacaggaaaaaatcagtgctgccgctagtgattcaggagtggaatcttttgatgaaggaagcagtcactaatttgtttgtttgtatttaaactccattgtttttggcattattccaacatgctttgttttaagaagccttgaagggaatgtcagattcatttttcttgatgtaatttatcaccataaaaaaaaaacccatgcaaacctgagtgagcacaggatttgcttctaggcccattatttttattaaaactgaaaaaatttaaactgaattttttgaccttggaaaatatttttcttactttaccaaggtgaagtttccttaattagactaattattttatccccatcccagggtataaacaggaattgttttgatagtggtggagttattcactgcaacaaagcaacaatgttgtccatgattcaaaatctaagcagtttcgattttgcctgtgaatatggtgtctgtcattcagggcatagctcactgtaggctagcctctgcttacttaagtctcttctctgacatactcaatggaagaatatttagatttatttaaagttcttaatgccaacagtttaaaaaaaaattaaaacatttgaatgaactgtaaagtacagccataccttggacatgcaaatataaatctatggagcattctcaagacagtttgtcatggctctgttgattgcaactccttgtatagcttgtattttgatttagtttatattctgcttattatgtatactgtgttcttatatatgagaaagcacaaatgcgaaagaggtcatgtcttctcaaaatctagcaaaggaagtagtctgcattggtgtgcattacagtattttgcttaatgaaagcctcagttctgaatgttgatatgagtagttaaaaggaagtggggccattttatgtgtttatctgtgtcaagtatttctggtaataagaagcacttaatttacacatattttaatcctgtgaaagattccacatagagaaaagaaagatacctaaccttcaacaaatgttatttttggaaacacaatttttgtcattaaatgttatattatttcacatatataaaacagatgttatgtaagaatgttgtatattttaacataaatcatttagagaaattatctagattcattaattttcatagtgcctttttcacatgagtcagctggaaagtctgcaataaacagtatttgctgtctgttaataaatggtttctgtctcattaaaaaa

SEQ ID NO: 1331 - DNA, 3181 bp, Homo sapiens
ggcggccgctcgggcaggatggcggcggccgcggtgggcgcgggccacggcgcggggggcccgggcgcagcgagcagcagtggtggggcgcgcgagggcgcgcgggtggcggcgctgtgcctgctgtggtacgcgctgagcgcgggcggcaacgtggtcaacaaggtgatcctgagcgccttcccgttcccggtgaccgtgtcgctgtgccacatcctggctctgtgcgctgggctcccgccgctgctgcgcgcctggcgcgtgccccccgcgccgcccgtctcgggccccggacccagtccgcatccgtcgtccggcccgctgctgccgccgcgcttctacccgcgctacgtgctaccgctcgccttcggcaagtacttcgcgtccgtgtcagcgcacgtcagcatctggaaggtgcccgtgtcctatgcacacaccgtcaaggccaccatgcccatctgggtggtcctcctgtcccggatcattatgaaggagaagcagagcaccaaggtatacttgtcactcatccccatcatcagcggtgtcctgctggccaccgtcaccgagttgtcttttgacatgtggggactcgtcagcgccctcgccgccacgctgtgcttctcgcttcagaacattttctccaaaaaggtcttgcgagattcacggatccaccatctccggctgctcaacatcctgggctgccacgccgtcttctttatgatccccacctgggttctggtggacctctcggctttcctggtcagcagcgacttgacctacgtctaccagtggccctggacgctcctgctcctggctgtcagcggcttctgtaactttgcccagaatgttatcgccttcagcatcctcaacctcgttagccccctgagctactcggtcgccaatgccaccaaaagaatcatggtcatcacggtgtccctgatcatgctgcgcaacccagtcaccagcaccaacgtcctgggcatgatgaccgccatcctgggggtcttcctctataacaagaccaagtacgatgcaaaccagcaagccaggaagcacctcctccccgtcaccacagcagacctgagcagcaaggagcgtcaccggagcccactggagaagccccacaacggcctcctcttcccccagcacggggactatcagtacggccgcaacaacatcttaacagaccacttccaatacagccggcagagctacccaaactcgtacagtttgaaccgctatgatgtgtagagtccaaaggacaggaccagactgttggtgactccttccccggcccccacagcagtatcagaaacttctgacaatcagtgaatgtacaacccagccgaggggacggtgcataactctccatcagaagccctggggttcctggccccccgtgagccgcaggaggatgcgttgcctgcagtgcagacggccgtgagctctgggcaaacctaaacagagaccagtgtctcatgctctttcttcctggagtctgtcatctgagggccgtgtccctgcggagatcttggccacgttgtacctttccatgtggaattattccccaagcagtgtagctcagagcacttgtgtctgcattccagataacattcaggacctgtgtgaaaagctggggtcactgtggctgtagaccatgaactggcagtgggggtgtccagggcggtgcttgagaacgtcagactggctagtttaattccctggcgcagatacgcataggaccaacagggtcaccaagcagacagggagcccgcgagaatcattcaaaacatccccagccacagagatggatccagtttcctggtcatccccttagcagttcacaagttcctggcaaatgttccaaagcaaaaagcgattgcaattagcatccagttcctgcagcctggtgctctgccctgcacgtcagggttggcatccacccagatccagatggaagggaaacttctctcttctcctttgcctcctcttccctcaccagagcagggcgcttctcttggggtggtgagaaggatcttcgagaaatcgtgttcagtatttcaagctctatttctgtggcacatgtcttttgagaggcatcttcacctcttctgtgatgacttggtatgttgtttggtagagagatcttgattttcggaggatcttgcatttttctagggaatattttgtagttgtgtgtgtgtgtttttgccttggtccccattatgggatgcattaggactggcctatgcatcgaaaatctttttgtttgtaaacgttttaaaaacaaagttccccggccaggcacggtggctcacacctgtggtcccggcactttgggaggccaagatgggcggatcacgaggtcaggagttcgagaccagcctggccaacatagtgaaaccccatctctactaaaaatacagaaattagccgggcatggtgtcgcgtgcctgtagtcccagctcctcaggctgctgaggcaggcgaattgcttgaacctgggaggcagaagttgtggtgagccgagattgtgcactccagcctgggtaacagagcgagactccatctcaaaaaaaaaaacaaaacaaaaccaagttcccactggtgatgcctgtctgacacgttttggtatttagtaggaaatgaagtgtttcgaagcttcgagagaagcttcaaaattgtcacaattgctgaaaacagaatgaatcgtgaacattatctcaatattttgtataatagacaagaccacagtgttttggttccctgacctgtttttgtgtttatgttaggatctgaatcatgttctgggtaaggggacgaggagcgaacactgcactaagatttggtttgccaaatcagattctttggtcaagagtcagtttggggccaggcgtggtggctcatgcctgtaatctcagcactttgggaggctgaggtgggtggatcactggagtttgagaccaccctggccaacatggtgaaaccccatctctactaaaacaaaaattagccaggcatggtggcacctgcctgtaatcccagctacttgggaggctgaggcaggagaatcacttgagcccaggaggtggaggtttcagcgagctgagatcacaccactgcactccagccttggtgacagagtgagactctgtctcaaaaaaaaaaaaaaaaaaaaaaa

SEQ ID NO: 1332 - DNA, 1660 bp, Homo sapiens
cgggatttagatcacgtcccgcaggccggcggaagtagctgatactctcattggttgcaaaaccttgatctgtgaaagcgggcgttttggaagataccggaagtagagtcacggagaggtattaagaaatggagagaaaaataagcagaatccaccttgtttctgaacccagtataactcattttctacaagtatcttgggagaaaacactggaatctggttttgttattacacttactgatggtcattcagcatggactgggacagtttctgaatcagagatttcccaagaagctgatgacatggcaatggaaaaagggaaatatgttggtgaactgagaaaagcattgttgtcaggagcaggaccagctgatgtatacacgtttaatttttctaaagagtcttgttatttcttctttgagaaaaacctgaaagatgtctcattcagacttggttccttcaacctagagaaagttgaaaacccagctgaagtcattagagaacttatttgttattgcttggacaccattgcagaaaatcaagccaaaaatgagcacctgcagaaagaaaatgaaaggcttctgagagattggaatgatgttcaaggacgatttgaaaaatgtgtgagtgctaaggaagctttggagactgatctttataagcggtttattctggtgttgaatgagaagaaaacaaaaatcagaagtttgcataataaattattaaatgcagctcaagaacgagaaaaggacatcaaacaagaaggggaaactgcaatctgttctgaaatgactgctgaccgagatccagtctatgatgagagtactgatgaggaaagtgaaaaccaaactgatctctctgggttggcttcagctgctgtaagtaaagatgattccattatttcaagtcttgatgtcactgatattgcaccaagtagaaaaaggagacagcgaatgcaaagaaatcttgggacagaacctaaaatggctcctcaggagaatcagcttcaagaaaaggaaaagcctgattcttcactacctgagacgtcgaaaaaggagcacatctcagctgaaaacatgtctttagaaactctgagaaacagcagcccagaagacctctttgatgagatttaacagtctcaaaaaatactttgatgttcactagactatgttttctattcatttctttaaaatgaaaaaggagaatttcaagtcagcagccgctattaccgtatcttacaatttaattacatacacagtgaattgaaaccattgtgcaaaatggattacacatgtatacaaagatacgatttgatgatgacactggcacattgagttctaaactattcattcagcatgcctataattacataaattgtatgagactttttgttgcaaaggacacatttatcatattcattcacacatattatatgtgatagctgtccaacatcctgtctgggaagattttgaaaacaggacaaagaaaacatcattttaaaatgtcttcagctttttttgaatagacgtattcaaacatattctgaacattgatgtttgaacattttaatttgtgtgatgatgtagaaaatataattttagtttgtacataaacattgtgaaaatctgataataaaatttttgatacattgaaaaaaaaa

SEQ ID NO: 1333 - DNA, 1665 bp, Homo sapiens
cgggatttagatcacgtcccgcaggccggcggaagtagctgatactctcattggttgcaaaaccttgatctgtgaaagcgggcgttttggaagataccggaagtagagtcacggagagtattaagaaatggagagaaaaataagcagaatccaccttgtttctgaacccagtataactcattttctacaagtatcttgggagaaaacactggaatctggttttgttattacacttactgatggtcattcagcatggactgggacagtttctgaatcagagatttcccaagaagctgatgacatggcaatggaaaaagggaaatatgttggtgaactgagaaaagcattgttgtcaggagcaggaccagctgatgtatacacgtttaatttttctaaagagtcttgttatttcttctttgagaaaaacctgaaagatgtctcattcagacttggttccttcaacctagagaaagttgaaaacccagctgaagtcattagagaacttatttgttattgcttggacaccattgcagaaaatcaagccaaaaatgagcacctgcagaaagaaaatgaaaggcttctgagagattggaatgatgttcaaggacgatttgaaaaatgtgtgagtgctaaggaagctttggagactgatctttataagcggtttattctggtgttgaatgagaagaaaacaaaaatcagaagtttgcataataaattattaaatgcagctcaagaacgagaaaaggacatcaaacaagaaggggaaactgcaatctgttctgaaatgactgctgaccgagatccagtctatgatgagagtactgatgaggaaagtgaaaaccaaactgatctctctgggttggcttcagctgctgtaagtaaagatgattccattatttcaagtcttgatgtcactgatattgcaccaagtagaaaaaggagacagcgaatgcaaagaaatcttgggacagaacctaaaatggctcctcaggagaatcagcttcaagaaaaggaaaattctaggcctgattcttcactacctgagacgtcgaaaaaggagcacatctcagctgaaaacatgtctttagaaactctgagaaacagcagcccagaagacctctttgatgagatttaacagtctcaaaaaatactttgatgttcactagactatgttttctattcatttctttaaaatgaaaaaggagaatttcaagtcagcagccgctattaccgtatcttacaatttaattacatacacagtgaattgaaaccattgtgcaaaatggattacacatgtatacaaagatacgatttgatgatgacactggcacattgagttctaaactattcattcagcatgcctataattacataaattgtatgagactttttgttgcaaaggacacatttatcatattcattcacacatattatatgtgatagctgtccaacatcctgtctgggaagattttgaaaacaggacaaagaaaacatcattttaaaatgtcttcagctttttttgaatagacgtattcaaacatattctgaacattgatgtttgaacattttaatttgtgtgatgatgtagaaaatataattttagtttgtacataaacattgtgaaaatctgataataaaatttttgatacattgaaaaaaaaa

SEQ ID NO: 1334 - DNA, 1707 bp, Homo sapiens
cgggatttagatcacgtcccgcaggccggcggaagtagctgatactctcattggttgcaaaaccttgatctgtgaaagcgggcgttttggaagataccggaagtagagtcacggagaggtaggatccggaagtggggctgcctctttaaataacaaaaatctgaggtattaagaaatggagagaaaaataagcagaatccaccttgtttctgaacccagtataactcattttctacaagtatcttgggagaaaacactggaatctggttttgttattacacttactgatggtcattcagcatggactgggacagtttctgaatcagagatttcccaagaagctgatgacatggcaatggaaaaagggaaatatgttggtgaactgagaaaagcattgttgtcaggagcaggaccagctgatgtatacacgtttaatttttctaaagagtcttgttatttcttctttgagaaaaacctgaaagatgtctcattcagacttggttccttcaacctagagaaagttgaaaacccagctgaagtcattagagaacttatttgttattgcttggacaccattgcagaaaatcaagccaaaaatgagcacctgcagaaagaaaatgaaaggcttctgagagattggaatgatgttcaaggacgatttgaaaaatgtgtgagtgctaaggaagctttggagactgatctttataagcggtttattctggtgttgaatgagaagaaaacaaaaatcagaagtttgcataataaattattaaatgcagctcaagaacgagaaaaggacatcaaacaagaaggggaaactgcaatctgttctgaaatgactgctgaccgagatccagtctatgatgagagtactgatgaggaaagtgaaaaccaaactgatctctctgggttggcttcagctgctgtaagtaaagatgattccattatttcaagtcttgatgtcactgatattgcaccaagtagaaaaaggagacagcgaatgcaaagaaatcttgggacagaacctaaaatggctcctcaggagaatcagcttcaagaaaaggaaaagcctgattcttcactacctgagacgtcgaaaaaggagcacatctcagctgaaaacatgtctttagaaactctgagaaacagcagcccagaagacctctttgatgagatttaacagtctcaaaaaatactttgatgttcactagactatgttttctattcatttctttaaaatgaaaaaggagaatttcaagtcagcagccgctattaccgtatcttacaatttaattacatacacagtgaattgaaaccattgtgcaaaatggattacacatgtatacaaagatacgatttgatgatgacactggcacattgagttctaaactattcattcagcatgcctataattacataaattgtatgagactttttgttgcaaaggacacatttatcatattcattcacacatattatatgtgatagctgtccaacatcctgtctgggaagattttgaaaacaggacaaagaaaacatcattttaaaatgtcttcagctttttttgaatagacgtattcaaacatattctgaacattgatgtttgaacattttaatttgtgtgatgatgtagaaaatataattttagtttgtacataaacattgtgaaaatctgataataaaatttttgatacattgaaaaaaaaa

SEQ ID NO: 1335 - DNA, 2393 bp, Homo sapiens
agcggcagggaggggctcttcacccagtccggcagttgaagctcggcgctcgggttacccctgcagcgacgccccctggtcccacagataccactgctgctcccgccctttcgctcctcggccgcgcaatgggcacccgcgacgacgagtacgactacctctttaaagttgtccttattggagattctggtgttggaaagagtaatctcctgtctcgatttactcgaaatgagtttaatctggaaagcaagagcaccattggagtagagtttgcaacaagaagcatccaggttgatggaaaaacaataaaggcacagatatgggacacagcagggcaagagcgatatcgagctataacatcagcatattatcgtggagctgtaggtgccttattggtttatgacattgctaaacatctcacatatgaaaatgtagagcgatggctgaaagaactgagagatcatgctgatagtaacattgttatcatgcttgtgggcaataagagtgatctacgtcatctcagggcagttcctacagatgaagcaagagcttttgcagaaaagaatggtttgtcattcattgaaacttcggccctagactctacaaatgtagaagctgcttttcagacaattttaacagagatttaccgcattgtttctcagaagcaaatgtcagacagacgcgaaaatgacatgtctccaagcaacaatgtggttcctattcatgttccaccaaccactgaaaacaagccaaaggtgcagtgctgtcagaacatctaaggcatttctcttctcccctagaaggctgtgtatagtccatttcccaggtctgagatttaaatatatttgtaattcttgtgtcacttttgtgttttattacttcatacttatgaatttttccatgtcctaagtcttttgattttagctttataaaatcatccacttgtcccgaatgactgcagctttttttcatgctatggcttcactagccttagtttaataaactgaatgtttggattcctcagttattgtttacttttcatcatggaagcctgtcactgtatgtaggacataatagaacttgatcacttgaagctcagacctattggtcttgatcaaatcaaactaagaagaccttagaaataagctaccattttgccacagagcagcttataggtaatacactcttctctcagtgcagtgtacatttccacaaatctaagaattgccctataaacatagcaggattttgagagcttgaaaattttccattattctggacatgaatttctaaaatgccttaataggtttatgtagttgagtaaattttgttttttaatttttgtaagcatcaaagttgattagagaggggggcactttttctggagaattctcttagtaaacacaaaagattgttacggtttcattagtagtatggttgtggggccataagttaaacagtgctgcctggtaggctgggaactgaagagacttgtggtattccatctcgggtgcctctgttggcaatgatcaggcagcccaaaagatttaaatgatctataataatttccaagcggtagattatgtggcattttattgctcaggcaataattggtttaatgctggtagtgtcaaattttgaagtgttaattttgtcttagaaccttccagtaagtgaaatacaacctagttttatcaccatatccaccagcaggcatggataattattttaacaatgctaatatttgagttttgcagtatattatagaatatagtccagttaaatctttggtttcagtatgtctgaagagtacagtgagaggttaatttctgctcaagtggtaccacttaaaggcatgtattcttttagtatgtaaaatgaaatagtaccttgagtttaaatagaatgcatttaggcattgtagagatctgaaatagttttcttccactacattgttgaaatcaatgaagcaattagtttctcattcagaaatgtgcacactaatatttagttttgctttctcgtggataatattaagcacttactctgcagtttcctggaagttgtgtcaactgcagtgatactattcaggatggtgggaaatccccaaaaatatgtatgtgtgggcttgcttagattactatatttcatagttaatcttttgtctcttgcggtgctcatgatgtgtggggcacacggaaggcattgctgtagtcagtcattttggttttcttctatagccattttattattttagtgtattagttatgaagataatattatctatttgtaaattgctactttgtattttatgcatgctctgtaatttgatttttttttagttattgatttggattatattcacattctaataaacagttatagggggatta

SEQ ID NO: 1336 - DNA, 4342 bp, Homo sapiens
gggtctgaggtttggtgactgcggggcaggccgggggcagctgtctgtctggctctttttgacagcccccagtgcgaaaggctgccagcatgtcatcagtgagccccatccagatccccagtcgcctcccgctgctgctcacccacgagggcgtcctgctgcccggctccaccatgcgcaccagcgtggactcggcccgcaacctgcagctggtgcggagccgccttctgaagggcacgtcgctgcaaagcaccatcctgggcgtcatccccaacacgcctgaccccgccagcgacgcgcaggacctgccgccgctgcacaggattggcacagctgcactggccgttcaggttgtgggcagtaactggcccaagccccactacactctgttgattacaggcctatgccgtttccagattgtacaggtcttaaaagagaagccatatcccattgctgaagtggagcagttggaccgacttgaggagtttcccaacacctgtaaaatgagggaggagctaggagaactatcagagcagttttacaaatatgcagtacaattggttgaaatgttggatatgtctgtccctgcagttgctaaattgagacgtcttttagatagtcttccaagggaagctttaccagacatcttgacatcaattatccgaacaagcaacaaagagaaactccagattttagatgctgtgagcctagaggagcggttcaagatgactataccactgcttgtcagacaaattgaaggcctgaaattgcttcaaaaaaccagaaaacccaagcaagatgatgataagagggttatagcaatacgccctattaggagaattacacatatctcaggtactttagaagatgaagatgaagatgaagataatgatgacattgtcatgctagagaaaaaaatacgaacatctagtatgccagagcaggcccataaagtctgtgtcaaagagataaagagactcaaaaaaatgcctcagtcaatgccagaatatgctctgactagaaattatttggaacttatggtagaacttccttggaacaaaagtacaactgaccgcctggacattagggcagcccggattcttctggataatgaccattacgccatggaaaaattgaagaaaagagtactggaatacttggctgtcagacagctcaaaaataacctgaagggcccaatcctatgctttgttggccctcctggagttggtaaaacaagtgtgggaagatcagtggccaagactctaggtcgagagttccacaggattgcacttggaggagtatgtgatcagtctgacattcgaggacacaggcgcacctatgttggcagcatgcctggtcgcatcatcaacggcttgaagactgtgggagtgaacaacccagtgttcctattagatgaggttgacaaactgggaaaaagtctacagggtgatccagcagcagctctgcttgaggtgttggatcctgaacaaaaccataacttcacagatcattatctaaatgtggcctttgacctttctcaagttctttttatagctactgccaacaccactgctaccattccagctgccttgttggacagaatggagatcattcaggttccaggttatacacaggaggagaagatagagattgcccataggcacttgatccccaagcagctggaacaacatgggctgactccacagcagattcagataccccaggtcaccactcttgacatcatcaccaggtataccagagaggcaggggttcgttctctggatagaaaacttggggccatttgccgagctgtggccgtgaaggtggcagaaggacagcataaggaagccaagttggaccgttctgatgtgactgagagagaaggttgcagagaacacatcttagaagatgaaaaacctgaatctatcagtgacactactgacttggctctaccacctgaaatgccgattttgattgatttccatgctctgaaagacatccttgggcccccgatgtatgaaatggaggtatctcagcgtttgagtcagccaggagtagcaataggtttggcttggactcccttaggtggagaaatcatgttcgtggaggcgagtcgaatggatggcgagggccagttaactctgaccggccagctcggggacgtgatgaaggagtccgcccacctcgctatcagctggctccgcagcaacgcaaagaagtaccagctgaccaatgcttttggaagttttgatcttcttgacaacacagacatccatctgcacttcccagctggagctgtcacaaaagatggaccatctgctggagttaccatagtaacctgtctcgcctcactttttagtgggcggctggtacgttcagatgtagccatgactggagaaattacactgagaggtcttgttcttccagtgggtggaattaaagacaaagtgctggcggcacacagagcgggactgaagcaagtcattattcctcggagaaatgaaaaagaccttgagggaatcccaggcaacgtacgacaggatttaagttttgtcacagcaagctgcctggatgaggttcttaatgcagcttttgatggtggctttactgtcaagaccagacctggtctgttaaatagcaaactgtaggtccaaatctcaattttttagaattttaagttatgaagtgctcaaaggtactgacacagttgattttattcacaccattaggggtatgcaagatgtccctgttttataaacataatcacaacagtaataaacctcaagtagtggctagtgtttagtatagaaatataagatgttgatttagtaaactgataaaaatcgaattcttgtctttttagtgggatccttactgtccctggaaagatatagcatagtggttctcagcacagtctccagaacagaagcatctgtagtacctggtaacttgttagaaatgtacattctcaggctccacagcaggccgcctgaatcaaatcctgggaggtggggacagaaatctgtgttttaagaagccttccaggtaattctgctgcacactcaagttcaggaaccaccggtatagaccattaccttagtggatttacctgtagagtttattggatcctgaaaccaatcaattacttagaactaggcaaagatgaaagtatagccaactattcttggctatatatatatattcaagtgggccgggcgtgatggctcacacctgtaattccagcactttgggaggtcgaggtaggcagatcaccgagcccaagagttcaagacaatcctggccaacggcgaaactctgtctctacaaaaaatatacaggcgtgttagcatgtgcctgtaatcccagcttcttgggaagctgaggcacaagaattgcctgaacccaggaggtggaggttgcagtgagctgggatcgcgccattgcactccagcctggctgacagagcgagactgtctctaaaaaaaaaagactcaagtggaccctacaatgaagcctacacatcccaatagaagccccttcttatgctgagggaagcagccctcagaacatgatagcttgtatccagcagagtggcacgtgctggcacacctcacagaagcaccctggccctggatgcctgcaacctcagaagagtgcagctcccagagggaggcagccatccatctgggatggtcctaagcatggaatcctaactcctgattccgtctcctatttcttgcttggctacgccagttcccaaatctggtagatgtccatgcccatgtgctcctgctgggactcaattcaggctatgtatgactatgaagtcaggctcatctgcttactggctgtgtgaactttttgtatcttggttttcttcatccatgaaatccaagtaatactacctaattgttactgtggagattaagttcaaatgcaatgtatagtaatattaagcaatttctagttattattctagccagtaatggacttcagaatcttttattacacaatataagaatatgtatgtaaagacattttggaatttcctggatgagaaggaagtctgggctgggcatggtggctcacccctgtaaccctagcactttaggaaatcgaggcgagtggatcacttaagctcaggagttcaaggccagcctgggcaacatggcaaaaccccatttctacaaaaaatacaaaaattagctgggcatggtggcacccgcctgtagtccagctacttgaggctgagatgggaggatgagggaggtcggggctgcagtgagccaagatcacgccactgcactccagcaccctgggcgacagagtgagaccctgtctc

SEQ ID NO: 1337 - DNA, 2883 bp, Homo sapiens
ccgggtgggctccaggcggccggtccccggcctccccccatggccaccgccccctcttatcccgccgggctccctggctctcccgggccggggtctcctccgccccccggcggcctagagctgcagtcgccgccaccgctactgccccagatcccggccccgggttccggggtctcctttcacatccagatcgggctgacccgcgagttcgtgctgttgcccgccgcctccgagctggctcatgtgaagcagctggcctgttccatcgtggaccagaagttccctgagtgtggcttctacggcctttacgacaagatcctgcttttcaaacatgaccccacgtcggccaacctcctgcagctggtgcgctcgtccggagacatccaggagggcgacctggtggaggtggtgctgtcggcctcggccaccttcgaggacttccagatccgcccgcacgccctcacggtgcactcctatcgggcgcctgccttctgtgatcactgcggggagatgctcttcggcctagtgcgccagggcctcaagtgcgatggctgcgggctgaactaccacaagcgctgtgccttcagcatccccaacaactgtagtggggcccgcaaacggcgcctgtcatccacgtctctggccagtggccactcggtgcgcctcggcacctccgagtccctgccctgcacggctgaagagctgagccgtagcaccaccgaactcctgcctcgccgtcccccgtcatcctcttcctcctcttctgcctcatcgtatacgggccgccccattgagctggacaagatgctgctctccaaggtcaaggtgccgcacaccttcctcatccacagctatacacggcccaccgtttgccaggcttgcaagaaactcctcaagggcctcttccggcagggcctgcaatgcaaagactgcaagtttaactgtcacaaacgctgcgccacccgcgtccctaatgactgcctgggggaggcccttatcaatggagatgtgccgatggaggaggccaccgatttcagcgaggctgacaagagcgccctcatggatgagtcagaggactccggtgtcatccctggctcccactcagagaatgcgctccacgccagtgaggaggaggaaggcgagggaggcaaggcccagagctccctggggtacatccccctaatgagggtggtgcaatcggtgcgacacacgacgcggaaatccagcaccacgctgcgggagggttgggtggttcattacagcaacaaggacacgctgagaaagcggcactattggcgcctggactgcaagtgtatcacgctcttccagaacaacacgaccaacagatactataaggaaattccgctgtcagaaatcctcacggtggagtccgcccagaacttcagccttgtgccgccgggcaccaacccacactgctttgagatcgtcactgccaatgccacctacttcgtgggcgagatgcctggcgggactccgggtgggccaagtgggcagggggctgaggccgcccggggctgggagacagccatccgccaggccctgatgcccgtcatccttcaggacgcacccagcgccccaggccacgcgccccacagacaagcttctctgagcatctctgtgtccaacagtcagatccaagagaatgtggacattgccactgtctaccagatcttccctgacgaagtgctgggctcagggcagtttggagtggtctatggaggaaaacaccggaagacaggccgggacgtggcagttaaggtcattgacaaactgcgcttccctaccaagcaggagagccagctccggaatgaagtggccattctgcagagcctgcggcatcccgggatcgtgaacctggagtgcatgttcgagacgcctgagaaagtgtttgtggtgatggagaagctgcatggggacatgttggagatgatcctgtccagtgagaagggccggctgcctgagcgcctcaccaagttcctcatcacccagatcctggtggctttgagacaccttcacttcaagaacattgtccactgtgacttgaaaccagaaaacgtgttgctggcatcagcagacccatttcctcaggtgaagctgtgtgactttggctttgctcgcatcatcggcgagaagtcgttccgccgctcagtggtgggcacgccggcctacctggcacccgaggtgctgctcaaccagggctacaaccgctcgctggacatgtggtcagtgggcgtgatcatgtacgtcagcctcagcggcaccttccctttcaacgaggatgaggacatcaatgaccagatccagaacgccgccttcatgtacccggccagcccctggagccacatctcagctggagccattgacctcatcaacaacctgctgcaggtgaagatgcgcaaacgctacagcgtggacaaatctctcagccacccctggttacaggagtaccagacgtggctggacctccgagagctggaggggaagatgggagagcgatacatcacgcatgagagtgacgacgcgcgctgggagcagtttgcagcagagcatccgctgcctgggtctgggctgcccacggacagggatctcggtggggcctgtccaccacaggaccacgacatgcaggggctggcggagcgcatcagtgttctctgaggtcctgtgccctcgtccagctgctgccctccacagcggttcttcacaggatcccagcaatgaactgttctagggaaagtggcttcctgcccaaactggatgggacacgtggggagtggggtggggggagctatttccaaggcccctccctgtttccccagcaattaaaacggactcatctctggccccatggccttgatctcagca

SEQ ID NO: 1338 - DNA, 6113 bp, Homo sapiens
taatacttaattaccttctaataattggagcagaagatgaacccaactaatcctttcagtgggcagcagcctagtgctttttcggcgtcttctagtaatgtaggaacacttccatctaagccgccatttcgatttggtcaaccttctctttttggacaaaacagtaccttatctgggaagagctcgggattttcacaggtatccagctttccagcgtcttctggagtaagtcattcctcttcagtgcaaacattagggttcacccaaacctcaagtgttggacccttttctggacttgagcacacttccacctttgtggctacctctgggccttcaagttcatctgtgctgggaaacacaggatttagttttaaatcacccaccagtgttggggctttcccaagcacttctgcttttggacaagaagctggagaaatagtgaactctggttttgggaaaacagaattcagctttaaacctctggaaaatgcagtgttcaaaccaatactgggggctgaatctgagccagagaaaacccagagccaaattgcttctgggttttttacattttcccacccaattagtagtgcacctggaggcctggcccctttctcttttcctcaagtaacaagtagttcagctaccacttcaaattttaccttttcaaaacctgttagtagtaataattcattatctgcctttacccctgctttgtcaaaccaaaatgtagaggaagagaagagaggacctaagtcaatatttggaagttctaataatagcttcagtagcttccctgtatcatctgcggttttgggcgaacctttccaggctagcaaagcaggtgtcaggcaggggtgtgaagaagctgtttcccaggtggaaccacttcccagcctaatgaaaggactgaaaaggaaggaggaccaggatcgctccccaaggagacatggccacgagccagcagaagattcggatcctctgtcccggggcgatcatcctccagacaaacgacctgtccgcctgaatcgaccccggggaggtactttatttggtcggacgatacaggatgttttcaaaagcaataaggaagtaggtcgtctgggcaacaaggaggccaaaaaggaaactggctttgttgagtctgcagaaagtgaccacatggctatcccaggagggaatcagtctgtcctggcaccttcccggattccaggtgtgaataaagaggaagaaactgaaagtagagagaagaaagaagattctctaagaggaactccggcgcgtcagagtaacagaagcgagagcacagacagtcttgggggcttgtctccctctgaagtcacagccatccagtgcaagaacatccctgactacctcaacgacaggaccattctggagaaccattttggcaaaattgctaaagtgcagcgcatctttaccaggcgcagcaaaaagcttgcagtggtacatttctttgatcatgcatctgcagccctggctagaaagaaggggaaaagtttgcataaagacatggctatcttttggcacaggaagaaaataagccccaataagaaacccttttccctgaaggagaagaaaccaggtgacggtgaagtcagcccgagcacagaggatgcaccctttcagcactctcctcttggcaaggccgcagggaggactggtgctagcagcctcctgaataaaagctctccagtgaagaagccaagtcttctaaaggcccaccaattcgagggagactcttttgactcagcctccgagggctccgagggcctcgggccatgtgtgctctccctcagtaccctgataggcactgtggctgagacatccaaggagaagtaccgcctgcttgaccagagagacaggatcatgcggcaagctcgggtgaagagaaccgatctggacaaagcgaggacttttgttggcacctgcctggatatgtgtcctgagaaggagaggtacatgcgggagacccgtagccagctgagcgtgttcgaagtggtcccagggactgaccaggtggaccacgcagcagctgtgaaagagtacagtcggtcctcggcggatcaggaggagcccctgccccacgagctgcggcccttgccagtgctcagcaggaccatggactacctggtgacccagatcatggaccagaaggagggcagcctgcgggattggtatgacttcgtgtggaaccgcacgcgtggcatacggaaggatatcacgcagcagcacctctgtgaccccctgacggtgtccctgattgagaagtgcacccggtttcacatccactgtgcccacttcatgtgtgaggagcccatgtcctcctttgatgccaagatcaataatgagaacatgaccaagtgcctgcagagcctgaaggagatgtaccaggacctgagaaacaagggtgtcttctgtgccagcgaagcggagttccagggctacaatgttctgctcagtctcaacaagggagacatcctaagagaagtacaacagttccatcctgctgttagaaactcatctgaggtgaaatttgctgttcaggcttttgctgcattgaacagtaataattttgtgagatttttcaaactggtccagtcagcttcttacctgaacgcttgtcttttacactgttacttcagtcagatccgcaaggatgctctccgggcgctcaactttgcgtacacggtgagcacacagcgatctaccatctttcccctggatggtgtggtgcgcatgctgctgttcagagactgtgaagaggccaccgacttcctcacctgccacggcctcaccgtttccgacggctgtgtggagctgaaccggtctgcattcctggaaccagagggattatccaagaccaggaagtcggtgtttattactaggaagctgacggtgtcagtcggggaaattgtgaacggagggccattgccccccgtccctcgtcatacccctgtgtgcagcttcaactcccagaacaagtacatcggggagagcctggccgcggagctgcccgtcagcacccagagacccggctccgacacagtgggcggagggagaggagaggagtgtggtgtagagccggatgcacccctgtccagtctcccacagtctctaccagcccctgcgccctcaccagtgcctctgcctcctgtcctggcactgaccccgtctgtggcgcccagcctcttccagctgtctgtgcagcctgaaccaccgcctccagagcccgtgcccatgtactctgacgaggacctggcgcaggtggtggacgagctcatccaggaggccctgcagagggactgtgaggaagttggctctgcgggtgctgcctacgcagctgccgccctgggtgtttctaatgctgctatggaggatttgttaacagctgcaaccacgggcattttgaggcacattgcagctgaagaagtgtctaaggaaagagagcgaagggagcaggagaggcagcgggctgaagaggaaaggttgaaacaagagagagagctggtgttaagtgagctgagccagggcctggccgtggagctgatggaacgcgtgatgatggagtttgtgagggaaacctgctcccaggagttgaagaatgcagtagagacagaccagagggtccgtgtggcccgttgctgtgaggatgtctgtgcccacttagtggacttgtttctcgtggaggaaatcttccagactgcaaaggagaccctccaggagcttcagtgcttctgcaagtatctacagcggtggagggaagctgtcacagcccgcaagaaactgaggcgccaaatgcgggctttccctgctgcgccctgctgcgtggacgtgagcgaccggctgagggcgctggcgcccagcgcagagtgccccattgctgaagagaacctggccaggggcctcctggacctgggccatgcagggagattgggcatctcctgcaccaggttaaggcggctcagaaacaagacagctcaccagatgaaggttcagcacttctaccagcagctgctgagtgatgtggcatgggcgtctctggacctgccatccctcgtggctgagcacctccctgggaggcaggagcatgtgttttggaagctggtgctggtgttgccggatgtagaggagcagtccccagagagttgtggcagaattctagcaaattggttaaaagtcaagttcatgggagatgaaggctcagtggatgacacatccagcgatgctggtgggattcagacgctttcgcttttcaactcacttagcagcaaaggggatcagatgatttctgttaacgtgtgtataaaggtggcccatggcgccctcagtgatggtgccattgatgctgtggagacacagaaggacctcctgggagccagtgggctcatgctgctgcttccccccaaaatgaagagtgaggacatggcagaggaggacgtgtactggctgtcggccttgctgcagctcaagcagctcctgcaggctaagcccttccagcctgcgcttcctctggtggttcttgtgcctagcccaggaggggacgccgttgagaaggaagtagaagatggtctgatgctacaggacttggtttcagctaagctgatttcagattacactgttaccgagatccctgataccattaatgatctacaaggttcaactaaggttttgcaagcagtgcagtggctggtttcccactgcccccattcccttgacctctgctgccagactctcattcagtacgtcgaagacgggattggccatgagtttagtggccgctttttccatgacagaagagagaggcgtctgggcggtcttgcttctcaggagcctggcgccatcattgagctgtttaacagtgtgctgcagttcctggcttctgtggtgtcctctgaacagctgtgtgacctgtcctggcctgtcactgagtttgctgaggcagggggcagccggctgcttcctcacctgcactggaatgccccagagcacctggcctggctgaagcaggctgtgctcgggttccagcttccgcagatggaccttccacccctgggggccccctggctccccgtgtgctccatggttgtccagtacgcctcccagatccccagctcacgccagacacagcctgtcctccagtcccaggtggagaacctgctccacagaacctactgtaggtggaagagcaagagtccctccccagtccatggggcaggcccctcggtcatggagatcccatgggatgatcttatcgccttgtgtatcaaccacaagctgagagactggacgcccccccggcttcctgttacatcagaggcgctgagtgaagatggtcagatatgtgtgtatttttttaaaaacgatttgaaaaaatatgatgttcctttgtcgtgggaacaagccaggttgcagacgcagaaggagctacagctgagagagggacgtttggcaataaagccttttcatccttctgcaaacaattttcccataccattgcttcacatgcaccgtaactggaagaggagcacagagtgtgctcaagaggggaggattcccagcacagaggatctgatgcgaggagcttctgctgaggagctcttggcgcagtgtttgtcgagcagtctgctgctggagaaagaagagaacaagaggtttgaagatcagcttcagcaatggttgtctgaagactcaggagcatttacggatttaacttcccttcccctctatcttcctcagactctagtgtctctttctcacactattgaacctgtgatgaaaacatctgtaactactagcccacagagtgacatgatgagggagcaactgcagctgtcagaggcgacaggaacgtgtctaggcgaacgactaaagcacctggaaaggctgatccggagttcaagggaagaggaagttgcctctgagctccatctctctgcgctgctagacatggtggacatttgagcagcctgacctgtggggagggggtctctcccgaagagtttctgtttttactcaaaataatgttattctcagatgcttgatgcactgttggaaatgtgattaatttaatcatgcagataaaccatttaaatgtc

SEQ ID NO: 1339 - DNA, 3316 bp, Homo sapiens
cactctctttctctctccctctggcatgcatgctgctggtaggagacccccaagtcaacattgcttcagaaatcctttagcactcatttctcaggagaacttatggcttcagaatcacagctcggtttttaagatggacataacctgtacgaccttctgatgggctttcaactttgaactggatgtggacacttttctctcagatgacagaattactccaacttcccctttgcagttgcttcctttccttgaaggtagctgtatcttattttctttaaaaagctttttcttccaaagccacttgccatgccgaccgtcattagcgcatctgtggctccaaggacagcggctgagccccggtccccagggccagttcctcacccggcccagagcaaggccactgaggctgggggtggaaacccaagtggcatctattcagccatcatcagccgcaattttcctattatcggagtgaaagagaagacattcgagcaacttcacaagaaatgtctagaaaagaaagttctttatgtggaccctgagttcccaccggatgagacctctctcttttatagccagaagttccccatccagttcgtctggaagagacctccggaaatttgcgagaatccccgatttatcattgatggagccaacagaactgacatctgtcaaggagagctaggggactgctggtttctcgcagccattgcctgcctgaccctgaaccagcaccttcttttccgagtcataccccatgatcaaagtttcatcgaaaactacgcagggatcttccacttccagttctggcgctatggagagtgggtggacgtggttatagatgactgcctgccaacgtacaacaatcaactggttttcaccaagtccaaccaccgcaatgagttctggagtgctctgctggagaaggcttatgctaagctccatggttcctacgaagctctgaaaggtgggaacaccacagaggccatggaggacttcacaggaggggtggcagagttttttgagatcagggatgctcctagtgacatgtacaagatcatgaagaaagccatcgagagaggctccctcatgggctgctccattgatgatggcacgaacatgacctatggaacctctccttctggtctgaacatgggggagttgattgcacggatggtaaggaatatggataactcactgctccaggactcagacctcgaccccagaggctcagatgaaagaccgacccggacaatcattccggttcagtatgagacaagaatggcctgcgggctggtcagaggtcacgcctactctgtcacggggctggatgaggtcccgttcaaaggtgagaaagtgaagctggtgcggctgcggaatccgtggggccaggtggagtggaacggttcttggagtgatagatggaaggactggagctttgtggacaaagatgagaaggcccgtctgcagcaccaggtcactgaggatggagagttctggatgtcctatgaggatttcatctaccatttcacaaagttggagatctgcaacctcacggccgatgctctgcagtctgacaagcttcagacctggacagtgtctgtgaacgagggccgctgggtacggggttgctctgccggaggctgccgcaacttcccagatactttctggaccaaccctcagtaccgtctgaagctcctggaggaggacgatgaccctgatgactcggaggtgatttgcagcttcctggtggccctgatgcagaagaaccggcggaaggaccggaagctaggggccagtctcttcaccattggcttcgccatctacgaggttcccaaagagatgcacgggaacaagcagcacctgcagaaggacttcttcctgtacaacgcctccaaggccaggagcaaaacctacatcaacatgcgggaggtgtcccagcgcttccgcctgcctcccagcgagtacgtcatcgtgccctccacctacgagccccaccaggagggggaattcatcctccgggtcttctctgaaaagaggaacctctctgaggaagttgaaaataccatctccgtggatcggccagtgaaaaagaaaaaaaccaagcccatcatcttcgtttcggacagagcaaacagcaacaaggagctgggtgtggaccaggagtcagaggagggcaaaggcaaaacaagccctgataagcaaaagcagtccccacagccacagcctggcagctctgatcaggaaagtgaggaacagcaacaattccggaacattttcaagcagatagcaggagatgacatggagatctgtgcagatgagctcaagaaggtccttaacacagtcgtgaacaaacacaaggacctgaagacacacgggttcacactggagtcctgccgtagcatgattgcgctcatggatacagatggctctggaaagctcaacctgcaggagttccaccacctctggaacaagattaaggcctggcagaaaattttcaaacactatgacacagaccagtccggcaccatcaacagctacgagatgcgaaatgcagtcaacgacgcaggattccacctcaacaaccagctctatgacatcattaccatgcggtacgcagacaaacacatgaacatcgactttgacagtttcatctgctgcttcgttaggctggagggcatgttcagagcttttcatgcatttgacaaggatggagatggtatcatcaagctcaacgttctggagtggctgcagctcaccatgtatgcctgaaccaggctggcctcatccaaagccatgcaggatcactcaggatttcagtttcaccctctatttccaaagccatttacctcaaaggacccagcagctacacccctacaggcttccaggcacctcatcagtcatgctcctcctccattttaccccctacccatccttgatcggtcatgcctagcctgaccctttagtaaagcaatgaggtaggaagaacaaacccttgtccctttgccatgtggaggaaagtgcctgcctctggtccgagccgcctcggttctgaagcgagtgctcctgcttaccttgctctaggctgtctgcagaagcacctgccggtggcactcagcacctccttgtgctagagccctccatcaccttcacgctgtcccaccatgggccaggaaccaaaccagcactgggttctactgctgtggggtaaactaactcagtggaatagggctggttactttgggctgtccaactcataagtttggctgcattttgaaaaaagctgatctaaataaaggcatgtgtatggctggtc

SEQ ID NO: 1340 - DNA, 3298 bp, Homo sapiens
cactctctttctctctccctctggcatgcatgctgctggtaggagacccccaagtcaacattgcttcagaaatcctttagcactcatttctcaggagaacttatggcttcagaatcacagctcggtttttaagatggacataacctgtacgaccttctgatgggctttcaactttgaactggatgtggacacttttctctcagatgacagaattactccaacttcccctttgcagttgcttcctttccttgaaggtagctgtatcttattttctttaaaaagctttttcttccaaagccacttgccatgccgaccgtcattagcgcatctgtggctccaaggacagcggctgagccccggtccccagggccagttcctcacccggcccagagcaaggccactgaggctgggggtggaaacccaagtggcatctattcagccatcatcagccgcaattttcctattatcggagtgaaagagaagacattcgagcaacttcacaagaaatgtctagaaaagaaagttctttatgtggaccctgagttcccaccggatgagacctctctcttttatagccagaagttccccatccagttcgtctggaagagacctccggaaatttgcgagaatccccgatttatcattgatggagccaacagaactgacatctgtcaaggagagctaggggactgctggtttctcgcagccattgcctgcctgaccctgaaccagcaccttcttttccgagtcataccccatgatcaaagtttcatcgaaaactacgcagggatcttccacttccagttctggcgctatggagagtgggtggacgtggttatagatgactgcctgccaacgtacaacaatcaactggttttcaccaagtccaaccaccgcaatgagttctggagtgctctgctggagaaggcttatgctaagctccatggttcctacgaagctctgaaaggtgggaacaccacagaggccatggaggacttcacaggaggggtggcagagttttttgagatcagggatgctcctagtgacatgtacaagatcatgaagaaagccatcgagagaggctccctcatgggctgctccattgatgatggcacgaacatgacctatggaacctctccttctggtctgaacatgggggagttgattgcacggatggtaaggaatatggataactcactgctccaggactcagacctcgaccccagaggctcagatgaaagaccgacccggacaatcattccggttcagtatgagacaagaatggcctgcgggctggtcagaggtcacgcctactctgtcacggggctggatgaggtcccgttcaaaggtgagaaagtgaagctggtgcggctgcggaatccgtggggccaggtggagtggaacggttcttggagtgatagatggaaggactggagctttgtggacaaagatgagaaggcccgtctgcagcaccaggtcactgaggatggagagttctggatgtcctatgaggatttcatctaccatttcacaaagttggagatctgcaacctcacggccgatgctctgcagtctgacaagcttcagacctggacagtgtctgtgaacgagggccgctgggtacggggttgctctgccggaggctgccgcaacttcccagatactttctggaccaaccctcagtaccgtctgaagctcctggaggaggacgatgaccctgatgactcggaggtgatttgcagcttcctggtggccctgatgcagaagaaccggcggaaggaccggaagctaggggccagtctcttcaccattggcttcgccatctacgaggttcccaaagagatgcacgggaacaagcagcacctgcagaaggacttcttcctgtacaacgcctccaaggccaggagcaaaacctacatcaacatgcgggaggtgtcccagcgcttccgcctgcctcccagcgagtacgtcatcgtgccctccacctacgagccccaccaggagggggaattcatcctccgggtcttctctgaaaagaggaacctctctgaggaagttgaaaataccatctccgtggatcggccagtgcccatcatcttcgtttcggacagagcaaacagcaacaaggagctgggtgtggaccaggagtcagaggagggcaaaggcaaaacaagccctgataagcaaaagcagtccccacagccacagcctggcagctctgatcaggaaagtgaggaacagcaacaattccggaacattttcaagcagatagcaggagatgacatggagatctgtgcagatgagctcaagaaggtccttaacacagtcgtgaacaaacacaaggacctgaagacacacgggttcacactggagtcctgccgtagcatgattgcgctcatggatacagatggctctggaaagctcaacctgcaggagttccaccacctctggaacaagattaaggcctggcagaaaattttcaaacactatgacacagaccagtccggcaccatcaacagctacgagatgcgaaatgcagtcaacgacgcaggattccacctcaacaaccagctctatgacatcattaccatgcggtacgcagacaaacacatgaacatcgactttgacagtttcatctgctgcttcgttaggctggagggcatgttcagagcttttcatgcatttgacaaggatggagatggtatcatcaagctcaacgttctggagtggctgcagctcaccatgtatgcctgaaccaggctggcctcatccaaagccatgcaggatcactcaggatttcagtttcaccctctatttccaaagccatttacctcaaaggacccagcagctacacccctacaggcttccaggcacctcatcagtcatgctcctcctccattttaccccctacccatccttgatcggtcatgcctagcctgaccctttagtaaagcaatgaggtaggaagaacaaacccttgtccctttgccatgtggaggaaagtgcctgcctctggtccgagccgcctcggttctgaagcgagtgctcctgcttaccttgctctaggctgtctgcagaagcacctgccggtggcactcagcacctccttgtgctagagccctccatcaccttcacgctgtcccaccatgggccaggaaccaaaccagcactgggttctactgctgtggggtaaactaactcagtggaatagggctggttactttgggctgtccaactcataagtttggctgcattttgaaaaaagctgatctaaataaaggcatgtgtatggctggtc

SEQ ID NO: 1341 - DNA, 3040 bp, Homo sapiens
cactctctttctctctccctctggcatgcatgctgctggtaggagacccccaagtcaacattgcttcagaaatcctttagcactcatttctcaggagaacttatggcttcagaatcacagctcggtttttaagatggacataacctgtacgaccttctgatgggctttcaactttgaactggatgtggacacttttctctcagatgacagaattactccaacttcccctttgcagttgcttcctttccttgaaggtagctgtatcttattttctttaaaaagctttttcttccaaagccacttgccatgccgaccgtcattagcgcatctgtggctccaaggacagcggctgagccccggtccccagggccagttcctcacccggcccagagcaaggccactgaggctgggggtggaaacccaagtggcatctattcagccatcatcagccgcaattttcctattatcggagtgaaagagaagacattcgagcaacttcacaagaaatgtctagaaaagaaagttctttatgtggaccctgagttcccaccggatgagacctctctcttttatagccagaagttccccatccagttcgtctggaagagacctccggaaatttgcgagaatccccgatttatcattgatggagccaacagaactgacatctgtcaaggagagctaggggactgctggtttctcgcagccattgcctgcctgaccctgaaccagcaccttcttttccgagtcataccccatgatcaaagtttcatcgaaaactacgcagggatcttccacttccagttctggcgctatggagagtgggtggacgtggttatagatgactgcctgccaacgtacaacaatcaactggttttcaccaagtccaaccaccgcaatgagttctggagtgctctgctggagaaggcttatgctaagctccatggttcctacgaagctctgaaaggtgggaacaccacagaggccatggaggacttcacaggaggggtggcagagttttttgagatcagggatgctcctagtgacatgtacaagatcatgaagaaagccatcgagagaggctccctcatgggctgctccattgatacaatcattccggttcagtatgagacaagaatggcctgcgggctggtcagaggtcacgcctactctgtcacggggctggatgaggtcccgttcaaaggtgagaaagtgaagctggtgcggctgcggaatccgtggggccaggtggagtggaacggttcttggagtgatagatggaaggactggagctttgtggacaaagatgagaaggcccgtctgcagcaccaggtcactgaggatggagagttctggatgtcctatgaggatttcatctaccatttcacaaagttggagatctgcaacctcacggccgatgctctgcagtctgacaagcttcagacctggacagtgtctgtgaacgagggccgctgggtacggggttgctctgccggaggctgccgcaacttcccagatactttctggaccaaccctcagtaccgtctgaagctcctggaggaggacgatgaccctgatgactcggaggtgatttgcagcttcctggtggccctgatgcagaagaaccggcggaaggaccggaagctaggggccagtctcttcaccattggcttcgccatctacgaggttcccaaagagatgcacgggaacaagcagcacctgcagaaggacttcttcctgtacaacgcctccaaggccaggagcaaaacctacatcaacatgcgggaggtgtcccagcgcttccgcctgcctcccagcgagtacgtcatcgtgccctccacctacgagccccaccaggagggggaattcatcctccgggtcttctctgaaaagaggaacctctctgaggaagttgaaaataccatctccgtggatcggccagtgccacagcctggcagctctgatcaggaaagtgaggaacagcaacaattccggaacattttcaagcagatagcaggagatgacatggagatctgtgcagatgagctcaagaaggtccttaacacagtcgtgaacaaacacaaggacctgaagacacacgggttcacactggagtcctgccgtagcatgattgcgctcatggatacagatggctctggaaagctcaacctgcaggagttccaccacctctggaacaagattaaggcctggcagaaaattttcaaacactatgacacagaccagtccggcaccatcaacagctacgagatgcgaaatgcagtcaacgacgcaggattccacctcaacaaccagctctatgacatcattaccatgcggtacgcagacaaacacatgaacatcgactttgacagtttcatctgctgcttcgttaggctggagggcatgttcagagcttttcatgcatttgacaaggatggagatggtatcatcaagctcaacgttctggagtggctgcagctcaccatgtatgcctgaaccaggctggcctcatccaaagccatgcaggatcactcaggatttcagtttcaccctctatttccaaagccatttacctcaaaggacccagcagctacacccctacaggcttccaggcacctcatcagtcatgctcctcctccattttaccccctacccatccttgatcggtcatgcctagcctgaccctttagtaaagcaatgaggtaggaagaacaaacccttgtccctttgccatgtggaggaaagtgcctgcctctggtccgagccgcctcggttctgaagcgagtgctcctgcttaccttgctctaggctgtctgcagaagcacctgccggtggcactcagcacctccttgtgctagagccctccatcaccttcacgctgtcccaccatgggccaggaaccaaaccagcactgggttctactgctgtggggtaaactaactcagtggaatagggctggttactttgggctgtccaactcataagtttggctgcattttgaaaaaagctgatctaaataaaggcatgtgtatggctggtc

SEQ ID NO: 1342 - DNA, 1661 bp, Homo sapiens
ccctcctccacgcttacagccacacacacagtcacacagacgcgttctgagggtggctgcccgcttgggatggaggaatcacttccctcagaacccagccaagtcctctaggcctccttgggggtccttccagcctgaggggcttcggagctgaggagcagctgttctgatgcacgggaacaagcagcacctgcagaaggacttcttcctgtacaacgcctccaaggccaggagcaaaacctacatcaacatgcgggaggtgtcccagcgcttccgcctgcctcccagcgagtacgtcatcgtgccctccacctacgagccccaccaggagggggaattcatcctccgggtcttctctgaaaagaggaacctctctgaggaagttgaaaataccatctccgtggatcggccagtgaaaaagaaaaaaaccaagcccatcatcttcgtttcggacagagcaaacagcaacaaggagctgggtgtggaccaggagtcagaggagggcaaaggcaaaacaagccctgataagcaaaagcagtccccacagccacagcctggcagctctgatcaggaaagtgaggaacagcaacaattccggaacattttcaagcagatagcaggagatgacatggagatctgtgcagatgagctcaagaaggtccttaacacagtcgtgaacaaacacaaggacctgaagacacacgggttcacactggagtcctgccgtagcatgattgcgctcatggatacagatggctctggaaagctcaacctgcaggagttccaccacctctggaacaagattaaggcctggcagaaaattttcaaacactatgacacagaccagtccggcaccatcaacagctacgagatgcgaaatgcagtcaacgacgcaggattccacctcaacaaccagctctatgacatcattaccatgcggtacgcagacaaacacatgaacatcgactttgacagtttcatctgctgcttcgttaggctggagggcatgttcagagcttttcatgcatttgacaaggatggagatggtatcatcaagctcaacgttctggagtggctgcagctcaccatgtatgcctgaaccaggctggcctcatccaaagccatgcaggatcactcaggatttcagtttcaccctctatttccaaagccatttacctcaaaggacccagcagctacacccctacaggcttccaggcacctcatcagtcatgctcctcctccattttaccccctacccatccttgatcggtcatgcctagcctgaccctttagtaaagcaatgaggtaggaagaacaaacccttgtccctttgccatgtggaggaaagtgcctgcctctggtccgagccgcctcggttctgaagcgagtgctcctgcttaccttgctctaggctgtctgcagaagcacctgccggtggcactcagcacctccttgtgctagagccctccatcaccttcacgctgtcccaccatgggccaggaaccaaaccagcactgggttctactgctgtggggtaaactaactcagtggaatagggctggttactttgggctgtccaactcataagtttggctgcattttgaaaaaagctgatctaaataaaggcatgtgtatggctggtcaaaaaaaaaaaaaaaaaa

SEQ ID NO: 1343 - DNA, 1291 bp, Homo sapiens
cataatcctgaccctgagccagtgccaggtctccaagtgccttctgaatgaccacaggcgattggttttagtggtaggtgtgtggggatctgttctggtcatctggatgctggtcatcggtgtgcagtattgatcaggacctgcaaacccaaaagcttatgggagctggcacgtcacccacagcctggcagctctgatcaggaaagtgaggaacagcaacaattccggaacattttcaagcagatagcaggagatgacatggagatctgtgcagatgagctcaagaaggtccttaacacagtcgtgaacaaacacaaggacctgaagacacacgggttcacactggagtcctgccgtagcatgattgcgctcatggatacagatggctctggaaagctcaacctgcaggagttccaccacctctggaacaagattaaggcctggcagaaaattttcaaacactatgacacagaccagtccggcaccatcaacagctacgagatgcgaaatgcagtcaacgacgcaggattccacctcaacaaccagctctatgacatcattaccatgcggtacgcagacaaacacatgaacatcgactttgacagtttcatctgctgcttcgttaggctggagggcatgttcagagcttttcatgcatttgacaaggatggagatggtatcatcaagctcaacgttctggagtggctgcagctcaccatgtatgcctgaaccaggctggcctcatccaaagccatgcaggatcactcaggatttcagtttcaccctctatttccaaagccatttacctcaaaggacccagcagctacacccctacaggcttccaggcacctcatcagtcatgctcctcctccattttaccccctacccatccttgatcggtcatgcctagcctgaccctttagtaaagcaatgaggtaggaagaacaaacccttgtccctttgccatgtggaggaaagtgcctgcctctggtccgagccgcctcggttctgaagcgagtgctcctgcttaccttgctctaggctgtctgcagaagcacctgccggtggcactcagcacctccttgtgctagagccctccatcaccttcacgctgtcccaccatgggccaggaaccaaaccagcactgggttctactgctgtggggtaaactaactcagtggaatagggctggttactttgggctgtccaactcataagtttggctgcattttgaaaaaagctgatctaaataaaggcatgtgtatggctggtcaaaaaaaaaaaaaaaaaa

SEQ ID NO: 1344 - DNA, 1309 bp, Homo sapiens
cataatcctgaccctgagccagtgccaggtctccaagtgccttctgaatgaccacaggcgattggttttagtggtaggtgtgtggggatctgttctggtcatctggatgctggtcatcggtgtgcagtattgatcaggacctgcaaacccaaaagcttatgggagctggcacgtcacaaaaagaaaaaaaccaagccacagcctggcagctctgatcaggaaagtgaggaacagcaacaattccggaacattttcaagcagatagcaggagatgacatggagatctgtgcagatgagctcaagaaggtccttaacacagtcgtgaacaaacacaaggacctgaagacacacgggttcacactggagtcctgccgtagcatgattgcgctcatggatacagatggctctggaaagctcaacctgcaggagttccaccacctctggaacaagattaaggcctggcagaaaattttcaaacactatgacacagaccagtccggcaccatcaacagctacgagatgcgaaatgcagtcaacgacgcaggattccacctcaacaaccagctctatgacatcattaccatgcggtacgcagacaaacacatgaacatcgactttgacagtttcatctgctgcttcgttaggctggagggcatgttcagagcttttcatgcatttgacaaggatggagatggtatcatcaagctcaacgttctggagtggctgcagctcaccatgtatgcctgaaccaggctggcctcatccaaagccatgcaggatcactcaggatttcagtttcaccctctatttccaaagccatttacctcaaaggacccagcagctacacccctacaggcttccaggcacctcatcagtcatgctcctcctccattttaccccctacccatccttgatcggtcatgcctagcctgaccctttagtaaagcaatgaggtaggaagaacaaacccttgtccctttgccatgtggaggaaagtgcctgcctctggtccgagccgcctcggttctgaagcgagtgctcctgcttaccttgctctaggctgtctgcagaagcacctgccggtggcactcagcacctccttgtgctagagccctccatcaccttcacgctgtcccaccatgggccaggaaccaaaccagcactgggttctactgctgtggggtaaactaactcagtggaatagggctggttactttgggctgtccaactcataagtttggctgcattttgaaaaaagctgatctaaataaaggcatgtgtatggctggtcaaaaaaaaaaaaaaaaaa

SEQ ID NO: 1345 - DNA, 3901 bp, Homo sapiens
ctattccagtgtttcagcgaggtggaagtgtgataccaataaagacaactgtaggaaaatccacaggctggatgactgaatcctcctatggactccgggttgctctaagcactaagggttcttcagtgggtgagttatatcttgatgatggccattcattccaatacctccaccagaagcaatttttgcacaggaagttttcattctgttccagtgttctgatcaatagttttgctgaccagaggggtcattatcccagcaagtgtgtggtggagaagatcttggtcttaggcttcaggaaggagccatcttctgtgactacccactcatctgatggtaaagatcagcctgtggcttttacgtattgtgccaaaacatccatcctgagcctggagaagctctcactcaacattgccactgactgggagggttcctaaaaaagctctaaaatgaatgcatagtgtgtctttccttcaagatgtaaatgtcaaggaatgagttggcaaatcagtttaaaaacacaaactacccaacagaaaaatgaaatttgcgagaatccccgatttatcattgatggagccaacagaactgacatctgtcaaggagagctaggggactgctggtttctcgcagccattgcctgcctgaccctgaaccagcaccttcttttccgagtcataccccatgatcaaagtttcatcgaaaactacgcagggatcttccacttccagttctggcgctatggagagtgggtggacgtggttatagatgactgcctgccaacgtacaacaatcaactggttttcaccaagtccaaccaccgcaatgagttctggagtgctctgctggagaaggcttatgctaagctccatggttcctacgaagctctgaaaggtgggaacaccacagaggccatggaggacttcacaggaggggtggcagagttttttgagatcagggatgctcctagtgacatgtacaagatcatgaagaaagccatcgagagaggctccctcatgggctgctccattgatgatggcacgaacatgacctatggaacctctccttctggtctgaacatgggggagttgattgcacggatggtaaggaatatggataactcactgctccaggactcagacctcgaccccagaggctcagatgaaagaccgacccggacaatcattccggttcagtatgagacaagaatggcctgcgggctggtcagaggtcacgcctactctgtcacggggctggatgaggtcccgttcaaaggtgagaaagtgaagctggtgcggctgcggaatccgtggggccaggtggagtggaacggttcttggagtgatagatggaaggactggagctttgtggacaaagatgagaaggcccgtctgcagcaccaggtcactgaggatggagagttctggatgtcctatgaggatttcatctaccatttcacaaagttggagatctgcaacctcacggccgatgctctgcagtctgacaagcttcagacctggacagtgtctgtgaacgagggccgctgggtacggggttgctctgccggaggctgccgcaacttcccagatactttctggaccaaccctcagtaccgtctgaagctcctggaggaggacgatgaccctgatgactcggaggtgatttgcagcttcctggtggccctgatgcagaagaaccggcggaaggaccggaagctaggggccagtctcttcaccattggcttcgccatctacgaggttcccaaagaggtatagcagcagcagcggccagcagttgtgtgcagcactacccagggggccccgagtctgtctgtggctcgtcgagaagcttcctggtggggtttgtgggcaggactgtgataggagagggccttgcctgtgttatttccactgcagagcaggtgcctcagggcattgcatgacccatgactaccacccccaggatgtgcactttctccctcgcaccagacactgcacgtcacacacatgcctttgcacactcaccctcctccacgcttacagccacacacacagtcacacagacgcgttctgagggtggctgcccgcttgggatggaggaatcacttccctcagaacccagccaagtcctctaggcctccttgggggtccttccagcctgaggggcttcggagctgaggagcagctgttctggtaagtgtccctgagtgtggggatgacacatttgccattcactctgaatcacaacagaaaaggaagaggaagtgaggtagggaggctatttaagccttgggagtcggaagtagggaggttgaaactgtgacatgggtgaccagggagttgggaagggacccttggaggtggctgtggcaggacaggacgttcctcccgaggggctcatgtgccctgggctctccccatctctcagatgcacgggaacaagcagcacctgcagaaggacttcttcctgtacaacgcctccaaggccaggagcaaaacctacatcaacatgcgggaggtgtcccagcgcttccgcctgcctcccagcgagtacgtcatcgtgccctccacctacgagccccaccaggagggggaattcatcctccgggtcttctctgaaaagaggaacctctctgaggaagttgaaaataccatctccgtggatcggccagtgcccatcatcttcgtttcggacagagcaaacagcaacaaggagctgggtgtggaccaggagtcagaggagggcaaaggcaaaacaagccctgataagcaaaagcagtccccacagccacagcctggcagctctgatcaggaaagtgaggaacagcaacaattccggaacattttcaagcagatagcaggagatgacatggagatctgtgcagatgagctcaagaaggtccttaacacagtcgtgaacaaacacaaggacctgaagacacacgggttcacactggagtcctgccgtagcatgattgcgctcatggatacagatggctctggaaagctcaacctgcaggagttccaccacctctggaacaagattaaggcctggcagaaaattttcaaacactatgacacagaccagtccggcaccatcaacagctacgagatgcgaaatgcagtcaacgacgcaggattccacctcaacaaccagctctatgacatcattaccatgcggtacgcagacaaacacatgaacatcgactttgacagtttcatctgctgcttcgttaggctggagggcatgttcagagcttttcatgcatttgacaaggatggagatggtatcatcaagctcaacgttctggagtggctgcagctcaccatgtatgcctgaaccaggctggcctcatccaaagccatgcaggatcactcaggatttcagtttcaccctctatttccaaagccatttacctcaaaggacccagcagctacacccctacaggcttccaggcacctcatcagtcatgttcctcctccattttaccccctacccatccttgatcggtcatgcctagcctgaccctttagtaaagcaatgaggtaggaagaacaaacccttgtccctttgccatgtggaggaaagtgcctgcctctggtccgagccgcctcggttctgaagcgagtgctcctgcttaccttgctctaggctgtctgcagaagcacctgccggtggcactcagcacctccttgtgctagagccctccatcaccttcacgctgtcccaccatgggccaggaaccaaaccagcactgggttctactgctgtggggtaaactaactcagtggaatagggctggttactttgggctgtccaactcataagtttggctgcattttgaaaaaagctgatctaaataaaggcatgtgtatggctggtcaaaaaaaaaaaaaaaaaa

SEQ ID NO: 1346 - DNA, 3243 bp, Homo sapiens
ctattccagtgtttcagcgaggtggaagtgtgataccaataaagacaactgtaggaaaatccacaggctggatgactgaatcctcctatggactccgggttgctctaagcactaagggttcttcagtgggtgagttatatcttgatgatggccattcattccaatacctccaccagaagcaatttttgcacaggaagttttcattctgttccagtgttctgatcaatagttttgctgaccagaggggtcattatcccagcaagtgtgtggtggagaagatcttggtcttaggcttcaggaaggagccatcttctgtgactacccactcatctgatggtaaagatcagcctgtggcttttacgtattgtgccaaaacatccatcctgagcctggagaagctctcactcaacattgccactgactgggagggttcctaaaaaagctctaaaatgaatgcatagtgtgtctttccttcaagatgtaaatgtcaaggaatgagttggcaaatcagtttaaaaacacaaactacccaacagaaaaatgaaatttgcgagaatccccgatttatcattgatggagccaacagaactgacatctgtcaaggagagctaggggactgctggtttctcgcagccattgcctgcctgaccctgaaccagcaccttcttttccgagtcataccccatgatcaaagtttcatcgaaaactacgcagggatcttccacttccagttctggcgctatggagagtgggtggacgtggttatagatgactgcctgccaacgtacaacaatcaactggttttcaccaagtccaaccaccgcaatgagttctggagtgctctgctggagaaggcttatgctaagctccatggttcctacgaagctctgaaaggtgggaacaccacagaggccatggaggacttcacaggaggggtggcagagttttttgagatcagggatgctcctagtgacatgtacaagatcatgaagaaagccatcgagagaggctccctcatgggctgctccattgatgatggcacgaacatgacctatggaacctctccttctggtctgaacatgggggagttgattgcacggatggtaaggaatatggataactcactgctccaggactcagacctcgaccccagaggctcagatgaaagaccgacccggacaatcattccggttcagtatgagacaagaatggcctgcgggctggtcagaggtcacgcctactctgtcacggggctggatgaggtcccgttcaaaggtgagaaagtgaagctggtgcggctgcggaatccgtggggccaggtggagtggaacggttcttggagtgatagatggaaggactggagctttgtggacaaagatgagaaggcccgtctgcagcaccaggtcactgaggatggagagttctggatgtcctatgaggatttcatctaccatttcacaaagttggagatctgcaacctcacggccgatgctctgcagtctgacaagcttcagacctggacagtgtctgtgaacgagggccgctgggtacggggttgctctgccggaggctgccgcaacttcccagatactttctggaccaaccctcagtaccgtctgaagctcctggaggaggacgatgaccctgatgactcggaggtgatttgcagcttcctggtggccctgatgcagaagaaccggcggaaggaccggaagctaggggccagtctcttcaccattggcttcgccatctacgaggttcccaaagagatgcacgggaacaagcagcacctgcagaaggacttcttcctgtacaacgcctccaaggccaggagcaaaacctacatcaacatgcgggaggtgtcccagcgcttccgcctgcctcccagcgagtacgtcatcgtgccctccacctacgagccccaccaggagggggaattcatcctccgggtcttctctgaaaagaggaacctctctgaggaagttgaaaataccatctccgtggatcggccagtgcccatcatcttcgtttcggacagagcaaacagcaacaaggagctgggtgtggaccaggagtcagaggagggcaaaggcaaaacaagccctgataagcaaaagcagtccccacagccacagcctggcagctctgatcaggaaagtgaggaacagcaacaattccggaacattttcaagcagatagcaggagatgacatggagatctgtgcagatgagctcaagaaggtccttaacacagtcgtgaacaaacacaaggacctgaagacacacgggttcacactggagtcctgccgtagcatgattgcgctcatggatacagatggctctggaaagctcaacctgcaggagttccaccacctctggaacaagattaaggcctggcagaaaattttcaaacactatgacacagaccagtccggcaccatcaacagctacgagatgcgaaatgcagtcaacgacgcaggattccacctcaacaaccagctctatgacatcattaccatgcggtacgcagacaaacacatgaacatcgactttgacagtttcatctgctgcttcgttaggctggagggcatgttcagagcttttcatgcatttgacaaggatggagatggtatcatcaagctcaacgttctggagtggctgcagctcaccatgtatgcctgaaccaggctggcctcatccaaagccatgcaggatcactcaggatttcagtttcaccctctatttccaaagccatttacctcaaaggacccagcagctacacccctacaggcttccaggcacctcatcagtcatgttcctcctccattttaccccctacccatccttgatcggtcatgcctagcctgaccctttagtaaagcaatgaggtaggaagaacaaacccttgtccctttgccatgtggaggaaagtgcctgcctctggtccgagccgcctcggttctgaagcgagtgctcctgcttaccttgctctaggctgtctgcagaagcacctgccggtggcactcagcacctccttgtgctagagccctccatcaccttcacgctgtcccaccatgggccaggaaccaaaccagcactgggttctactgctgtggggtaaactaactcagtggaatagggctggttactttgggctgtccaactcataagtttggctgcattttgaaaaaagctgatctaaataaaggcatgtgtatggctggtcaaaaaaaaaaaaaaaaaa

SEQ ID NO: 1347 - DNA, 3521 bp, Homo sapiens
ctattccagtgtttcagcgaggtggaagtgtgataccaataaagacaactgtaggaaaatccacaggctggatgactgaatcctcctatggactccgggttgctctaagcactaagggttcttcagtgggtgagttatatcttgatgatggccattcattccaatacctccaccagaagcaatttttgcacaggaagttttcattctgttccagtgttctgatcaatagttttgctgaccagaggggtcattatcccagcaagtgtgtggtggagaagatcttggtcttaggcttcaggaaggagccatcttctgtgactacccactcatctgatggtaaagatcagcctgtggcttttacgtattgtgccaaaacatccatcctgagcctggagaagctctcactcaacattgccactgactgggagggttcctaaaaaagctctaaaatgaatgcatagtgtgtctttccttcaagatgtaaatgtcaaggaatgagttggcaaatcagtttaaaaacacaaactacccaacagaaaaatgaaatttgcgagaatccccgatttatcattgatggagccaacagaactgacatctgtcaaggagagctagacgggttccagggcagctgcctacctggccttccttccaatacaaatcatcttggtggatggttctctgaggctcagtcttcgctgaagtcagaagaggaattggactcacattgcaaaggcacagggcagggcagatttcctacaggtgttaggaagaacaacccagttatgatcacctactgctctgtctccattgaggcctaaaaaggaagtgagtttatactgcagttggaggaactgcctgcagccttgaggaaaatgtctagtcacaagggagggactgctggtttctcgcagccattgcctgcctgaccctgaaccagcaccttcttttccgagtcataccccatgatcaaagtttcatcgaaaactacgcagggatcttccacttccagttctggcgctatggagagtgggtggacgtggttatagatgactgcctgccaacgtacaacaatcaactggttttcaccaagtccaaccaccgcaatgagttctggagtgctctgctggagaaggcttatgctaagctccatggttcctacgaagctctgaaaggtgggaacaccacagaggccatggaggacttcacaggaggggtggcagagttttttgagatcagggatgctcctagtgacatgtacaagatcatgaagaaagccatcgagagaggctccctcatgggctgctccattgatgatggcacgaacatgacctatggaacctctccttctggtctgaacatgggggagttgattgcacggatggtaaggaatatggataactcactgctccaggactcagacctcgaccccagaggctcagatgaaagaccgacccggacaatcattccggttcagtatgagacaagaatggcctgcgggctggtcagaggtcacgcctactctgtcacggggctggatgaggtcccgttcaaaggtgagaaagtgaagctggtgcggctgcggaatccgtggggccaggtggagtggaacggttcttggagtgatagatggaaggactggagctttgtggacaaagatgagaaggcccgtctgcagcaccaggtcactgaggatggagagttctggatgtcctatgaggatttcatctaccatttcacaaagttggagatctgcaacctcacggccgatgctctgcagtctgacaagcttcagacctggacagtgtctgtgaacgagggccgctgggtacggggttgctctgccggaggctgccgcaacttcccagatactttctggaccaaccctcagtaccgtctgaagctcctggaggaggacgatgaccctgatgactcggaggtgatttgcagcttcctggtggccctgatgcagaagaaccggcggaaggaccggaagctaggggccagtctcttcaccattggcttcgccatctacgaggttcccaaagagatgcacgggaacaagcagcacctgcagaaggacttcttcctgtacaacgcctccaaggccaggagcaaaacctacatcaacatgcgggaggtgtcccagcgcttccgcctgcctcccagcgagtacgtcatcgtgccctccacctacgagccccaccaggagggggaattcatcctccgggtcttctctgaaaagaggaacctctctgaggaagttgaaaataccatctccgtggatcggccagtgcccatcatcttcgtttcggacagagcaaacagcaacaaggagctgggtgtggaccaggagtcagaggagggcaaaggcaaaacaagccctgataagcaaaagcagtccccacagccacagcctggcagctctgatcaggaaagtgaggaacagcaacaattccggaacattttcaagcagatagcaggagatgacatggagatctgtgcagatgagctcaagaaggtccttaacacagtcgtgaacaaacacaaggacctgaagacacacgggttcacactggagtcctgccgtagcatgattgcgctcatggatacagatggctctggaaagctcaacctgcaggagttccaccacctctggaacaagattaaggcctggcagaaaattttcaaacactatgacacagaccagtccggcaccatcaacagctacgagatgcgaaatgcagtcaacgacgcaggattccacctcaacaaccagctctatgacatcattaccatgcggtacgcagacaaacacatgaacatcgactttgacagtttcatctgctgcttcgttaggctggagggcatgttcagagcttttcatgcatttgacaaggatggagatggtatcatcaagctcaacgttctggagtggctgcagctcaccatgtatgcctgaaccaggctggcctcatccaaagccatgcaggatcactcaggatttcagtttcaccctctatttccaaagccatttacctcaaaggacccagcagctacacccctacaggcttccaggcacctcatcagtcatgttcctcctccattttaccccctacccatccttgatcggtcatgcctagcctgaccctttagtaaagcaatgaggtaggaagaacaaacccttgtccctttgccatgtggaggaaagtgcctgcctctggtccgagccgcctcggttctgaagcgagtgctcctgcttaccttgctctaggctgtctgcagaagcacctgccggtggcactcagcacctccttgtgctagagccctccatcaccttcacgctgtcccaccatgggccaggaaccaaaccagcactgggttctactgctgtggggtaaactaactcagtggaatagggctggttactttgggctgtccaactcataagtttggctgcattttgaaaaaagctgatctaaataaaggcatgtgtatggctggtcaaaaaaaaaaaaaaaaaa

SEQ ID NO: 1348 - DNA, 433 bp, Homo sapiens
agaggagtcaaccctgaggaggaaaaagtagtatgatttgctggcgtcacccctctgctccgtgcgggcgcggcgaatggcaggtcccgaggtcgcagcttccactggcgcgggttgagttccctgttgcccttggtctcggggtcgctgtaggcgctgaggctgcagctatcatggtgaacttacttcagattgtgcgggaccactgggttcatgttcttgtccctatgggatttgtcattggatgttatttagacagaaagagtgatgaacggctaactgccttccggaacaagagtatgttatttaaaagggaattgcaacccagtgaagaagttacctggaagtaaagactggctagattatcgaatgttcacattttaaagttctgagagaaataaaaacatgaagaatctgaaaaaaaaaaaaaaaa

SEQ ID NO: 1349 - DNA, 1834 bp, Homo sapiens
actttgacagtcttctcatgctgcctctgccaccttctctgccagaagataccatttcaactttaacacagcatgatcgaaacatacaaccaaacttctccccgatctgcggccactggactgcccatcagcatgaaaatttttatgtatttacttactgtttttcttatcacccagatgattgggtcagcactttttgctgtgtatcttcatagaaggttggacaagatagaagatgaaaggaatcttcatgaagattttgtattcatgaaaacgatacagagatgcaacacaggagaaagatccttatccttactgaactgtgaggagattaaaagccagtttgaaggctttgtgaaggatataatgttaaacaaagaggagacgaagaaagaaaacagctttgaaatgcaaaaaggtgatcagaatcctcaaattgcggcacatgtcataagtgaggccagcagtaaaacaacatctgtgttacagtgggctgaaaaaggatactacaccatgagcaacaacttggtaaccctggaaaatgggaaacagctgaccgttaaaagacaaggactctattatatctatgcccaagtcaccttctgttccaatcgggaagcttcgagtcaagctccatttatagccagcctctgcctaaagtcccccggtagattcgagagaatcttactcagagctgcaaatacccacagttccgccaaaccttgcgggcaacaatccattcacttgggaggagtatttgaattgcaaccaggtgcttcggtgtttgtcaatgtgactgatccaagccaagtgagccatggcactggcttcacgtcctttggcttactcaaactctgaacagtgtcaccttgcaggctgtggtggagctgacgctgggagtcttcataatacagcacagcggttaagcccaccccctgttaactgcctatttataaccctaggatcctccttatggagaactatttattatacactccaaggcatgtagaactgtaataagtgaattacaggtcacatgaaaccaaaacgggccctgctccataagagcttatatatctgaagcagcaaccccactgatgcagacatccagagagtcctatgaaaagacaaggccattatgcacaggttgaattctgagtaaacagcagataacttgccaagttcagttttgtttctttgcgtgcagtgtctttccatggataatgcatttgatttatcagtgaagatgcagaagggaaatggggagcctcagctcacattcagttatggttgactctgggttcctatggccttgttggagggggccaggctctagaacgtctaacacagtggagaaccgaaaccccccccccccccccgccaccctctcggacagttattcattctctttcaatctctctctctccatctctctctttcagtctctctctctcaacctctttcttccaatctctctttctcaatctctctgtttccctttgtcagtctcttccctcccccagtctctcttctcaatccccctttctaacacacacacacacacacacacacacacacacacacacacacacacacacacagagtcaggccgttgctagtcagttctcttctttccaccctgtccctatctctaccactatagatgagggtgaggagtagggagtgcagccctgagcctgcccactcctcattacgaaatgactgtatttaaaggaaatctattgtatctacctgcagtctccattgtttccagagtgaacttgtaattatcttgttatttattttttgaataataaagacctcttaacattaa

SEQ ID NO: 1350 - DNA, 1521 bp, Homo sapiens
gggtttggggagagaggggcggagggactggcgggctcttggcgtcttgggggaacgctgcaaccgtcgacgggcctgatcagaagatcgtctttctcccgtttcttcgccatcgctaccccttatttttggttgtattgcagctcatgccctggaaaaaagaacctttggggttaaaaacgacaaccaacatcagccatgaaagatccaagtcgcagcagtactagcccaagcatcatcaatgaagatgtgattattaacggtcattctcatgaagatgacaatccatttgcagagtacatgtggatggaaaatgaagaagaattcaacagacaaatagaagaggagttatgggaagaagaatttattgaacgctgtttccaagaaatgctggaagaggaagaagagcatgaatggtttattccagctcgagatctcccacaaactatggaccaaatccaagaccagtttaatgaccttgttatcagtgatggctcttctctggaagatcttgtggtcaagagcaatctgaatccaaatgcaaaggagtttgttcctggggtgaagtacggaaatatttgagtagacggggccctcttttggtggatgtagcacaatttccacactgtgaaggcagtattagaagacttaattgtaaaagctctcttgtcactgtgttacacttatgcattgccaaagtttttgttagtcttgcatgcttaataaaagtgctgagactgttactaagtaaaaagctgtcaaacatttactgaaaatagaattggccccatggcttgatgtgaagacagcaaggaaagaagcaccagtcaagttgtgaacaagcaccaaattaaaagacctaaaccttaccaaattgtctttttttgaggctaatctatcacttgttaatgtctaaactttaaaatcagtacatttaatttgagttccaactgttaagcatatttctcagacttaaatttgattatgtccccatcaaaaagaatctccattttctgaaggtctgttagttaatttgagataatttgttaaaggcaagtatgtcatattactgaggctacaagttagtcagcagatgagtgccagtccagccttttctggtatgttattgttagaaatattgagttctaatgttacatctgaggaagtatgtaatttgagaattgtaacttctaagggattcactgcatcatagctatgcctgtatggagtctaacatatgaccaataccaacccataatccagctgaacaaagatactgtaacatgatttgagtggtgcttttccttgctttgttaaccatcacgagagtctgcagcacaacttttaacaaagctagaacagttttggcttcttaaacttcatatttgggtaggttaagctgccatacgtgttcagtgtgaatagtgtttaagttgaaaatattgtaaaaaaattatattttttcaaaaatatttaaaaaaataaataatagtagaactgagcaaaaaaaaaaaaaaaaaa

SEQ ID NO: 1351 - DNA, 1500 bp, Homo sapiens
gtgaagtcacttccgggctggggtgtttgtttggactggagaagggaggcggcgggcgaagcgcacgtcgagcgggggagcggcgctgcctgtggagatccgcggaggccgacaggattcgttggctgccgtccccgctgctgtgcattgggttaaaaacgacaaccaacatcagccatgaaagatccaagtcgcagcagtactagcccaagcatcatcaatgaagatgtgattattaacggtcattctcatgaagatgacaatccatttgcagagtacatgtggatggaaaatgaagaagaattcaacagacaaatagaagaggagttatgggaagaagaatttattgaacgctgtttccaagaaatgctggaagaggaagaagagcatgaatggtttattccagctcgagatctcccacaaactatggaccaaatccaagaccagtttaatgaccttgttatcagtgatggctcttctctggaagatcttgtggtcaagagcaatctgaatccaaatgcaaaggagtttgttcctggggtgaagtacggaaatatttgagtagacggggccctcttttggtggatgtagcacaatttccacactgtgaaggcagtattagaagacttaattgtaaaagctctcttgtcactgtgttacacttatgcattgccaaagtttttgttagtcttgcatgcttaataaaagtgctgagactgttactaagtaaaaagctgtcaaacatttactgaaaatagaattggccccatggcttgatgtgaagacagcaaggaaagaagcaccagtcaagttgtgaacaagcaccaaattaaaagacctaaaccttaccaaattgtctttttttgaggctaatctatcacttgttaatgtctaaactttaaaatcagtacatttaatttgagttccaactgttaagcatatttctcagacttaaatttgattatgtccccatcaaaaagaatctccattttctgaaggtctgttagttaatttgagataatttgttaaaggcaagtatgtcatattactgaggctacaagttagtcagcagatgagtgccagtccagccttttctggtatgttattgttagaaatattgagttctaatgttacatctgaggaagtatgtaatttgagaattgtaacttctaagggattcactgcatcatagctatgcctgtatggagtctaacatatgaccaataccaacccataatccagctgaacaaagatactgtaacatgatttgagtggtgcttttccttgctttgttaaccatcacgagagtctgcagcacaacttttaacaaagctagaacagttttggcttcttaaacttcatatttgggtaggttaagctgccatacgtgttcagtgtgaatagtgtttaagttgaaaatattgtaaaaaaattatattttttcaaaaatatttaaaaaaataaataatagtagaactgagcaaaaaaaaaaaaaaaaaa

SEQ ID NO: 1352 - DNA, 2730 bp, Homo sapiens
gtgggccacgccttccgggccccgcggctggccggctcctcgcgccctcccctctctcggccgctcttcgggccgcctctgcgtgtggggccgcccgcgccagtgtgagcctgagctgacggcggctccgggaggctcgcagaaggggagggccgggcggcgcgggagctgagcatcgccagggcgggcggcagggcgcggcctctccgccgggtgtaccacctgtcgcggcgcgagacctctggtgaaagaaaagatgttgtcccggttaagagtagtttccaccacttgtactttggcatgtcgacatttgcacataaaagaaaaaggcaagccacttatgctgaacccaagaacaaacaagggaatggcatttactttacaagaacgacaaatgcttggtcttcaaggacttctacctcccaaaatagagacacaagatattcaagccttacgatttcatagaaacttgaagaaaatgactagccctttggaaaaatatatctacataatgggaatacaagaaagaaatgagaaattgttttatagaatactgcaagatgacattgagagtttaatgccaattgtatatacaccgacggttggtcttgcctgctcccagtatggacacatctttagaagacctaagggattatttatttcgatctcagacagaggtcatgttagatcaattgtggataactggccagaaaatcatgttaaggctgttgtagtgactgatggagagagaattctgggtcttggagatctgggtgtctatggaatgggaattccagtaggaaaactttgtttgtatacagcttgtgcaggaatacggcctgatagatgcctgccagtgtgtattgatgtgggaactgataatatcgcactcttaaaagacccattttacatgggcttgtaccagaaacgagatcgcacacaacagtatgatgacctgattgatgagtttatgaaagctattactgacagatatggccggaacacactcattcagttcgaagactttggaaatcataatgcattcaggttcttgagaaagtaccgagaaaaatattgtactttcaatgatgatattcaagggacagctgcagtagctctagcaggtcttcttgcagcacaaaaagttattagtaaaccaatctccgaacacaaaatcttattccttggagcaggagaggctgctcttggaattgcaaatcttatagttatgtctatggtagaaaatggcctgtcagaacaagaggcacaaaagaaaatctggatgtttgacaagtatggtttattagttaagggacggaaagcaaaaatagatagttatcaggaaccatttactcactcagccccagagagcatacctgatacttttgaagatgcagtgaatatactgaagccttcaactataattggagttgcaggtgctggccgtcttttcactcctgatgtaatcagagccatggcctctatcaatgaaaggcctgtaatatttgcattaagtaatcctacagcacaggcagagtgcacggctgaagaagcatatacacttacagagggcaggtgtttgtttgccagtggcagtccatttgggccagtgaaacttacagatgggcgagtctttacaccaggtcaaggaaacaatgtttatatttttccaggtgtggctttagctgttattctctgtaacacccggcatattagtgacagtgttttcctagaagctgcaaaggccctgacaagccaattgacagatgaagagctagcccaagggagactttacccaccgcttgctaatattcaggaagtttctattaacattgctattaaagttacagaatacctatatgctaataaaatggctttccgatacccagaacctgaagacaaggccaaatatgttaaagaaagaacatggcggagtgaatatgattccctgctgccagatgtgtatgaatggccagaatctgcatcaagccctcctgtgataacagaatagaagcactcccctgataaatactttctgtgctccagggaaccccttttttcagacaagaagagataatgtcttcagttttatggtgttttctgtgttttgttctccctgaccactttggttgatgtattttttccatgcgtctccacatctgttggggtagacgtgttgattgattgcattgcccaccagcaccctacaatcagatagttgtgatgctttaattctaacatacagcccgtaccacatccaggagatgtaaaaagtgtgtttgtgaatgtcttcacttgtactctaattcagacttgccaaagtatttgctatttactattatgggtaatactcttctctggcctagttcttacagagctactaaaatagaaatttacttttatggatagaagtacagaattttgagaagaaactaaattttcaccaaattttaaggaaaaattgtcattatctaaaaatgttcttatatatctgcttcatcttaccttcatactctgaaattccctatagcagacagagctagggaaatattaaaaatttaccctatttattttctggaactaaatcaagccttaactataacattatgagagtaatgggaactactgctggctttaagtaaataaaagtcattgttttcaacagtgtataaaaatcatagtgtaacctttttatttaataaatatcttacatttaaaaaaaaaaaaaaa

SEQ ID NO: 1353 - DNA, 4546 bp, Homo sapiens
aagatggcgggcgggctgctctgaagagaccccggcggcggcggaggaggagagaagcgcagcgccgcgccgcgccggggcccatgtggggaggagtcggagtcgctgttgccgccgccgcctgtagctgctggacccgagtgggagtgagggggaaacggcaggatgaagttcgccgagcacctctccgcgcacatcactcccgagtggaggaagcaatacatccagtatgaggctttcaaggatatgctgtattcagctcaggaccaggcaccttctgtggaagttacagatgaggacacagtaaagaggtattttgccaagtttgaagagaagtttttccaaacctgtgaaaaagaacttgccaaaatcaacacattttattcagagaagctcgcagaggctcagcgcaggtttgctacacttcagaatgagcttcagtcatcactggatgcacagaaagaaagcactggtgttactacgctgcgacaacgcagaaagccagtcttccacttgtcccatgaggaacgtgtccaacatagaaatattaaagaccttaaactggccttcagtgagttctacctcagtctaatcctgctgcagaactatcagaatctgaattttacagggtttcgaaaaatcctgaaaaagcatgacaagatcctggaaacatctcgtggagcagattggcgagtggctcacgtagaggtggccccattttatacatgcaagaaaatcaaccagcttatctctgaaactgaggctgtagtgaccaatgaacttgaagatggtgacagacaaaaggctatgaagcgtttacgtgtcccccctttgggagctgctcagcctgcaccagcatggactacttttagagttggcctattttgtggaatattcattgtactgaatattacccttgtgcttgccgctgtatttaaacttgaaacagatagaagtatatggcccttgataagaatctatcggggtggctttcttctgattgaattcctttttctactgggcatcaacacgtatggttggagacaggctggagtaaaccatgtactcatctttgaacttaatccgagaagcaatttgtctcatcaacatctctttgagattgctggattcctcgggatattgtggtgcctgagccttctggcatgcttctttgctccaattagtgtcatccccacatatgtgtatccacttgccctttatggatttatggttttcttccttatcaaccccaccaaaactttctactataaatcccggttttggctgcttaaactgctgtttcgagtatttacagcccccttccataaggtaggctttgctgatttctggctggcggatcagctgaacagcctgtcagtgatactgatggacctggaatatatgatctgcttctacagtttggagctcaaatgggatgaaagtaagggcctgttgccaaataattcagaagaatcaggaatttgccacaaatatacatatggtgtgcgggccattgttcagtgcattcctgcttggcttcgcttcatccagtgcctgcgccgatatcgagacacaaaaagggcctttcctcatttagttaatgctggcaaatactccacaactttcttcatggtgacgtttgcagccctttacagcactcacaaagaacgaggtcactcggacactatggtgttcttttacctgtggattgtcttttatatcatcagttcctgctataccctcatctgggatctcaagatggactggggtctcttcgataagaatgcaggagagaacactttcctccgggaagagattgtatacccccaaaaagcctactactactgtgccataatagaggatgtgattctgcgctttgcttggactatccaaatctcgattacctctacaactttgttgcctcattctggggacatcattgctactgtctttgccccacttgaggttttccggcgatttgtgtggaacttcttccgcctggagaatgaacatctgaataactgtggtgaattccgtgctgtgcgggacatctctgtggcccccctgaacgcagatgatcagactctcctagaacagatgatggaccaggatgatggggtacgaaaccgccagaagaatcggtcatggaagtacaaccagagcatatccctgcgccggcctcgcctcgcttctcaatccaaggctcgtgacactaaggtattgatagaagacacagatgatgaagctaacacttgaattttctgaagtctagcttaacatctttggttttcctactctacaatcctttcctcgaccaacgcaacctctagtacctttccagccgaaaacaggagaaaacacataacacattttccgagctcttccggatcggatcctatggactccaaacaagctcactgtgtttcttttcttttcttctggtttaattttaattttctattttcaaaacaaatatttacttcatttgccaatcagaggatgttttaagaaacaaaacatagtatcttatggattgtttacaatcacaaggacatagatacctatcaggatgaagaacaggcattgcaaggaccctctgatgggacggtactgagatatctcggcttccgctcagcccggttttgactggttgaaaccggacattggtttttaaattttttgtcagtttatgtggagaatttttttctttccttcatacccagcgcaaaggcactggccgcacttgcaggaaaagtgcaacttaaagcagtatcttcattcatgaagctactttttaatttgatgtaacttttcttattttgggaagggttgctgggtgggtgggaaatatgatgtatttgttacacacagttttctcattatttatgaaacttaaccatacagaatgatataactcctgtgcaatgaaggtgataacagtaaaagaaggcaggggaaacttacgttggatgacatttatgagggtcagtcccacatacctctttcaggagacaacttgcaccagtttgaccttttcttttctttgtttttattttaagccaaagtttcattgctaacttcttaagttgctgctgctttagagtcctgagcatatctctcgtaacaaggaatcccacacttcacaccaccggctgaatttcatggaagaggttctgataatttttttaactttttaaggaacagatgtggaatacactggcccatatttcaaccttaacagctgaagctatgccttattatgcatccacatgtatggtccctgtagcgtgacctttactagctctgaatcagaagacagagctatttcagaggctctgtgtgccctcactagatagtttttcttctgggttcaaccactttagccagaatttgatcaaattaaaagtctgtcatggggaagctatatttttgagcacatggaacaaattatacttcctcattcatattatgttgatacaaaagaccttggcagccatttctcccagcagttttaaaggatgaacattggatttcatgccatcccatagaaaacctgttttaaaattttagggatctttacttggtcatacatgaaaagtacactgcttagaaattatagactattatgatctgtccacagtgcccattgtcacttctttgtctcatttcttccctttgttccttagtcatccaaataagcctgaaaaccataagagatattactttattgaatatggttggcattaaatttagcatttcattatctaacaaaattaatataaattccaggacatggtaaaatgtgttttaataacccccagacccaaatgaaaatttcaaagtcaataccagcagattcatgaaagtaaatttagtcctataattttcagcttaattataaacaaaggaacaaataagtggaagggcagctattaccattcgcttagtcaaaacattcggttactgccctttaatacactcctatcatcagcacttccaccatgtattacaagtcttgacccatccctgtcgtaactccagtaaaagttactgttactagaaaatttttatcaattaactgacaaatagtttctttttaaagtagtttcttccatctttattctgactagcttccaaaatgtgttccctttttgaatcgaggtttttttgttttgttttgttttctgaaaaaatcatacaactttgtgcttctattgcttttttgtgttttgttaagcatgtcccttggcccaaatgaagaggaaatgtttaattaatgctttttagtttaaataaattgaatcatttataataatcagtgttaacaatttagtgacccttggtaggttaaaggttgcattatttatacttgagatttttttcccctaactattctgttttttgactttaaaactatgggggaaatatcactggtctgtcaagaaacagcagtaattattactgagttaaattgaaaagtccagtggaccaggcatttcttatataaataaaattggtggtactaatgtgtaaaaaaaaaaaaaaa

SEQ ID NO: 1354 - DNA, 1797 bp, Homo sapiens
ggaccccggcggcagacgcaggttcgggaccatgagttggattccttttaagattgggcagcccaagaaacagattgtgcccaaaacagtggagagagactttgaaagggagtatggaaaacttcagcagctggaagagcagacccggaggctgcagaaagacatgaagaagagcaccgacgcagacctggccatgtcaaaatctgccgtgaagatatccttggacttactctccaatcccctctgtgagcaagaccaggaccttctgaacatggtgacggccctggacacggccatgaagcggatggatgccttcaatcaggaaaaggtgaaccagatccagaagactgtgatcgagcccttaaaaaagttcggcagtgtcttcccgagcctcaacatggctgtgaagaggcgggaacaggccttgcaggactacaggaggctgcaggccaaggtggagaagtatgaggaaaaggagaagacggggccagtgctggccaagctccaccaggcacgagaggagctgcggcctgtgcgggaggactttgaagccaagaacaggcagctgctggaggagatgccgcgcttctacggcagccgcctcgactacttccagcccagctttgagtccctcatccgagctcaggttgtgtactactcggaaatgcacaagatctttggagacctgtcccatcagcttgaccagccaggccactccgatgagcagcgggagcgggagaacgaggccaaactcagtgagctccgggccctctccattgtggccgatgactgaatccccgtcactcttggaggactcctgtgacgtggtcagcctcattcatccttgcccttctcagggctagctgctcctctcacaggctggggacagaggtggccctggttcacttgccggccctttgcaatgaatgactcttcctgagcctggcaccaggagccctaggcaggccgccgtctccccactcacagccccagcaggtaagcagtgtagacaaacccttggggcttttttatttggagaaccgtccagcatgcatcctggcccacggcctgagcaagctgcagcccttctgaggccatgggcttcgttggctaagttgggggtcttagccttgcatgcgttgtgggcatcaaatctacctccaaaagacccatcctggggagccctctggcccctcgttgccttttcacttcaaaacctcttttttctgggagaggccctgaaccctgtgcgggagagctggtcctccagccctggcaggccctcagccagcttcccagcaagacaaagggcacccttgtggctttgggacctaagtggttggggttcccgaggtcactgaggactggtacctcgggaacgcaagctgtcagtggaactgtcccacaagaattcacaggtctcaaagcaggaacagtgggtttgtgtctcacctgagtatctggaattttattttttcaagtaaaattttcaatgaaacgtccacatagtattgtgctgtaacttaggcgagcagaggaaaccccttcctgggcctgctgccctccacggagcagcagcaccctccagcaggcagcccagcatgccaggggtgtgtgcgcacctccccggccctggcccaccttctggagcgaactgcaccgtggtccagcagaggcgctgggtgggagggcacgcgggcaagcctaggagagtaggaagagctgtggaggacacactctcagtttgtttttgactttggtttatttaaaaaacaagccaaaaaaaaaaaaaaaaaa

SEQ ID NO: 1355 - DNA, 2128 bp, Homo sapiens
gggccggcaggggcggtgcgcgggaagggaccccggacccggaggtcgcggagagctgggcagtgttggccgctggcggagcgctggggcagcatgaagtgcctggtcacgggcggcaacgtgaaggtgctcggcaaggccgtccactccctgtcccgcatcggggacgagctctacctggaacccttggaggacgggctctccctccggacggtgaactcctcccgctctgcctatgcctgctttctctttgccccgctcttcttccagcaataccaggcagccacccctggtcaggacctgctgcgctgtaagatcctgatgaagtctttcctgtctgtcttccgctcactggcgatgctggagaagacggtggaaaaatgctgcatctccctgaatggccggagcagccgcctggtggtccagctgcattgcaagttcggggtgcggaagactcacaacctgtccttccaggactgtgagtccctgcaggccgtcttcgacccagcctcgtgcccccacatgctccgcgccccagcacgggttctgggggaggctgttctgcccttctctcctgcactggctgaagtgacgctgggcattggccgtggccgcagggtcatcctgcgcagctaccacgaggaggaggcagacagcactgccaaagccatggtgactgagatgtgccttggagaggaggatttccagcagctgcaggcccaggaaggggtggccatcactttctgcctcaaggaattccgggggctcctgagctttgcagagtcagcaaacttgaatcttagcattcattttgatgctccaggcaggcccgccatcttcaccatcaaggactctttgctggacggccactttgtcttggccacactctcagacaccgactcgcactcccaggacctgggctccccagagcgtcaccagccagtgcctcagctccaggctcacagcacaccccacccggacgactttgccaatgacgacattgactcttacatgatcgccatggaaaccactataggcaatgagggctcgcgggtgctgccctccatttccctttcacctggcccccagccccccaagagccccggtccccactccgaggaggaagatgaggctgagcccagtacagtgcctgggactcccccacccaagaagttccgctcactgttcttcggctccatcctggcccctgtacgctccccccagggccccagccctgtgctggcggaagacagtgagggtgaaggctgaaccaagaacctgaagcctgtacccagaggccttggactagacgaagccccagccagtggcagaactgggtctctcagccctggggatcagaaaggtgggcttgctggagctgagctgtttcactgcctctcgcaggccccagctggctgtcactgtaaagctgtcccacagcggtcgggcctgggccgttatctccccacaacccccagccaatcaggactttccagacttggccctgaactactgacgttcctacctcttatttctcattgagcctcaggctatactccagctggccaaggctggaaacctgtctccctcaggctcaccttcctaaggaaaatgtcatagtaggtgctgctggcccctggtgatccagcttctctgccaatcatgacctgttccttcctgaagtcctgggcatgcatctgggacccccgtggagctgacaagttttccttgctttcctgatactctttggcgctgacttggaattctaagagccttggacccgagtgtgtggctagggttgccctggctggggcccggtgccgagactcccaagcggctctgtgcagaagagctgccaggcagtgtcttagatgtgagacggaggccatggcgagaatccagctttgacctttattcaagagaccagatgggttgccccaggatccggctgccagccctgaggccaagcacggctggagacccacgacctggcctgccgttgccctgagctgcagcctcggccccaggatcctgctcacagtcaccgcaggtgcaggcaggaagcagccctgggggactggacgctgctattgattcattaaaaaaagaaaagaaaaatacaaaaaaa

SEQ ID NO: 1356 - DNA, 3941 bp, Homo sapiens
tggacgagcgtccgtgcggcctggtccgggccatgtccgcgtgaggaccccgccgctgtcgccgctcccgttccggccctggcccctctgcccggcagcgcggcgcaccatgggctccattctcagccgccgcatcgcgggggtggaggacatcgacatccaggcgaactcggcctatcgctaccctccgaagtccggaaactactttgcttcgcactttttcatgggaggagagaaattcgacaccccccaccctgaaggttacctctttggagagaacatggatctgaacttcctgggcagccgcccggtccagtttccctacgtcactcctgccccccacgagcccgtgaagacgctgcggagcctggtgaacatccgcaaagactccctgcggctggtgaggtacaaagacgatgccgacagccccaccgaggacggcgacaagccccgggtgctctacagcctggagttcaccttcgacgccgatgcccgcgtggccatcaccatctactgccaggcatcggaggagttcctgaacggcagggcagtatacagccccaagagcccctcgctacagtccgagaccgtccactacaagagaggggtgagccagcagttctccctgccctccttcaagattgacttctcggaatggaaggatgacgagctgaactttgacctggaccggggcgtgtttccagtagtcatccaggctgtggtggacgaaggagatgtggtggaagtgactggccacgcccacgtgctcttggctgcctttgaaaagcacatggacggcagcttctctgtgaagcctttaaagcagaagcaaattgtggaccgggtcagctacctcctgcaggagatctatggcattgagaacaagaacaaccaggagaccaagccctcggacgacgagaacagcgacaacagcaacgagtgtgtggtgtgcctgtccgacctgcgggacacgctgatcctgccctgccgccacctgtgcctctgtacctcctgcgccgacacgctgcgctaccaggccaacaactgccccatctgccggctgcctttccgggccctcctgcagatccgggcggtgcggaagaagccaggagccctgtcccccgtgtccttcagccccgtcctggcccagagcctggagcatgatgagcactcttgtccctttaaaaaatcaaagccgcaccccgcctccctggccagcaagaaacctaaaagggaaacaaactctgacagcgtcccacctggctacgagcccatctcgctgctcgaggcgctcaacggcctccgggctgtctccccggccatcccctcggcccctctttatgaagaaatcacctattcaggcatctcggacggcctgtcccaggccagctgtcccctcgcggctatcgaccacatcctggacagcagccgccagaagggcaggccgcagagcaaggcccccgacagcaccctacggtccccgtcttcccccatccacgaagaggatgaggagaagctctccgaggacgtggacgcccctcccccactgggtggcgcagagctggccctgcgggaaagcagctcccctgagagtttcataacagaagaggttgatgagtcgtcgtcaccacagcaagggacccgagcagcttccattgagaatgtcctgcaggacagcagccccgagcactgtggccgaggcccacctgctgacatctacctgccaggacggcccacctccatggagacggcccacggcctcgccaccaccagccccacctggcctccacttggtggccccagccccgatcccagcgccgccgagctgaccccactctgagagcctggccgagctggcagcatggagccctcggctccccagactttgccgaggggctgctccggaccccgttgtgagccggcctcctgtctgcatgccccctgtggccaccaggctccgaggggccgtggtgactcttgatcaaagagcacagtgaactgtcccttctgagtctcccttttctacagttgatatatttgtaactggtacaagatgaaggacagcagctttccatccctagttcagagcccccgttccccagggtcctgtgggctgagcggctggggctggggctgcccacgtgtggcctccgctggctctgcctgctcctgcaacagtgcggtccctgcccggagaactcaggaggcctgcagaagagaactgattggtggtcgaagcaccatcttcacagatgttcaggggcagtggggggctccaggcacggtcaatgaaggaaacagtgcctgtccacccaccctgcgtgtcactgtggcggcctggctgtcgctgctttttgtcctctgacgtgtttgcgcggcctcagtgccctccctggtgcgtctgcgctggggccctcagtgctcggggccttggggtgcatgggcgccgccctgggcagctagagtgtctcagcccggtgctgggcctggccgaggggcggaggcacagctgcttccagcagccagcattcagtggccttgtcaccaagctccacacctcctcctggtgctggctttggtgacatcacaaggcccctccaggtgcaggggcttctgtttggcaggcccctgccagggaggacctggtggcctcctcattctcttttgccattggaatgtccccttgcagttctcttctctttttttttttttgagatggagtttcactcttgctgcccaggctggagtgcagtggctcaatctcgggtcactgcaacctccgcctcccgggttcaagtgatcgtcctgccttaggctcctgagtagctggggattacaggtgcctaccagcatgctcggctaatttttttgtatttttagtagagaagggatttcaccatgttggccgggctggtctcaaactcctaaggtcatccacctgcctcggcctcccagagtgctgagattacaggcgtgagcctccgcgcccggcccccttgcagttctctctgatttggtttgttctgtctcaggcttctgtggcaggactggcccagggaggaggaagccagcagcacacctggggaatggggtcccggccgggaggcttggcctctgggcgacctcgtcctgttttgtttgtttgtttgtttgtttttttaaaggtaaacctcctgggccgcagatggcaaagggagtgcctgggcctggtgacccagggctggatccacccctgcggagccctgggccaggcaggtgtctgctgctcacctggctctggagggctgccctgcagctgggcctggggacaggtcggctgtggggcagctcagtaccctccctgaggctcacggtggctccgagcatgagctctgcctcctgggcgagacccagcagtggacagcacggtcctcacacccagctccctgcacacccaggccagccacccctcccgctcgtgcacaggcacgcagatgcgctcacacgtacacacacacaaatgcacgcccacttgcacatgctcacgcacacgttcacacatgcacactcacgctcacacatgctgtcacgcatacacacacgcacatactcctgcacatgttcccatgcatgtgtgtgcactcggaccgagcatctcccacgcacctctaccccaccccaagcacctctctccccccatgcacctctccccaacaacacacacagccccctgcaccgcccgccccccgcccccaccaaggccccagcctctggccatcagtcctggtgccagagctttgcgtgaagttcgggccgcagagtggcccgctgggactcccatgtgctgccgtctgatgtgctcagatgggctcatcgttggttcgtttttactgtatatttatagtaataaaatcatgcagcaaaaaaaaaaaaaaaaaaaaaaaaaaaaaaaaaaaaaaaaa

SEQ ID NO: 1357 - DNA, 8172 bp, Homo sapiens
ggggcggagccagcgcggatcgggtcccggacgcccgagcgccccgcccccgcgcgggcgatgcccagcggcgcggcgggctgcggggcccggcggggcgcgcagaggagcgggccgcggcgctgaggcggcggagcgtggccccgccatgggcttcctgcaccagctgcagctgctgctctggaagaacgtgacgctcaaacgccggagcccgtgggtcctggccttcgagatcttcatccccctggtgctgttctttatcctgctggggctgcgacagaagaagcccaccatctccgtgaaggaagtctccttctacacagcggcgcccctgacgtctgccggcatcctgcctgtcatgcaatcgctgtgcccggacggccagcgagacgagttcggcttcctgcagtacgccaactccacggtcacgcagctgcttgagcgcctggaccgcgtggtggaggaaggcaacctgtttgacccagcgcggcccagcctgggctcagagctcgaggccctacgccagcatctggaggccctcagtgcgggcccgggcacctcggggagccacctggacagatccacagtgtcttccttctctctggactcggtggccagaaacccgcaggagctctggcgtttcctgacgcaaaacttgtcgctgcccaatagcacggcccaagcactcttggccgcccgtgtggacccgcccgaggtctaccacctgctctttggtccctcatctgccctggattcacagtctggcctccacaagggtcaggagccctggagccgcctagggggcaatcccctgttccggatggaggagctgctgctggctcctgccctcctggagcagctcacctgcacgccgggctcgggggagctgggccggatcctcactgtgcctgagagtcagaagggagccctgcagggctaccgggatgctgtctgcagtgggcaggctgctgcgcgtgccaggcgcttctctgggctgtctgctgagctccggaaccagctggacgtggccaaggtctcccagcagctgggcctggatgcccccaacggctcggactcctcgccacaggcgccacccccacggaggctgcaggcgcttctgggggacctgctggatgcccagaaggttctgcaggatgtggatgtcctgtcggccctggccctgctactgccccagggtgcctgcactggccggacccccggacccccagccagtggtgcgggtggggcggccaatggcactggggcaggggcagtcatgggccccaacgccaccgctgaggagggcgcaccctctgctgcagcactggccaccccggacacgctgcagggccagtgctcagccttcgtacagctctgggccggcctgcagcccatcttgtgtggcaacaaccgcaccattgaacccgaggcgctgcggcggggcaacatgagctccctgggcttcacgagcaaggagcagcggaacctgggcctcctcgtgcacctcatgaccagcaaccccaaaatcctgtacgcgcctgcgggctctgaggtcgaccgcgtcatcctcaaggccaacgagacttttgcttttgtgggcaacgtgactcactatgcccaggtctggctcaacatctcggcggagatccgcagcttcctggagcagggcaggctgcagcaacacctgcgctggctgcagcagtatgtagcagagctgcggctgcaccccgaggcactgaacctgtcactggatgagctgccgccggccctgagacaggacaacttctcgctgcccagtggcatggccctcctgcagcagctggataccattgacaacgcggcctgcggctggatccagttcatgtccaaggtgagcgtggacatcttcaagggcttccccgacgaggagagcattgtcaactacaccctcaaccaggcctaccaggacaacgtcactgtttttgccagtgtgatcttccagacccggaaggacggctcgctcccgcctcacgtgcactacaagatccgccagaactccagcttcaccgagaaaaccaacgagatccgccgcgcctactggcggcctgggcccaatactggcggccgcttctacttcctctacggcttcgtctggatccaggacatgatggagcgcgccatcatcgacacttttgtggggcacgacgtggtggagccaggcagctacgtgcagatgttcccctacccctgctacacacgcgatgacttcctgtttgtcattgagcacatgatgccgctgtgcatggtgatctcctgggtctactccgtggccatgaccatccagcacatcgtggcggagaaggagcaccggctcaaggaggtgatgaagaccatgggcctgaacaacgcggtgcactgggtggcctggttcatcaccggctttgtgcagctgtccatctccgtgacagcactcaccgccatcctgaagtacggccaggtgcttatgcacagccacgtggtcatcatctggctcttcctggcagtctacgcggtggccaccatcatgttctgcttcctggtgtctgtgctgtactccaaggccaagctggcctcggcctgcggtggcatcatctacttcctgagctacgtgccctacatgtacgtggcgatccgagaggaggtggcgcatgataagatcacggccttcgagaagtgcatcgcgtccctcatgtccacgacggcctttggtctgggctctaagtacttcgcgctgtatgaggtggccggcgtgggcatccagtggcacaccttcagccagtccccggtggagggggacgacttcaacttgctcctggctgtcaccatgctgatggtggacgccgtggtctatggcatcctcacgtggtacattgaggctgtgcacccaggcatgtacgggctgccccggccctggtacttcccactgcagaagtcctactggctgggcagtgggcggacagaagcctgggagtggagctggccgtgggcacgcaccccccgcctcagtgtcatggaggaggaccaggcctgtgccatggagagccggcgctttgaggagacccgtggcatggaggaggagcccacccacctgcctctggttgtctgcgtggacaaactcaccaaggtctacaaggacgacaagaagctggccctgaacaagctgagcctgaacctctacgagaaccaggtggtctccttcttgggccacaacggggcgggcaagaccaccaccatgtccatcctgaccggcctgttccctccaacgtcgggttccgccaccatctacgggcacgacatccgcacggagatggatgagatccgcaagaacctgggcatgtgcccgcagcacaatgtgctctttgaccggctcacggtggaggaacacctctggttctactcacggctcaagagcatggctcaggaggagatccgcagagagatggacaagatgatcgaggacctggagctctccaacaaacggcactcactggtgcagacattgtcgggtggcatgaagcgcaagctgtccgtggccatcgccttcgtgggcggctctcgcgccatcatcctggacgagcccacggcgggcgtggacccctacgcgcgccgcgccatctgggacctcatcctgaagtacaagccaggccgcaccatccttctgtccacccaccacatggatgaggctgacctgcttggggaccgcattgccatcatctcccatgggaagctcaagtgctgcggctccccgctcttcctcaagggcacctatggcgacgggtaccgcctcacgctggtcaagcggcccgccgagccggggggcccccaagagccagggctggcatccagccccccaggtcgggccccgctgagcagctgctccgagctccaggtgtcccagttcatccgcaagcatgtggcctcctgcctgctggtctcagacacaagcacggagctctcctacatcctgcccagcgaggccgccaagaagggggctttcgagcgcctcttccagcacctggagcgcagcctggatgcactgcacctcagcagcttcgggctgatggacacgaccctggaggaagtgttcctcaaggtgtcggaggaggatcagtcgctggagaacagtgaggccgatgtgaaggagtccaggaaggatgtgctccctggggcggagggcccggcgtctggggagggtcacgctggcaatctggcccggtgctcggagctgacccagtcgcaggcatcgctgcagtcggcgtcatctgtgggctctgcccgtggcgacgagggagctggctacaccgacgtctatggcgactaccgccccctctttgataacccacaggacccagacaatgtcagcctgcaagaggtggaggcagaggccctgtcgagggtcggccagggcagccgcaagctggacggcgggtggctgaaggtgcgccagttccacgggctgctggtcaaacgcttccactgcgcccgccgcaactccaaggcactcttctcccagatcttgctgccagccttcttcgtctgcgtggccatgaccgtggccctgtccgtcccggagattggtgatctgcccccgctggtcctgtcaccttcccagtaccacaactacacccagccccgtggcaatttcatcccctacgccaacgaggagcgccgcgagtaccggctgcggctatcgcccgacgccagcccccagcagctcgtgagcacgttccggctgccgtcgggggtgggtgccacctgcgtgctcaagtctcccgccaacggctcgctggggcccacgttgaacctgagcagcggggagtcgcgcctgctggcggctcggttcttcgacagcatgtgtctggagtccttcacacaggggctgccactgtccaatttcgtgccacccccaccctcgcccgccccatctgactcgccagcgtccccggatgaggacctgcaggcctggaacgtctccctgccgcccaccgctgggccagaaatgtggacgtcggcaccctccctgccgcgcctggtacgggagcccgtccgctgcacctgctctgcgcagggcaccggcttctcctgccccagcagtgtgggcgggcacccgccccagatgcgggtggtcacaggcgacatcctgaccgacatcaccggccacaatgtctctgagtacctgctcttcacctccgaccgcttccgactgcaccggtatggggccatcacctttggaaacgtcctgaagtccatcccagcctcatttggcaccagggccccacccatggtgcggaagatcgcggtgcgcagggctgcccaggttttctacaacaacaagggctatcacagcatgcccacctacctcaacagcctcaacaacgccatcctgcgtgccaacctgcccaagagcaagggcaacccggcggcttacggcatcaccgtcaccaaccaccccatgaataagaccagcgccagcctctccctggattacctgctgcagggcacggatgtcgtcatcgccatcttcatcatcgtggccatgtccttcgtgccggccagcttcgttgtcttcctcgtggccgagaagtccaccaaggccaagcacctgcagtttgtcagcggctgcaaccccatcatctactggctggcgaactacgtgtgggacatgctcaactacctggtccccgctacctgctgtgtcatcatcctgtttgtgttcgacctgccggcctacacgtcgcccaccaacttccctgccgtcctctccctcttcctgctctatgggtggtccatcacgcccatcatgtacccggcctccttctggttcgaggtccccagctccgcctacgtgttcctcattgtcatcaatctcttcatcggcatcaccgccaccgtggccaccttcctgctacagctcttcgagcacgacaaggacctgaaggttgtcaacagttacctgaaaagctgcttcctcattttccccaactacaacctgggccacgggctcatggagatggcctacaacgagtacatcaacgagtactacgccaagattggccagtttgacaagatgaagtccccgttcgagtgggacattgtcacccgcggactggtggccatggcggttgagggcgtcgtgggcttcctcctgaccatcatgtgccagtacaacttcctgcggcggccacagcgcatgcctgtgtctaccaagcctgtggaggatgatgtggacgtggccagtgagcggcagcgagtgctccggggagacgccgacaatgacatggtcaagattgagaacctgaccaaggtctacaagtcccggaagattggccgtatcctggccgttgaccgcctgtgcctgggtgtgcgtcctggcgagtgcttcgggctcctgggcgtcaacggtgcgggcaagaccagcaccttcaagatgctgaccggcgacgagagcacgacggggggcgaggccttcgtcaatggacacagcgtgctgaaggagctgctccaggtgcagcagagcctcggctactgcccgcagtgtgacgcgctgttcgacgagctcacggcccgggagcacctgcagctgtacacgcggctgcgtgggatctcctggaaggacgaggcccgggtggtgaagtgggctctggagaagctggagctgaccaagtacgcagacaagccggctggcacctacagcggcggcaacaagcggaagctctccacggccatcgccctcattgggtacccagccttcatcttcctggacgagcccaccacaggcatggaccccaaggcccggcgcttcctctggaacctcatccttgacctcatcaagacagggcgttcagtggtgctgacatcacacagcatggaggagtgcgaggcgctgtgcacgcggctggccatcatggtgaacggtcgcctgcggtgcctgggcagcatccagcacctgaagaaccggtttggagatggctacatgatcacggtgcggaccaagagcagccagagtgtgaaggacgtggtgcggttcttcaaccgcaacttcccggaagccatgctcaaggagcggcaccacacaaaggtgcagtaccagctcaagtcggagcacatctcgctggcccaggtgttcagcaagatggagcaggtgtctggcgtgctgggcatcgaggactactcggtcagccagaccacactggacaatgtgttcgtgaactttgccaagaagcagagtgacaacctggagcagcaggagacggagccgccatccgcactgcagtcccctctcggctgcttgctcagcctgctccggccccggtctgcccccacggagctccgggcacttgtggcagacgagcccgaggacctggacacggaggacgagggcctcatcagcttcgaggaggagcgggcccagctgtccttcaacacggacacgctctgctgaccacccagagctgggccagggaggacacgctccactgaccacccagagctgggccagggactcaacaatggggacagaagtcccccagtgcctgccagggcctggagtggaggttcaggaccaaggggcttctggtcctccagcccctgtactcggccatgccctgcggtcactgcggttgccgcccctaattgtgccaaaggctgacccggcccgggctgcgtacacccttgccctgctttgccttaaagcctcggggtctgcccggcccctcgcccctgcctggcactgctcaccgcccaaggcgacgccggctggaccaggcactgctggcctttctcctgcccggcctcggaaccagcttttctctcttacgatgaaggctgatgccgagagcgggctgtgggcggagctgggtcagtcccgtatttattttgctttgagaagaggctcctctggccctgctctcctgcagggaggtggctgtcccgcgggaagccatcagcttgggccagctggcaggtggcaggaatggagaagctgaccctgctggccaggcaaggggccagaccccccccaacccccagctgccatcgctctcccacccagcttggccccctgcccgcccacctccctgggagccgggcctgtacatagcgcacagatgtttgttttaaataaataaacaaaatgtcaaaaaaaaaaaaaaaaaa

SEQ ID NO: 1358 - DNA, 8164 bp, Homo sapiens
agaaccgcctgatcccgaactccctgtgcagagaccagactcgcccgaatatggggagaaaaacgagccgcgtgcagcaggggccgcctcggtcccctgcctgctccgcccacggcgagcgttcctggggcctcgagtttccccccttccgctggctgctcggaatcgcgggacggacccacctggccgccctgcctcccttccagtgggtcctggccttcgagatcttcatccccctggtgctgttctttatcctgctggggctgcgacagaagaagcccaccatctccgtgaaggaagtctccttctacacagcggcgcccctgacgtctgccggcatcctgcctgtcatgcaatcgctgtgcccggacggccagcgagacgagttcggcttcctgcagtacgccaactccacggtcacgcagctgcttgagcgcctggaccgcgtggtggaggaaggcaacctgtttgacccagcgcggcccagcctgggctcagagctcgaggccctacgccagcatctggaggccctcagtgcgggcccgggcacctcggggagccacctggacagatccacagtgtcttccttctctctggactcggtggccagaaacccgcaggagctctggcgtttcctgacgcaaaacttgtcgctgcccaatagcacggcccaagcactcttggccgcccgtgtggacccgcccgaggtctaccacctgctctttggtccctcatctgccctggattcacagtctggcctccacaagggtcaggagccctggagccgcctagggggcaatcccctgttccggatggaggagctgctgctggctcctgccctcctggagcagctcacctgcacgccgggctcgggggagctgggccggatcctcactgtgcctgagagtcagaagggagccctgcagggctaccgggatgctgtctgcagtgggcaggctgctgcgcgtgccaggcgcttctctgggctgtctgctgagctccggaaccagctggacgtggccaaggtctcccagcagctgggcctggatgcccccaacggctcggactcctcgccacaggcgccacccccacggaggctgcaggcgcttctgggggacctgctggatgcccagaaggttctgcaggatgtggatgtcctgtcggccctggccctgctactgccccagggtgcctgcactggccggacccccggacccccagccagtggtgcgggtggggcggccaatggcactggggcaggggcagtcatgggccccaacgccaccgctgaggagggcgcaccctctgctgcagcactggccaccccggacacgctgcagggccagtgctcagccttcgtacagctctgggccggcctgcagcccatcttgtgtggcaacaaccgcaccattgaacccgaggcgctgcggcggggcaacatgagctccctgggcttcacgagcaaggagcagcggaacctgggcctcctcgtgcacctcatgaccagcaaccccaaaatcctgtacgcgcctgcgggctctgaggtcgaccgcgtcatcctcaaggccaacgagacttttgcttttgtgggcaacgtgactcactatgcccaggtctggctcaacatctcggcggagatccgcagcttcctggagcagggcaggctgcagcaacacctgcgctggctgcagcagtatgtagcagagctgcggctgcaccccgaggcactgaacctgtcactggatgagctgccgccggccctgagacaggacaacttctcgctgcccagtggcatggccctcctgcagcagctggataccattgacaacgcggcctgcggctggatccagttcatgtccaaggtgagcgtggacatcttcaagggcttccccgacgaggagagcattgtcaactacaccctcaaccaggcctaccaggacaacgtcactgtttttgccagtgtgatcttccagacccggaaggacggctcgctcccgcctcacgtgcactacaagatccgccagaactccagcttcaccgagaaaaccaacgagatccgccgcgcctactggcggcctgggcccaatactggcggccgcttctacttcctctacggcttcgtctggatccaggacatgatggagcgcgccatcatcgacacttttgtggggcacgacgtggtggagccaggcagctacgtgcagatgttcccctacccctgctacacacgcgatgacttcctgtttgtcattgagcacatgatgccgctgtgcatggtgatctcctgggtctactccgtggccatgaccatccagcacatcgtggcggagaaggagcaccggctcaaggaggtgatgaagaccatgggcctgaacaacgcggtgcactgggtggcctggttcatcaccggctttgtgcagctgtccatctccgtgacagcactcaccgccatcctgaagtacggccaggtgcttatgcacagccacgtggtcatcatctggctcttcctggcagtctacgcggtggccaccatcatgttctgcttcctggtgtctgtgctgtactccaaggccaagctggcctcggcctgcggtggcatcatctacttcctgagctacgtgccctacatgtacgtggcgatccgagaggaggtggcgcatgataagatcacggccttcgagaagtgcatcgcgtccctcatgtccacgacggcctttggtctgggctctaagtacttcgcgctgtatgaggtggccggcgtgggcatccagtggcacaccttcagccagtccccggtggagggggacgacttcaacttgctcctggctgtcaccatgctgatggtggacgccgtggtctatggcatcctcacgtggtacattgaggctgtgcacccaggcatgtacgggctgccccggccctggtacttcccactgcagaagtcctactggctgggcagtgggcggacagaagcctgggagtggagctggccgtgggcacgcaccccccgcctcagtgtcatggaggaggaccaggcctgtgccatggagagccggcgctttgaggagacccgtggcatggaggaggagcccacccacctgcctctggttgtctgcgtggacaaactcaccaaggtctacaaggacgacaagaagctggccctgaacaagctgagcctgaacctctacgagaaccaggtggtctccttcttgggccacaacggggcgggcaagaccaccaccatgtccatcctgaccggcctgttccctccaacgtcgggttccgccaccatctacgggcacgacatccgcacggagatggatgagatccgcaagaacctgggcatgtgcccgcagcacaatgtgctctttgaccggctcacggtggaggaacacctctggttctactcacggctcaagagcatggctcaggaggagatccgcagagagatggacaagatgatcgaggacctggagctctccaacaaacggcactcactggtgcagacattgtcgggtggcatgaagcgcaagctgtccgtggccatcgccttcgtgggcggctctcgcgccatcatcctggacgagcccacggcgggcgtggacccctacgcgcgccgcgccatctgggacctcatcctgaagtacaagccaggccgcaccatccttctgtccacccaccacatggatgaggctgacctgcttggggaccgcattgccatcatctcccatgggaagctcaagtgctgcggctccccgctcttcctcaagggcacctatggcgacgggtaccgcctcacgctggtcaagcggcccgccgagccggggggcccccaagagccagggctggcatccagccccccaggtcgggccccgctgagcagctgctccgagctccaggtgtcccagttcatccgcaagcatgtggcctcctgcctgctggtctcagacacaagcacggagctctcctacatcctgcccagcgaggccgccaagaagggggctttcgagcgcctcttccagcacctggagcgcagcctggatgcactgcacctcagcagcttcgggctgatggacacgaccctggaggaagtgttcctcaaggtgtcggaggaggatcagtcgctggagaacagtgaggccgatgtgaaggagtccaggaaggatgtgctccctggggcggagggcccggcgtctggggagggtcacgctggcaatctggcccggtgctcggagctgacccagtcgcaggcatcgctgcagtcggcgtcatctgtgggctctgcccgtggcgacgagggagctggctacaccgacgtctatggcgactaccgccccctctttgataacccacaggacccagacaatgtcagcctgcaagaggtggaggcagaggccctgtcgagggtcggccagggcagccgcaagctggacggcgggtggctgaaggtgcgccagttccacgggctgctggtcaaacgcttccactgcgcccgccgcaactccaaggcactcttctcccagatcttgctgccagccttcttcgtctgcgtggccatgaccgtggccctgtccgtcccggagattggtgatctgcccccgctggtcctgtcaccttcccagtaccacaactacacccagccccgtggcaatttcatcccctacgccaacgaggagcgccgcgagtaccggctgcggctatcgcccgacgccagcccccagcagctcgtgagcacgttccggctgccgtcgggggtgggtgccacctgcgtgctcaagtctcccgccaacggctcgctggggcccacgttgaacctgagcagcggggagtcgcgcctgctggcggctcggttcttcgacagcatgtgtctggagtccttcacacaggggctgccactgtccaatttcgtgccacccccaccctcgcccgccccatctgactcgccagcgtccccggatgaggacctgcaggcctggaacgtctccctgccgcccaccgctgggccagaaatgtggacgtcggcaccctccctgccgcgcctggtacgggagcccgtccgctgcacctgctctgcgcagggcaccggcttctcctgccccagcagtgtgggcgggcacccgccccagatgcgggtggtcacaggcgacatcctgaccgacatcaccggccacaatgtctctgagtacctgctcttcacctccgaccgcttccgactgcaccggtatggggccatcacctttggaaacgtcctgaagtccatcccagcctcatttggcaccagggccccacccatggtgcggaagatcgcggtgcgcagggctgcccaggttttctacaacaacaagggctatcacagcatgcccacctacctcaacagcctcaacaacgccatcctgcgtgccaacctgcccaagagcaagggcaacccggcggcttacggcatcaccgtcaccaaccaccccatgaataagaccagcgccagcctctccctggattacctgctgcagggcacggatgtcgtcatcgccatcttcatcatcgtggccatgtccttcgtgccggccagcttcgttgtcttcctcgtggccgagaagtccaccaaggccaagcacctgcagtttgtcagcggctgcaaccccatcatctactggctggcgaactacgtgtgggacatgctcaactacctggtccccgctacctgctgtgtcatcatcctgtttgtgttcgacctgccggcctacacgtcgcccaccaacttccctgccgtcctctccctcttcctgctctatgggtggtccatcacgcccatcatgtacccggcctccttctggttcgaggtccccagctccgcctacgtgttcctcattgtcatcaatctcttcatcggcatcaccgccaccgtggccaccttcctgctacagctcttcgagcacgacaaggacctgaaggttgtcaacagttacctgaaaagctgcttcctcattttccccaactacaacctgggccacgggctcatggagatggcctacaacgagtacatcaacgagtactacgccaagattggccagtttgacaagatgaagtccccgttcgagtgggacattgtcacccgcggactggtggccatggcggttgagggcgtcgtgggcttcctcctgaccatcatgtgccagtacaacttcctgcggcggccacagcgcatgcctgtgtctaccaagcctgtggaggatgatgtggacgtggccagtgagcggcagcgagtgctccggggagacgccgacaatgacatggtcaagattgagaacctgaccaaggtctacaagtcccggaagattggccgtatcctggccgttgaccgcctgtgcctgggtgtgcgtcctggcgagtgcttcgggctcctgggcgtcaacggtgcgggcaagaccagcaccttcaagatgctgaccggcgacgagagcacgacggggggcgaggccttcgtcaatggacacagcgtgctgaaggagctgctccaggtgcagcagagcctcggctactgcccgcagtgtgacgcgctgttcgacgagctcacggcccgggagcacctgcagctgtacacgcggctgcgtgggatctcctggaaggacgaggcccgggtggtgaagtgggctctggagaagctggagctgaccaagtacgcagacaagccggctggcacctacagcggcggcaacaagcggaagctctccacggccatcgccctcattgggtacccagccttcatcttcctggacgagcccaccacaggcatggaccccaaggcccggcgcttcctctggaacctcatccttgacctcatcaagacagggcgttcagtggtgctgacatcacacagcatggaggagtgcgaggcgctgtgcacgcggctggccatcatggtgaacggtcgcctgcggtgcctgggcagcatccagcacctgaagaaccggtttggagatggctacatgatcacggtgcggaccaagagcagccagagtgtgaaggacgtggtgcggttcttcaaccgcaacttcccggaagccatgctcaaggagcggcaccacacaaaggtgcagtaccagctcaagtcggagcacatctcgctggcccaggtgttcagcaagatggagcaggtgtctggcgtgctgggcatcgaggactactcggtcagccagaccacactggacaatgtgttcgtgaactttgccaagaagcagagtgacaacctggagcagcaggagacggagccgccatccgcactgcagtcccctctcggctgcttgctcagcctgctccggccccggtctgcccccacggagctccgggcacttgtggcagacgagcccgaggacctggacacggaggacgagggcctcatcagcttcgaggaggagcgggcccagctgtccttcaacacggacacgctctgctgaccacccagagctgggccagggaggacacgctccactgaccacccagagctgggccagggactcaacaatggggacagaagtcccccagtgcctgccagggcctggagtggaggttcaggaccaaggggcttctggtcctccagcccctgtactcggccatgccctgcggtcactgcggttgccgcccctaattgtgccaaaggctgacccggcccgggctgcgtacacccttgccctgctttgccttaaagcctcggggtctgcccggcccctcgcccctgcctggcactgctcaccgcccaaggcgacgccggctggaccaggcactgctggcctttctcctgcccggcctcggaaccagcttttctctcttacgatgaaggctgatgccgagagcgggctgtgggcggagctgggtcagtcccgtatttattttgctttgagaagaggctcctctggccctgctctcctgcagggaggtggctgtcccgcgggaagccatcagcttgggccagctggcaggtggcaggaatggagaagctgaccctgctggccaggcaaggggccagaccccccccaacccccagctgccatcgctctcccacccagcttggccccctgcccgcccacctccctgggagccgggcctgtacatagcgcacagatgtttgttttaaataaataaacaaaatgtcaaaaaaaaaaaaaaaaaa

SEQ ID NO: 1359 - DNA, 2487 bp, Homo sapiens
gttcccgccgtctccaccgccaccgcctcagccgcctcgcacatttagtcttgccgggagtggtgtgattcccgaccaagatggcggccgtggggcgagtcggctccttcggttcttctccgccgggattatcctcgacttacactggcggccccttgggcaacgagatagcgtcgggcaacggtggcgccgcggcaggcgacgacgaggacgggcagaacctttggtcctgcatcctcagcgaggtctccacccgctcgcgctccaagctccctgcggggaagaacgtgctactgctgggtgaagatggagctggaaaaacaagcttaataagaaaaattcagggaatagaggagtataagaaaggaagaggattggaatatttgtacttaaatgtgcatgatgaagacagggatgatcaaacaagatgtaatgtttggatcttagatggagacctatatcacaaaggcctccttaaattttcactggatgccgtatctctgaaggatactctagttatgctggttgttgacatgtcaaagccttggactgctttggattctttacagaaatgggcaagtgttgttagagaacatgttgacaaactgaaaatccctcctgaagaaatgaaacaaatggaacaaaagttgattagagacttccaagaatatgtagagccaggagaagacttcccggcttctccccagagaagaaatactgcgtcacaagaagacaaagatgacagtgtagttgtacctctgggtgcggatacacttacacataacttgggcattccagtactagtagtttgcacaaagtgtgatgccattagtgtattggagaaagaacatgactacagagatgaacattttgatttttttcagtcacatatccggaagttttgtttacggtatggtgcagcacttatttacacttcagtaaaagaaaacaaaaatatagacttagtatataaatacatcgttcagaaactatatggatttccctataagattcctgctgttgttgtggaaaaggatgcagtatttattccagcagggtgggataatgataagaaaataggaatattacatgaaaattttcaaacattaaaagcagaagataattttgaagacatcataactaaaccacctgttcgaaagtttgtacatgagaaggaaattatggcagaagatgatcaggtgtttcttatgaagctacagtcccttttagcaaagcaaccaccaactgcagctggaaggcctgtggatgcctcaccaagagtcccaggaggctccccacgaacaccaaatagatctgtatcatctaatgttgccagcgtgtcacccattcctgctgggtcaaaaaaaattgatccaaacatgaaagctggagctacaagtgaaggcgttctggcaaatttcttcaacagtttgttgagtaaaaagactggctctccaggaggccctggtgtgagtggtggtagccctgcaggtggggctggaggtggaagcagtggtttaccaccatccaccaaaaagtcaggccagaagcctgtcttagatgttcatgcagaactagacagaattacacgaaaaccagttacagtttctcccacaacacctacatctcctacggaaggagaagcttcttgaagataccaaataaagccatttattctgttttctgggataatgtaaacatgcctctgccttttccttcaaaagtgggaattagaaagctggagtgcttcttcagatggactaaatttatgtcgtgtgtgtgtgtgtgtgtgtgtgtggttacccattttttagaaggagccgtacagaagaaaaattattctacattatgtaggattgctgtttgcattgccattttgcataagaaagtaatttttgattttgaaaatctcaaaacttttagatctgaaatacagccatgtgatcgatcatattctaaaggctatttaaaacatgtaaaaggatttggggacggcagaaaacatgcagtttgggcattgactgacttggaagtctaagcttattttagttataactattaaaatcatttttaaaaatttgttagttttgctgacagagaaaaatcgtcagttgtcagattttgcacaccacaataaatgtaccaccacacacggaatatgctaagaaaactatcagatagcgtttgatacactagtcattgtctcaatcactgatcctgtaagttgtcatcaaaatatgatttagaaatattggccaaggtgttgctttaactgaggagaaaagaaagcacactgcctaaatgtgtaaaagaaaaatgcagaggttattaaaatgtaaagaagtaacaatctttggatttgtctatacatatatatatatatatcgctttgccttaatatacccccttttttgtttgtgactttcaactgtaatcagttaataaagtatttattctctgcattcaggttcaaaaaaaaaaaaaaaa

SEQ ID NO: 1360 - DNA, 4025 bp, Homo sapiens
cccggctctgcccgcccttcgaaagtccagggtccctgcccgctaggcaagttgcactcatggcacctccaagtgaagagacgcccctgatccctcagcgttcatgcagcctcttgtccacggaggctggtgccctgcatgtgctgctgcccgctcggggccccgggcccccccagcgcctatctttctcctttggggaccacttggctgaggacctgtgcgtgcaggctgccaaggccagcggcatcctgcctgtgtaccactccctctttgctctggccacggaggacctgtcctgctggttccccccgagccacatcttctccgtggaggatgccagcacccaagtcctgctgtacaggattcgcttttacttccccaattggtttgggctggagaagtgccaccgcttcgggctacgcaaggatttggccagtgctatccttgacctgccagtcctggagcacctctttgcccagcaccgcagtgacctggtgagtgggcgcctccccgtgggcctcagtctcaaggagcagggtgagtgtctcagcctggccgtgttggacctggcccggatggcgcgagagcaggcccagcggccgggagagctgctgaagactgtcagctacaaggcctgcctacccccaagcctgcgcgacctgatccagggcctgagcttcgtgacgcggaggcgtattcggaggacggtgcgcagagccctgcgccgcgtggccgcctgccaggcagaccggcactcgctcatggccaagtacatcatggacctggagcggctggatccagccggggccgccgagaccttccacgtgggcctccctggggcccttggtggccacgacgggctggggctgctccgcgtggctggtgacggcggcatcgcctggacccagggagaacaggaggtcctccagcccttctgcgactttccagaaatcgtagacattagcatcaagcaggccccgcgcgttggcccggccggagagcaccgcctggtcactgttaccaggacagacaaccagattttagaggccgagttcccagggctgcccgaggctctgtcgttcgtggcgctcgtggacggctacttccggctgaccacggactcccagcacttcttctgcaaggaggtggcaccgccgaggctgctggaggaagtggccgagcagtgccacggccccatcactctggactttgccatcaacaagctcaagactgggggctcacgtcctggctcctatgttctccgccgcagcccccaggactttgacagcttcctcctcactgtctgtgtccagaacccccttggtcctgattataagggctgcctcatccggcgcagccccacaggaaccttccttctggttggcctcagccgaccccacagcagtcttcgagagctcctggcaacctgctgggatggggggctgcacgtagatggggtggcagtgaccctcacttcctgctgtatccccagacccaaagaaaagtccaacctgatcgtggtccagagaggtcacagcccacccacatcatccttggttcagccccaatcccaataccagctgagtcagatgacatttcacaagatccctgctgacagcctggagtggcatgagaacctgggccatgggtccttcaccaagatttaccggggctgtcgccatgaggtggtggatggggaggcccgaaagacagaggtgctgctgaaggtcatggatgccaagcacaagaactgcatggagtcattcctggaagcagcgagcttgatgagccaagtgtcgtaccggcatctcgtgctgctccacggcgtgtgcatggctggagacagcaccatggtgcaggaatttgtacacctgggggccatagacatgtatctgcgaaaacgtggccacctggtgccagccagctggaagctgcaggtggtcaaacagctggcctacgccctcaactatctggaggacaaaggcctgccccatggcaatgtctctgcccggaaggtgctcctggctcgggagggggctgatgggagcccgcccttcatcaagctgagtgaccctggggtcagccccgctgtgttaagcctggagatgctcaccgacaggatcccctgggtggcccccgagtgtctccgggaggcgcagacacttagcttggaagctgacaagtggggcttcggcgccacggtctgggaagtgtttagtggcgtcaccatgcccatcagtgccctggatcctgctaagaaactccaattttatgaggaccggcagcagctgccggcccccaagtggacagagctggccctgctgattcaacagtgcatggcctatgagccggtccagaggccctccttccgagccgtcattcgtgacctcaatagcctcatctcttcagactatgagctcctctcagaccccacacctggtgccctggcacctcgtgatgggctgtggaatggtgcccagctctatgcctgccaagaccccacgatcttcgaggagagacacctcaagtacatctcacagctgggcaagggcaactttggcagcgtggagctgtgccgctatgacccgctaggcgacaatacaggtgccctggtggccgtgaaacagctgcagcacagcgggccagaccagcagagggactttcagcgggagattcagatcctcaaagcactgcacagtgatttcattgtcaagtatcgtggtgtcagctatggcccgggccgccagagcctgcggctggtcatggagtacctgcccagcggctgcttgcgcgacttcctgcagcggcaccgcgcgcgcctcgatgccagccgcctccttctctattcctcgcagatctgcaagggcatggagtacctgggctcccgccgctgcgtgcaccgcgacctggccgcccgaaacatcctcgtggagagcgaggcacacgtcaagatcgctgacttcggcctagctaagctgctgccgcttgacaaagactactacgtggtccgcgagccaggccagagccccattttctggtatgcccccgaatccctctcggacaacatcttctctcgccagtcagacgtctggagcttcggggtcgtcctgtacgagctcttcacctactgcgacaaaagctgcagcccctcggccgagttcctgcggatgatgggatgtgagcgggatgtccccgccctctgccgcctcttggaactgctggaggagggccagaggctgccggcgcctcctgcctgccctgctgaggttcacgagctcatgaagctgtgctgggcccctagcccacaggaccggccatcattcagcgccctgggcccccagctggacatgctgtggagcggaagccgggggtgtgagactcatgccttcactgctcacccagagggcaaacaccactccctgtccttttcatagctcctgcccgcagacctctggattaggtctctgttgactggctgtgtgaccttaggcccggagctgcccctctctgggcctcagaggccttatgagggtcctctacttcaggaacacccccatgacattgcatttgggggggctcccgtggcctgtagaatagcctgtggcctttgcaatttgttaaggttcaagacagatgggcatatgtgtcagtggggctctctgagtcctggcccaaagaagcaaggaaccaaatttaagactctcgcatcttcccaaccccttaagccctggccccctgagtttccttttctgtctctctctttttattttttttatttttatttttatttttgagacagagcctcgctctgttacccagggtggagtgcagtggtgcgatctcggctcagtgcaacctctgcttcccaggttcaagcgattctcctgcctcagcctcccgagtagctgggattacaggtgtgcaccaccacacccggctaattttttttatttttaatagagatgaggtttcaccatgatggccaggctgatctcgaactcctaacctcaagtgatcctcccacc

SEQ ID NO: 1361 - DNA, 1277 bp, Homo sapiens
gatgtggcccgtggcctagctcgtcaagttgccgtggcgcggagaactctgcaaaacaagaggctgaggattgcgttagagataaaccagttcacgccggagccccgtgagggaagcgtctccgttgggtccggccgctctgcgggactctgaggaaaagctcgcaccaggtggacgcggatctgtcaacatgggtaaaggagaccccaacaagccgcggggcaaaatgtcctcgtacgccttcttcgtgcagacctgccgggaagagcacaagaagaaacacccggactcttccgtcaatttcgcggaattctccaagaagtgttcggagagatggaagaccatgtctgcaaaggagaagtcgaagtttgaagatatggcaaaaagtgacaaagctcgctatgacagggagatgaaaaattacgttcctcccaaaggtgataagaaggggaagaaaaaggaccccaatgctcctaaaaggccaccatctgccttcttcctgttttgctctgaacatcgcccaaagatcaaaagtgaacaccctggcctatccattggggatactgcaaagaaattgggtgaaatgtggtctgagcagtcagccaaagataaacaaccatatgaacagaaagcagctaagctaaaggagaaatatgaaaaggatattgctgcatatcgtgccaagggcaaaagtgaagcaggaaagaagggccctggcaggccaacaggctcaaagaagaagaacgaaccagaagatgaggaggaggaggaggaagaagaagatgaagatgaggaggaagaggatgaagatgaagaataaatggctatcctttaatgatgcgtgtggaatgtgtgtgtgtgctcaggcaattattttgctaagaatgtgaattcaagtgcagctcaatactagcttcagtataaaaactgtacagatttttgtatagctgataagattctctgtagagaaaatacttttaaaaaatgcaggttgtagctttttgatgggctactcatacagttagattttacagcttctgatgttgaatgttcctaaatatttaatggtttttttaatttctgtgtgtatggtagcacagcaaacttgtaggaattagtatcaatagtaaattttgggttttttaggatgttgcatttcgtttttttaaaaaaaattttgtaataaaattatgtatattatttctattgtctttgtcttaatatgctaagttaattttcactttaaaaaagccatttgaagaccaaaaaaaaaaaaa

SEQ ID NO: 1362 - DNA, 1792 bp, Homo sapiens
gtgacgtggccgcttccagtctttggtcgggtttcggcggcttcagtgctcggggaggaggcagtgacggccggtgagattggaagtggcggcggcggcaggcggcagaggggagtccgaggttatgcgtctcaatgatcccgcggaaacgctacgggtctaagaacacggatcagggtgtctacctgggtctctcaaagacacaggtcctgtcccctgcaactgctggcagtagcagcagcgacatcgcccctctgccccccccagtgaccctcgtccctccccctcccgacaccatgtcctgccgggatcggacccaggagtttctgtctgcctgcaagtcgctgcagacccgtcagaatggaatccagacaaataagccagctttgcgtgctgtccgacaacgcagtgaattcaccctcatggccaagcgcattgggaaagaccttagcaacacatttgccaagctggagaagctgacaatcttggcaaagcgcaagtccctctttgatgataaagcagtggaaattgaagagctaacatatatcatcaaacaggacatcaatagcctcaacaaacaaattgctcagctccaggatttcgtgagagccaagggcagccagagtggccggcacctgcagacccactccaacaccattgtggtctccttgcagtcgaaactggcttctatgtccaatgacttcaaatcggttttagaagtgaggacagagaacctgaagcagcagaggagccggagagagcagttctcccgggcacctgtgtcagccctgccccttgcccctaaccacctgggcggtggtgctgtggttctgggggcagagtcccatgcctccaaggatgtcgccatcgacatgatggactctcggaccagccagcagctgcagctcattgacgagcaggattcctacatccagagtcgggcagacaccatgcagaacattgagtcgacaattgttgagttgggctccatctttcagcagttggcacacatggttaaggaacaggaggaaaccattcagaggatcgacgagaacgtgctaggagcccagctggacgttgaggccgcccattcagagatcctcaagtacttccagtctgtcacctccaaccggtggctcatggtcaaaatcttcctcatcctcattgtcttcttcatcatctttgtggtcttccttgcttgaaccctctctactctgaggcactctgttggggtttgggaccctcctgggaaggcaagtggccagtgctgccactgagcctgtgcagggtacttgggagaaaggccctgtttccctggaactgctaagaatgaccactgcccctgatcccccaccccttgcctctggccaccctgtcttccccccaccaccctcaggcctatgaaacacacagggttctagatttgaactctgctgtgaagtgactggaagggagcagaggccagctgggggccagtgggggaggttgtttccactaggagatttttataaaccctctccagcctctcccaaaggaagcgttggcagcaaagggagatgatgcccttacccaccttcctgtgagtgaagagaggaagcagccccagggaccaattttcccaattgacctctttcttcctctttcaccatgtgaggcagggagccctgagcccttcagctgcctgcacaacccctgacattggctgctggtgactcaatctgccaaatgtgctgcagctcgttttctcccaattacagcaagactgtcagcctcaaaaaaaaaaaaaaaaaaa

SEQ ID NO: 1363 - DNA, 1983 bp, Homo sapiens
gtttctcaacatcctggcttagtattgtgtgcaaaatcagagaggggtgcaagatcctgatttttcaggagttcaagcgacaatggcagcccaatacggcagtatgagcttcaaccccagcacaccaggggccagttatgggcctggaaggcaagagcccagaaattcccaattgagaattgtgttagtgggtaaaaccggagcaggaaaaagtgcaacaggaaacagcatccttggccggaaagtgtttcattctggcactgcagcaaaatccattaccaagaagtgtgagaaacgcagcagctcatggaaggaaacagaacttgtcgtagttgacacaccaggcattttcgacacagaggtgcccaatgctgaaacgtccaaggagattattcgctgcattcttctgacctccccagggcctcatgctctgcttctggtggttccactgggccgttacactgaggaagagcacaaagccacagagaagatcctgaaaatgtttggagagagggctagaagtttcatgattctcatattcacccggaaagatgacttaggtgacaccaatttgcatgactacttaagggaagctccagaagacattcaagacttgatggacattttcggtgaccgctactgtgcgttaaacaacaaggcaacaggcgctgagcaggaggcccagagggcacagttgctgggcctgatccagcgcgtggtgagggagaacaaggaaggctgctacactaataggatgtaccaaagggcggaggaggagatccagaagcaaacacaagcaatgcaagaactccacagagtggagctggagagagagaaagcgcggataagagaggagtatgaagagaaaatcagaaagctggaagataaagtggagcaggaaaagagaaagaagcaaatggagaagaaactagcagaacaggaggctcactatgctgtaaggcagcaaagggcaagaacggaagtggagagtaaggatgggatacttgaattaatcatgacagcgttacagattgcttcctttattttgttacgtctgttcgcggaagattaaacttaatgaaaatctgtttgtattttctgcatattctctggcaaccttgccccatacttacttatttagcatagtcgagtgctctagtttctgtctctcaggcactcgtaactaaggaccaccattggccattggtagatgtttgattgacttaacaagagagggacaaattttcaatttgtgaaactccaaagcagaaagtattggtgcttgctaccttgtgaattcttccttagacatgcagagaaaatgtatgcaagagaccaaaaagatggctccaagctatgtcatgttacctgtaataaaatcttttcttctagattctttctatgttggcagataatctccccttgtagcttccactcacttattcttgcattcagagtcacaatgatcatcttacccatgtggtttttgagaaagaaagatcaattctttgtttgcagtaggtaatcttagagatggagatgattgtagaattattcctagatgagtgtcaatttatttaattccattgtcatataaggagtcaaattgtttcttatcatttgttcattgaagaacagagacctgtctggaaaatcgatctctacaaattcaattaaataatgatccccaaatgctgaaaaagtgaaatacagcaattcaacagataatagagcaatgtttagtatattcagctgtatctgtagaaactctttgacgaacctcaatttaaccaatttgatgaatacccagttctcttcttttctagagaaagatagttgcaacctcacctccctcactcaacactttgaatacttattgtttggcaggtcatccacacacttctgcccccactgcattgaattttttgcttatgttgtttataataaaacttttcaattatctcaaaaaaaaaaaaaaaaaaa

SEQ ID NO: 1364 - DNA, 2482 bp, Homo sapiens
tgcgctgcccggggcggccagagccctgcagaacaaaccgccgcacggaattaggggccgccgtccgcgcctgccaggcttggaagcggactcgcccccagggccaccgccctaggaaacctcccgtcggaagcctcccaagcaagccgctcacccgcggctcccgcgcgaggcggcgtgggcgtgggcgcggccctggcgcggcggcgcgcgcggggtgaagggagcccggcgcgctggctgcggcgacggcggccgttgctgcgccgggtactggggtcgctgcctgaggcgcaggcgccgtggactccacccgccccggggcctgggctcgctgtggactcgtcatggcgaccgagcagaggcctttccacctggtggtgttcggcgcgtctggcttcaccggccagttcgtgaccgaggaggtggcccgggagcaggtggacccggagcggagctcccgcctgccctgggccgtggcgggccgctcccgggagaagctgcagcgggtgctggagaaggcggccctgaagctgggaagaccaacactgtcatctgaagttggaatcatcatctgtgatattgctaatccagcctcgcttgatgaaatggctaaacaggcaacagttgtcctcaattgcgtaggaccatatcggttttatggagaacctgtaataaaagcatgtattgaaaatggagccagttgtatcgacatcagtggagaacctcagtttctggaactaatgcaactgaagtatcatgagaaagctgcagacaaaggggtttatatcattggaagcagcggctttgactccattccagcagatctgggagtaatatataccagaaataaaatgaatggtactttgactgctgtggaaagtttcctgactatacattcaggacctgaggggttgagcattcatgatggtacctggaagtcagcaatttatggttttggagatcagagtaatttgagaaaactaagaaatgtatcaaatctgaaacctgtcccgctcattggtccaaaattgaagagaaggtggccaatttcttattgtcgggaactcaaaggttattccattccttttatgggatctgatgtgtctgttgtaaggaggactcaacgttacttgtatgaaaatttagaggaatcaccagttcagtatgctgcgtatgtaactgtgggaggcatcacctctgttattaagctgatgtttgcaggacttttctttttgttctttgtgaggtttggaattggaaggcaacttctcataaaattcccatggttcttctcctttggctatttttcaaaacaaggcccaacacaaaaacagattgatgctgcctcattcacgctgacattctttggtcaaggatacagccaaggcactggtacagataagaacaaaccaaatatcaaaatttgtactcaggtgaaaggaccagaggctggctatgtggctacccccatagctatggttcaggcagccatgactcttctaagtgatgcttctcatctgcctaaggcgggcggggtcttcacacctggagcagctttttccaaaacaaagttgattgacagactcaacaaacacggtattgagtttagtgttattagcagctctgaagtctaaacactggaagaattaactgaagtcataacgtgcgtgaattaacagcttctctatttgatatttgaaattcttctgtaagcctgtctgagtgtatgtggaaacgattgtcaaatctaaaatatctatatattaaaaagtaggaaattgtcctagcttaccctaaatttcaaatctgagttgattttgtgattttattgcttataacagagaactcatatttgacatatttttttcattgatgtgttcctggtagattttcacgaatgagctggcaggtctaatgggggaggcggcgtcccagtctgtgttgcagcagcattctcatcgggggtgcgcacaccatcgttactgtcgggcagtaactgccgcttgccttgccgcagtaggagggaaatctcaccttccttccacatactgtcttgagcctttgctaaattaaactgcactttttgctatttttgcctagtttttcgccaatctacactgattttggactgttacctaagttgaaaaataaaaggttgtcaatcgaatggtggtttaatgtttggacctgccgatgtatttgtatagtggtagaaacatgctgcttaagtggcctaacctgtttcttgccaataagtaggcttatcattttatctttacgtaattctatatctgtgactaggtttttaaggatacagcttataagttgctatcaattttcactacctaagcagaatttttctctaatttactttttgtattttaactaggttttacatggaagccctaaaataaggcaaaagactttttcttttgtaataagcatataataaacacgtatatacatagcaaaaaaaaaa

SEQ ID NO: 1365 - DNA, 2213 bp, Homo sapiens
gggcgtgcaaaggcgcggagcgggacggaaaccacaaataaatagcggcggcggcagcgcgtcatctggtggagcaggaagtgcaggcagagtccggaggctggtgctttctgcgcgtccccaggactttgccatgggctgggggccgcggaggctgcgagcggccgggcgagggcagcggcggcggcgtccccaccggggctgagcgagcagcgacgcgaggggcgcgcggagatggcagcgtccagcaactccagcctgtccggctcgtcggtgtcctccgatgctgaagaataccagcctcctatatggaaatcatacttatatcagttacagcaagaggcacctcgtcccaagagaatcatttgtcctcgggaggtggaaaacagaccaaaatattatggaagagagtttcatgggatcatctctcgggagcaggcggatgagcttcttggaggcgtggagggtgcctacatccttagagaaagccagcggcaaccaggatgctacacgctggctctcaggtttggaaaccagaccttaaactacaggctcttccacgacgggaaacactttgtgggtgagaagaggtttgagtcgattcatgatctggtgacagatggcttgataacactgtacatagaaacaaaagctgccgagtacatttcaaaaatgacaactaaccccatctatgaacacattggatatgccaccctactcagagaaaaagtatccagaaggctgagcaggtctaaaaatgaaccaagaaaaacaaacgtcacacatgaagaacacacagcggtggaaaagatctcctccctggttcgaagggctgccctcacacacaacgacaaccacttcaattatgagaagacacacaactttaaggtccacacgttccgaggcccacactggtgtgaatattgtgccaatttcatgtgggggctcatcgcccaaggggtccggtgctcagactgtggattgaacgtacacaaacagtgttccaagcacgttcccaatgactgccaacctgatctcaagaggatcaagaaagtgtactgttgtgacctcacaacacttgtgaaggctcacaacactcagagacccatggtggtagacatatgcattcgggaaattgaagcaagaggattaaaatcggaaggcctttacagagtctctgggttcactgaacacattgaagatgtcaaaatggcatttgacagagatggtgaaaaggccgatatatctgccaatgtctatccagacataaacatcatcactggagcccttaaactgtatttcagagacttacccatccctgtcatcacatatgatacctattccaaatttatagatgcagcaaaaatctccaatgcagatgagaggctggaagccgtccatgaagtgctgatgctgctgcctcctgcccactatgaaaccctccggtacctaatgatccacctcaaaaaggttactatgaatgaaaaagacaatttcatgaatgcagaaaatctggggatcgtgtttgggcccactctgatgaggccccctgaggacagcaccctgaccaccctgcatgatatgcggtaccaaaagctgattgtgcagattttaatagaaaacgaagacgttttattctaatccatcagggaaatgagctgaatggcccagcaccatcaagttgacacagctaaggataaaacatttcttaccacttgatttgttttccaagcaagtgctagaatttgctggactgcagaggatcgctgagtggggtactgtgtctcatagacatgcgccacctccacgtgagaacaagggtgaaggtgagggaagcccctcaggttgggtcttttgctgtgcctcctatgtatgtctggtttgctggaagagtgattaatacatctttaatttattaaaaaacaatgtagacctttaaacttcagtcttattgggaataaaagggaacttaattcatacaggtacttgatacagttatacattttccacttacaaaaagaagacaattctgttaaatgaaacgtgtatcgtaaaatgtaattttatttacccacgagaatgttgttattttagcaatagaactcaatgcagatgcattggttattaccctgtgtaccttgtccctcattttgctgtgacaccctgaaaaagctgaccacaaatgcagtattatcattgacatacctctgtcc

SEQ ID NO: 1366 - DNA, 3186 bp, Homo sapiens
tggcgcctgccccgtcagacaggggccccatcccactcgctaccctgtccgatggggaaactgaggcacggagctggacagtgactcagacaccaggagctgcctggagtggagctgagagctcaggtctgggctcagccagtccagagtacaaatctactgtcccttcctagctgtgtgatcttgacaggcactggacggggcctgcaggggtctccacagagaccatcaggatgtcgtattttggggagcatttttggggcgagaaaaatcatggctttgaggtcctgtaccacagcgtgaagcaggggcccatctccaccaaggagctggcggacttcatccgggagagggccaccatcgaggagacctactcgaaggcgatggcgaaactctccaagctggccagcaacgggacccccatggggaccttcgccccgctctgggaggtcttccgcgtctcctcggacaagctggcgctgtgccacctggaactgacacggaagttacaggatctcatcaaggacgttctccgctacggcgaggaacagctcaagacccacaagaagtgcaaggaggaagtggtgagcaccttggatgctgtgcaggtactctcgggcgtcagccagctcctgcccaagtcccgcgagaactacctgaaccgttgcatggaccaggagcggctgcggagggagagtaccagccagaaggagatggacaaggcggagactaaaaccaagaaggcggcagagagcctgcggcgctcagtggaaaaatacaactcagcccgagctgactttgagcagaagatgctggactcagccctgcgcttccaagccatggaggagacacacctgaggcacatgaaggcactgctgggctcatatgctcactcggtggaggacacgcacgtgcagattgggcaggtgcatgaggaatttaagcagaacatcgagaacgtcagcgtggagatgctactcaggaagtttgcagagagtaagggcacaggccgggagaagcctggacctctggacttcgaggcatacagtgcggctgccctgcaggaagcgatgaaacgtttgcggggagccaaggcctttcgccttccaggactaagccggcgggagcgggagccggagccacctgcagctgtagatttcctggagcccgattcagggacatgtccagaggtggatgaagaaggtttcactgtccggcctgatgtgacccagaacagcacggccgagccctcccgtttctcgtccagcgactccgacttcgacgatgaagagccccgcaagttctatgtgcacatcaagcctgccccggcccgggctccagcctgcagccccgaggcagcagcggcacagctcagggccaccgcaggcagcctcatccttcctcctggcccagggggcaccatgaaacgccattcttcacgggacgctgctgggaaaccccagagacctcggtctgcccccagaaccagcagctgtgcagagagattgcagtcagaggagcaggtgtccaagaacctctttgggccgcccctggagtcagcctttgaccacgaagattttacaggctctagcagcctgggcttcacctccagcccctcccctttctcctcctcgtcgcccgaaaacgtggaggattccggcctggactctccgtcccacgcggcacctggcccctccccagattcctgggtcccccgcccaggcaccccgcagagcccgcccagctgtagggcgccacccccagaggccaggggtatccgggcaccgcctctgccagactcgccgcagcccctcgcctcgtctccaggcccctgggggctggaggccttggccggaggagacctgatgcctgcacctgctgaccccacagccagggagggcctggcagccccacccaggagacttcgctctaggaaggtgtcctgccctctcacacgtagcaatggggacctgtctcgttccctgagcccctccccactgggctcttcagccgccagcactgccttggaacggcccagcttcttatcccagacaggacacggagtctcccggggtccgagccctgtggtcctgggctcccaggatgccctgcccatagccacagccttcacggagtatgtccacgcctacttccgtggccacagccccagctgcctggctcgagtaactggggagctgaccatgaccttccctgctggcatcgtgcgtgtgttcagcgggaccccaccaccacctgtcctcagcttccggcttgtacacacaaccgctattgagcacttccagcccaacgccgatctgctgttcagtgacccctcccagagtgaccctgagaccaaagacttctggctcaacatggcagctctgaccgaagccctgcagcgccaggcagagcagaaccccactgcctcctactacaacgtggtgctgctgcgataccagttctcccgcccgggtccccagtctgtgcctctgcagctcagtgcccactggcagtgtggagccaccctcacccaggtctcagtggagtacggctaccggcccggtgccacggctgtgcccacaccactcacgaacgtccagatcctgctgcctgtgggggagcctgtgaccaacgtccgcttgcagccggctgccacctggaacctggaggagaagcggctcacttggaggcttccagatgtgtccgaggcaggcggttctggccgcctctctgccagctgggagccgctctcagggcccagcacacccagccccgtggctgcacagttcaccagcgaggggaccactctgtcgggcgtggacttggaactggtgggcagcggttaccgcatgtcgctggtgaagaggaggtttgccacagggatgtacctggtgagctgctgaacccgcaaatgctgctgccccagctctacactgcgccctggtgctggctgaccaccccctgccctcctgccggaccctggggcctcccaccccagcctccctgaggcccatactccacggagaggagccccatgcccagcctggctgagcccgagattcgctcctccccctcatgccaaccccacacaggtcccggccttttaatgttctttgaataaacactttattttctaataaaataaaaaaggaaaaaaaaaaaaaaaaaaaaaaaaaaaaaaaaaaa

SEQ ID NO: 1367 - DNA, 4369 bp, Homo sapiens
cgtgggcgccagaaagcggaacctcccgggccagtcgcgcggtggtcaccctcttgggagctggggaggaggctgcggaggctggcccggctccttcgggcgtcgcttcccggaccgggtgcgcggggtcccccggaacgtgtgttccaggtcctcccgcgccagtgttcgcagtccccgcctggtcgcggcggcgcctcgggcgcgggtgcaggcgcgcggcgcgcaggcggggggcgctgtggtcttggcgcggggaccgagccgctcggccagacccgcctcttttccctccccgccagcccgcccgcctgcccgccccccacgcgtcgtgtcgccgggaagccgggcggagacagagcgcttgggatccacggcgctcggaccgctgtcctccaacagcgcagggcagagcggctggcgccgccggagcgcggagccacgaccctccctggccgcctttgtctactggccgtgcggcccggaaccgccactctccagggccggggacgcgcccgcagctgtcggtgacagctcctccctaccgcaaccctccggggcggaggggcggtcgggccgggccctgctagcccgcgaccgcaagcccgcgctcgcggatcgatgcccccgcagcagggggaccccgcgttccccgaccgctgcgaggcgcctccggtgccgccgcgtcgggagcgcggtggacgcgggggacgcgggcctggggagccggggggccgggggcgtgcggggggtgccgaggggcgcggcgtcaagtgcgtgctggtcggcgacggcgcggtgggcaagacgagcctggtggtgagctacaccaccaacggctaccccaccgagtacatccctactgccttcgacaacttctccgcggtggtgtctgtggatgggcggcccgtgagactccaactctgtgacactgccggacaggatgaatttgacaagctgaggcctctctgctacaccaacacagacatcttcctgctctgcttcagtgtcgtgagcccctcatccttccagaacgtcagtgagaaatgggtgccggagattcgatgccactgtcccaaagcccccatcatcctagttggaacgcagtcggatctcagagaagatgtcaaagtcctcattgagttggacaaatgcaaagaaaagccagtgcctgaagaggcggctaagctgtgcgccgaggaaatcaaagccgcctcctacatcgagtgttcagccttgactcaaaaaaacctcaaagaggtctttgatgcagccatcgtcgctggcattcaatactcggacactcagcaacagccaaagaagtctaaaagcaggactccagataaaatgaaaaacctctccaagtcctggtggaagaagtactgctgtttcgtatgatgctggcaagacacccagaaaggctattttcagatgaaatcgatattagaagctatattagctgaaacaactccttttactgcgtagaacctatatcgagagtgtgtgtatatgtattataggaggagctctcaattttatgtattctttctgcctttaattttcttgtttgtttgagcttagggatgagatacttatgcaagatatttttgaagtaaattaaacatttttcacatctctggaaatttagagttctagacctctggttaatttatatctaatatgaagaagacacctctaatctggatgttaagaatgaagttctgctacattataatgtacagaagagcaaaagggaggaacactatggttaaccctctcttgattaagggctacttaatgcacagtgcattatgtacacaggtcaaccatggtaacaatagttcttagctttgaaactccatgcaaaccatgccttttttttaaggagcaaaaatctgagaaaaaaagtgagagacctctgcctacaaaacctcaaaccagtcacttttgtcaattgctaatacccagttacttatgatttaaaaacaaccaacagaaaacatcccactgactgtatggcactctgtagtcaaaaaaggaaacttccttattgggacttttctttcttagtccagttgtgttgacacatatgaacacagacaaagtgctatgcggaggaaagcaagtgttggtcagtagtttcatgttttagggagtggttcctgtggagatcagaaagtgacatttgctttcggtactgtaatacgtgcaccaaactgcctcaatcctaggtaacgagggcaacagggagcacctgtctggattgtttttaaacctccatactcaagctgtctcttcggcagggaggtgaatactcttgaaaggccaacagcaagtgtttgtgggacacaacacagataattttttcttaagtcggccaagatgtacttctctgtgtgcacacccatgcacactcatgcacacagatacataggtctgtatggctgtatttgctgttgattcagactttcacaccattaatggggaaaagcgtggccacaaaaacagatgctaggaagcttggcttcctcttcttgttgacccttttttgaaccaacatcttttttattatattcagagtatgtttttaagtgtatcttaatatatacattttttaggacatcttaaatctaaacaaaaaataaaatgaacatctcttgaaacctgttaaaacaaccagttaaagccacagatggctttcagggcagtagcagcagaggccagtggactctgaggactcctgaggggcggggcgtgtagccagccaggtgcatgccgggaccatggcccccatacttggctgcttcctgtgacagtgaaatacatccttcaaggtggcagctgttagggctgaatcttctggagaaaaaggtgccatctcaggagaatagcttttactctggtaggaatgcttccgagacaccacaaggcagcctgaacactcagttgcagggtcgggcttgcggtgggtgacccagagccaccaaagtcacatccacaactaatgagggaaatctgtaaagccagttagatagaagaattttatttttctgtgggttttgtgttgtcttttttatgttaaaaagaaatccagtttgtgtttttctatagaaaaagtaaaagatcaggttatactttaggttaggggttctatttattcctgttagtaaataaaattaacaaatttctttgtttaacaaaagattaatctttaaaccactaaaatacatagactgattgattattcaacacattggaattgatgtcggtcatagtttcctgaagcatttagttacaacctgaaggaataaaatgatttgtggaaatgcttaaaatagacctaactgaatacagtctcatcttgccgcgcctggcttacctatctgtggaaagctaggcttcccaggctgggctctgcctgtctggtgcctggaggtgtgggagggaagatgagttatttaactggtaagcgatttgaaacactatttttatattaaagtaaatggcatggagtatagtgcaaattcatttttaagatagaacacaaaacttgaaagaagttttatgcgtgtgacagtgtatggggctgcagttggtctccctggaggggacttccacacctcctgcctttaggccatgggtggaaagtgctcagtgaagtacacctgtgtggcccagttctgaaagctttatacagttgaattttaagtggggttgataacaccttggactgttagtgttaaaaatctagtgggttgacctttaaatgcaacagtttttaaaatatattgctgcattttatagaatagtaaaggtacgattatacttgagattttcctccatttttatttcttcgtgaacatagagtttggggccgaaaatgtttttaaagtatgtgtttgagttaaatataaagttggttcacttcaaagctaaaaaattgttaaacttgcagcttggtattgcagagaagattttataagaattttgctttagagaatgccactttggctgaactacaagtgtaggccaccattataatttataaatacagcatacttcaaaactgtttgttatctcttgttaccatgtatgtataaatggaccttttataaccttgttctctgcttgacagactcaagagaaactacccaggtattacacaagccaaaatgggagcaaggccttctctccagactatcgtaacctggtgccttaccaagttgtgcttttctgttttcaagtgtaaatgatgttgagcagaatgttgtacttgaaaatgctataagtgagatggtatgaaataaattctgacttatgaaaaaaaaaaaaaaaaaaaaaaaaaaaaaaaaaaaaaaaaaaaaaaaaa

SEQ ID NO: 1368 - DNA, 4752 bp, Homo sapiens
atggaaagcggtgcagttctgctggaatccaaatcctccccatttaacctactgcatgagatgcatgagcttcgcctcctgggtcacctgtgtgacgtgacagtcagcgtggagtatcagggtgtccgcaaagacttcatggcccacaaggcagtgctggctgccaccagcaagttttttaaggaagtgttccttaatgagaagagtgtggatggtactaggactaatgtctacttaaatgaagtgcaggttgctgactttgcttcatttcttgagtttgtctacactgcaaaggtacaggtggaagaagatcgggtgcagcgaatgctggaagtggctgaaaagctgaaatgtttggatttatcagaaacttgttttcaattaaagaaacagatgttagagtcagtacttttggagttgcaaaatttctcagagtctcaggaggtggaggtgagcagtggctcccaagttagtgctgctcctgcccccagggcaagtgtggccaccgatggccctcaccccagtggtctcacggattccttggactacccaggagagagagccagcaatggcatgtcttcagatttgccaccgaagaagtccaaggacaaactagacaagaagaaagaggtagttaaacctccctaccctaaaatcaggagagctagtggaaggctggctgggaggaaggtctttgtggagatccctaaaaagaaatatacgagaagactccgagagcagcagaaaactgctgagggtgatgtgggggactacaggtgtccccaggaccaaagcccggacagggtgggcacggagatggagcaggtttccaaaaatgagggttgccaggcaggtgctgagttggaggaattgtcaaagaaagcagggccggaggaggaagaggaggaggaggaggaggacgaagaaggggagaagaagaagagcaactttaagtgcagcatttgcgagaaggcgtttctgtatgagaagagcttcctgaagcacagcaagcaccgccacggcgtggccaccgaggtggtgtaccgctgcgacacctgcggccagaccttcgccaaccgctgcaacctgaagagccaccagcgccacgtgcacagcagcgagcgccatttcccatgcgagctgtgcgggaagaagttcaagcgcaagaaggacgtgaagcggcacgtgctgcaggtgcatgagggcggcggcgagcggcaccgctgcggccagtgcggcaagggcctgagttccaagacagcgctgcggctgcacgagcgcacacacacgggagaccggccctacggctgcaccgagtgcggcgccaggttctcgcagccgtccgcgctcaagacgcacatgagaattcatacaggggaaaaaccttttgtctgtgatgaatgtggtgcaagattcactcagaaccacatgctgatttatcataaaaggtgtcacacaggtgaaagaccttttatgtgtgaaacatgtggcaagagttttgcttctaaggagtacttaaaacaccacaatagaatccatactggatccaaaccctttaaatgtgaagtatgtttcaggacttttgcccagcggaattcactgtaccagcatattaaagtccacacaggggagcgtccctactgctgtgaccagtgcggcaagcagttcacccagctcaacgccctccagcgccaccgccgcatccacacaggggagaggccattcatgtgcaatgcgtgcggacggacattcaccgacaagtccactcttcggcggcacacctcaatacacgataagaatactccatggaagtctttccttgtcattgtagatggctcgcccaagaacgatgacggacacaagactgaacagcctgacgaagagtatgtgtcatccaagctttcggataaattgctgtcttttgcagaaaatggccatttccacaacctggctgcagtccaagacactgtacctaccatgcaggagaacagttctgctgacacagcctgcaaggcagatgactccgtggtgtcccaggacaccctcctggccaccaccatcagtgagcttagcgagctgaccccacagacagactcgatgcccacacagcttcactctttgagcaacatggaataagagcttcaagcagttcccatcctgttagtctgcgtgtgtggtagctgaactcaagatgatgtggggctaagaaaaataattgtccatgtgcaaagatgtgggcaagaatggcctctgcagattttcctgaacttctgctaacttgcacggctttatcacagcatttttaaagctttccctcaaaaatcctgatctgcatgatctcagctactttattgacaaaaaggcagtgaacataacctcacttaattctggtgtagggtgtatgtgctaatcgttctaattcttgattacctagtttatagataactgctggtcttaattgcagagtacagagaactgaaccagctcctgatattgtagttagcagtcttcctggcttctcactctgccttatatttccatgtgggtttacttctctcataactactttcaaggtatttttcttccaagctgaaataaaactggggccacatattttcagtcatttcttccctgttgaattgaagcaaatcagattttctgtggggaccctcaaatgcaactgaagaaatagattgttgcattcattcctccccaccccccatttgtaggcagtaaacaaagtatgactgacagattgaacacctgcaaaactgctagcgtaatctcagcacatacgcagctaggaagtttgtcataaaatcaacttagaaatgagatgaggctgttcagtttgtcttaaaaaaatcagattaggtaaaagctgtcctaccaaagagtctagcaaaacaatatagtatttttttgcagaggcatgaaaaattaagacgctttagagtacttgaaagttgtgtagtcattttatttgcaaaatgaggtgactgtggcaaattatagaacacagagtattattacttttgccaggtttttctgacttgatttctgtaatttccagaaacccagacttctcatttccacacctagagatggaaacaggcaagtaactgacatgtctatttccttgggagcatgtgagaacatagcagtagggaccaaaagtctcagcacacttacctccgattatgccttaaagagttgattgtgaagaaccagtaactttgtcccaaatgcttctttggctgtttcatgcaggacttaattattgcttttaaaaattcacaatgaaaagacgattctgctgtatttgttaaacgttgacatttggttctagggccttgagtatgtgccacgtgcttgtgaaatgctatgattcacatgtaacatttaaacattaatttaaaaagggaaccttggagaattcttttgttcactagttccttttttctctacatttttaatttattaaacttgctgtgaaaacactttgattttctaagaggaaggtactttaagttccagaatgaacatgtagctgcactatgccagaaattaatgagggaagactttcttcctaagtgcttatgttttaacttatgttagtgaaaccactacaaggtgtttcaggcgctgataacatgcttcacacctgcccttggaggtcacagtactaatttacttcaaatttagttatgacagtgtcactgtatcctagttatgtttacagcacaaataaataatgactgtcatacatccagaggagaccgaacctgcccagctgatgtactgttttatggaataaagtcacttgatcagaaggaattgaaacaatagatcattttgttacctactggagggatttttgtcttgaatttgtttccttagaaattctacaaaaaaatgttgttaataaatgtctgctttgtaaaagcagttttgcaattttttaaagatctatttctgttataatttaggttctgcagaaatatgattcttaattgaaacatataatttgcttaattacgtgaataatgaaatgtaaaatccgggtccataagcctttatttcatacagtcctaggattaagctgtttaactgcttggatcccagttggtctctggcagtgggatcctggagaggagaaatcctggcctctgctcatgcgcaggccacaaccgggctggaagtgcggttgagctctctgccactttcttcaatgtaaaaagtaggcatcaaagatacgacttctactatatacatttctctgtccctgagaacagagaaacgtaaccctgtaggggactggttacagaggacctcctggagcatctgccccattcctccaagtccaagcacagccatgctgagtggaagcgaggccaccatctgagtggattggtcccaagtgtgtaatgaggaaagtggccaggtgccggcacagtgcctctcccagagcctcaagaagggccatttaggagcttgcttcaaccattttccaaccattttctgtgaaatgctgtcagcccaaactccaaagggatgtgcagcctttcgttttaccaaattctttgctgtcgtttggaaaaaatgggccatgtggtggagacctttatttaaggtgatttttacagaaatgtgattttgctgtaggtgattatccaaacaagtaaatttgagtgtataatttaatttttaacctgttaaataaaccttgtccctccaaggaaaaaaaaaaaa

SEQ ID NO: 1369 - DNA, 2001 bp, Homo sapiens
cactctgtaagttcaccgccggtcgggtccggccgccgcgctgtccagctcctgagaccttgctgtccgccggtctgccgtctgcgcgcctcacgctcctcagccctggaccggggacaagtaaccctcggtgacaagaccaaagtgcactgctgcccacacagttcctacctttctggcttcaattcttcagaagagtttgccgtcctttggggagaacgtgatttttgttatctcagcccactgacttcattgatctctaatcttttttaattccttgggccaactttgttcgtgcccccacactgtagccagaagcccgttggcgagctctggcacctgcaaaccaccccgtggaacgagtgtttcctctggctgagggttggagaggaggtgtggtctcagcaggcggcccgtagcctcacagccaggcctggtggtgaggtcaccatgtccaccaaggtgcccatctatctgaagcgtggcagtcgcaagggcaagaaggagaagcttcgggacctgctgtcctcggacatgatcagcccaccgctgggggacttccgccacaccattcatattggcagtggcggcggcagtgacatgtttggcgacatctccttcctgcagggcaagttccacctcctgccggggaccatggtggaggggcctgaagaagatggcaccttcgacctccccttccagttcacccgcaccgccaccgtgtgtgggcgggagctcccggacggcccatcccctctgctcaagaacgccatctccctcccggttatcggtggaccccaggctctcaccctgcccacagcccaggctccacccaagccccctcgcctgcacctggagacccctcagccttccccacaggagggagggagtgtggacatctggaggattccagagactggctcccccaacagtggactgaccccggagtcaggggccgaggagcccttcctgtccaatgccagctccctgctgtccctgcacgtggacctggggccttccatcctggatgatgtcctgcagatcatggatcaggacctggacagcatgcagatccccacataggacacgaggctgcctaggctggggtcccaggtggggcccagccaggaggtggggtgtggacccggccctggcggcggagtcagggtcccaagatcccacctgtatggtcgctggccagtgattctccttctgagccgtgtttcccctctccctccctctccacgtgggcagggcaggccccatcgctttcctctgataaccacatggacacatcctgaagtcagcccaggcgccctgagcatcttggggcacctggaccccatcacaatactccttcttccttcaggtccctgggtgaaggctttgctgaaaccgaccccccttttcacgtcccttctgcctctgccccgttggatgccctgactgggggcaggggaagagacagggcacagctggccacagggctcagccactgagcaggctgttccgggcctttggctttgcatcctggacggggagtgtcctgtcagggaccagatgtgtcctgcctcatccctagctccaatcccttccccacgtgaccggggattctggttgcaataaaacatgctgctgctggtggcggagctccctgtccctttgccccaggtttcctcccggaggcagacagtctcccagagctgagggcttgcctctggagaccccagccccagagggctttgtggaggacaggccttgccctcaagaacgtcgtacctgacgctgagcctgtcatgagaatgcaacaggagcaaaccaagtgttgctgtgacattgattcagatgtttggcaagaggtggctgagcactggggtgggcttggcactgtgccaagcctggggccaatccctgcccagtcagctggggtctggtgggggacacccaagaataaaagaataaccacaaagtgtgcaagggaaaaaaaaaaaaaaaaaaaaa

SEQ ID NO: 1370 - DNA, 1061 bp, Homo sapiens
agcttgagtccggacaccaacgacggggacgctgggaagccgacttccggcgccctattttctcacctggttcccgcggcgagccagcggcagcggcggcggcgatgagacagaagcactaccttgaggctgcagcgcggggactgcacgacagctgcccgggccaagcccgctacctcctctgggcctacacttcgtcgcacgatgataagagcacttttgaagaaacgtgtccatactgtttccagctgttggttctggataactctcgagtgcgtctcaaacccaaagccaggttgacacccaaaatacagaaacttcttaatcgagaagcgagaaactatacactcagttttaaagaagcaaaaatggtgaaaaagttcaaagactccaaaagtgtattgttgatcacttgtaaaacatgcaacagaacagtgaaacatcatggtaaaagtagaagctttgtgtcaacattgaagagcaatcctgccactcctacaagtaaactcagcctgaagacaccagagagaaggactgcaaacccaaatcatgacatgtctggctcgaaaggcaagagcccagcatcggttttcagaacacctacatctggacagtcagtatctacttgctcctcaaagaacaccagcaaaacaaagaaacacttctctcaactaaaaatgttacttagtcagaatgaatcccaaaagattccaaaggtggacttcagaaatttcttatcttctctgaagggtggacttttaaaataagaaatgcctgatgtcaattctgaaactaaagttggtaaaacaactttttaaactcttattcattttttgaatacatggaaactagatctgaatgcaaacttttcttggcatccttcagtgtttatggggaaaatacctcattagtgtgaatacctgaaacctgcctacctcataggacagctgtgaggatcaaaaaatatatgaaagttccttgtagatacatatctatagatatatatgtgtatgtatataaagatagatatatacattgaaaaaaaaaaaaaaaaaaaaaaa

SEQ ID NO: 1371 - DNA, 1718 bp, Homo sapiens
gcggaagcggaagagcaggtctccaggggagcgatggcagccgggggtctgagccgctccgagcgcaaagcggcggagcgggtccggaggttgcgggaggagcagcagagggagcgcctccgccaggtgtcgcgcatcctgaggaaggcggcggcggagcgcagcgccgaggagggccggctgctggccgagagcgcggacctggtaacggagctgcagggccggagccggcggcgcgagggcctgaagcggcggcaggaggaggtgtgcgacgacccggaggagctgcgggggaaggtccgggagctggccagcgccgtccggaacgccaaatacttggtcgtctacacaggcgcgggaatcagcacggcagcgtctatcccagactaccggggccctaatggagtgtggacactgcttcagaaagggagaagcgttagtgctgccgacctgagcgaggccgagccaaccctcacccacatgagcatcacccgtctgcatgagcagaagctggtgcagcatgtggtgtctcagaactgtgacgggctccacctgaggagtgggctgccgcgcacggccatctccgagctccacgggaacatgtacattgaagtctgtacctcctgcgttcccaacagggagtacgtgcgggtgttcgatgtgacggagcgcactgccctccacagacaccagacaggccggacctgccacaagtgtgggacccagctgcgggacaccattgtgcactttggggagagggggacgttggggcagcctctgaactgggaagcggcgaccgaggctgccagcagagcagacaccatcctgtgtctagggtccagcctgaaggttctaaagaagtacccacgcctctggtgcatgaccaagccccctagccggcggccgaagctttacatcgtgaacctgcagtggaccccgaaggatgactgggctgccctgaagctacatgggaagtgtgatgacgtcatgcggctcctcatggccgagctgggcttggagatccccgcctatagcaggtggcaggatcccattttctcactggcgactcccctgcgtgctggtgaagaaggcagccacagtcggaagtcgctgtgcagaagcagagaggaggccccgcctggggaccggggtgcaccgcttagctcggcccccatcctagggggctggtttggcaggggctgcacaaaacgcacaaaaaggaagaaagtgacgtaatcacgtgctcgatgaagaacagttggcactttgcagatggccagtgtcacggtgaaggctgggttgcccccacgggtctagggagaacgaactctttggggatgacattttcaccgtgacatttttagccatttgtccttgaggaagccccttgcactgctgcggttgtaccctgatacggcctggccatcgaggacacctgcccatccggcctctgtgtcaagaggtggcagccgcacctttctgtgagaacggaactcgggttatttcagccccggcctgcagagtggaagcgcccagcggcctttcctcgctcaccaggccagtctcagggcctcaccgtatttctactactacttaatgaaaaagtgtgaactttatagaatcctctctgtactggatgtgcggcagaggggtggctccgagcctcggctctatgcagacctttttatttctattaaacgtttctgcactggcaaaaa

SEQ ID NO: 1372 - DNA, 4226 bp, Homo sapiens
ggccatggggcgcgtcgtcgcggagctcgtctcctcgctgctggggttgtggctgttgctgtgcagctgcggatgccccgagggcgccgagctgcgtgctccgccagataaaatcgcgattattggagccggaattggtggcacttcagcagcctattacctgcggcagaaatttgggaaagatgtgaagatagacctgtttgaaagagaagaggtcgggggccgcctggctaccatgatggtgcaggggcaagaatacgaggcaggaggttctgtcatccatcctttaaatctgcacatgaaacgttttgtcaaagacctgggtctctctgctgttcaggcctctggtggcctactggggatatataatggagagactctggtatttgaggagagcaactggttcataattaacgtgattaaattagtttggcgctatggatttcaattcctccgtatgcacatgtgggtagaggacgtgttagacaagttcatgaggatctaccgctaccagtctcatgactatgccttcagtagtgtcgaaaaattacttcatgctctaggaggagatgacttccttggaatgcttaatcgaacacttcttgaaaccttgcaaaaggccggcttttctgagaagttcctcaatgaaatgattgctcctgttatgagggtcaattatggccaaagcacggacatcaatgcctttgtgggggcggtgtcactgtcctgttctgattctggcctttgggcagtagaaggtggcaataaacttgtttgctcagggcttctgcaggcatccaaaagcaatcttatatctggctcagtaatgtacatcgaggagaaaacaaagaccaagtacacaggaaatccaacaaagatgtatgaagtggtctaccaaattggaactgagactcgttcagacttctatgacatcgtcttggtggccactccgttgaatcgaaaaatgtcgaatattacttttctcaactttgatcctccaattgaggaattccatcaatattatcaacatatagtgacaactttagttaagggggaattgaatacatctatctttagctctagacccatagataaatttggccttaatacagttttaaccactgataattcagatttgttcattaacagtattgggattgtgccctctgtgagagaaaaggaagatcctgagccatcaacagatggaacatatgtttggaagatcttttcccaagaaactcttactaaagcacaaattttaaagctctttctgtcctatgattatgctgtgaagaagccatggcttgcatatcctcactataagcccccggagaaatgcccctctatcattctccatgatcgactttattacctcaatggcatagagtgtgcagcaagtgccatggagatgagtgccattgcagcccacaacgctgcactccttgcctatcaccgctggaacgggcacacagacatgattgatcaggatggcttatatgagaaacttaaaactgaactatgaagtgacacactcctttttcccctcctagttccaaatgactatcagtggcaaaaaagaacaaaatctgagcagagatgattttgaaccagatattttgccattatcattgtttaataaaagtaatccctgctggtcataggaaaacacacggttctaattaagtgtgaaggtatagctattgcacttatgccatctccaaaatttcttaagtattctttcactatccattaggagtttttcttaaacttgtctgataataagaatcacctggagttaggaggtggtggttgcagtgagccaatctcaccattgcacttcagcctgagcaacacgagcaaaactccgtctcaaaagtaaataaaaataatcacctggagtttgttaaaccatatggattctcaggctcctctcttgaagattctgattcagtaggtctgggagtggcgccctggattttgatcaaaattgtagagcattttaaggtgagtacctgagggagaacttaaagacatcttagttggggagtagtccttttgaattttacagctagatataatcttcagtcagataaaatttatgggagctggtgtcttatgcctgactcttagtaatttcataccggtttgaagtacgtgtgcccatgcctaaagccttgactttcagaatgttgtcttttgattcttctgtcttgatttgattaggggtgaaatttagaagtcttagtaatgtaacttgaagatgttaaacaaaaatctcaagtaaaatgaaaagcaaatatgggctactgaattaagaaactggcattctagtattaaatcctcacttcaggagcttttaaaaatactgagacccccccataaccagagattcagattcaaagactgaggataggaccttagcattgtagctatttaaagtttctaatgtgcacccagggttgggaatcaccaatgtgggtgtgaaaatgcctacaaagggttttagtgccttagaagtcctaagaagcccaatctgtatcaaagcagatccattttgcaaggatctttcttttagaactttctcagttctcttagtaagaactttagaagtaatcttgataataagcacagacagcctaacagcagaggcaacttaaataactcctgagcagttggcactagaacagaatacttggaatgacaccaaagttaaccaagtccagcatatgtccaaagagttaagtgtttcatttactgtagcattctgggtgagaaattggttgctgaaatcttaagacagtggtctcaaccttggctgcacattggaatcacctgtagggttttaaagcatccaaatggtaattaacaggcagcaaaacttcagaactagttctgcatctactgtgcaaagatcatgattaactgtcaagacactggtagaacagaacaagcaaaagattaagagttcaaaagtaaatgcaaccaatttaacatgtagtgttattaaaaaattacaaaggcctagaccagcctgggcaacatggtgaaaccccatctctacaaaaaatttttaaaaagttggccaggcatggtaatgcgcgcctgtggtcccagctgctcgggaggctgaggtgggaggatcacttgagccttggaggtcaaggctgcagtgaatcatgatcatgccactgtactccagcctgggcaacagagaccatcttaaaaaaaaaaaatccttccattgaatagaaacttcaaagtccttcatcagatcatggcattagctactttagcaaaatagtgtaaactttggttctgagtaaaaatgacttccctaccacagttgtgaatgttaatatgctgataaaactgccaagatatatttgataggtaggggattaaactcatggtttgtcaaaagagtgtttttttctagttttattcttaacagatatgttgaggtattcatatttgtttccttttgtggttttaatgaagacaatttgtaaagtaatactgttatgtatatgctaaatgttggtaaatactaattaatttccatcatttgtagacttgttttgcaatgggatatatttttacttataataccaatttaggctgggcgcagtggctcacgcctgtaatcccagcactttgggaggccaaggcaaacggatcacgaggtcaggagatcaagaccatcctggccaacatggtgaaaccccatctctactgaatacacaaaaattggctggacatggtggcgcatgtctgtaatcccagctactgtaatctcagctactcgggaggctgaggcaggagaattgcctcaaccgggaggcggaggttgcagtgagccaagatcgcaccactgcactccagcctggcaacagagcgagactctgtctcagaaaaaaaaaaacaaaaaccagtttaggctgggtatggtggctcaccagcactttgggaggctgaggcaggtggatctcttgaggtcgggagtttgagaccagcctggccaacatggtgaaaccctgtctttactaaaaatacaaaaattagccaggcatggtggcgtgtgccagtaatcccagctacttgggaggctgaggcgcgagaatcgcttgaaccctggagatggaggttgcagtgagcagagatcgcaccactgcactccagcctgggcaagagtgagactgtgtctcaaaaggaaaaaaaaaaaaaaa

SEQ ID NO: 1373 - DNA, 2051 bp, Homo sapiens
tggggtgtcgctccgggctggtggcggggccactgccccgcttgggggaagccgagcgatggtttgtgggcgccagttgtctggcgccgggagtgagaccctaaaacaaagaagaacacaaatcatgtcccgaggacttccaaagcagaaaccgatagaaggtgttaaacaagttatagttgtggcttctggaaagggtggagtcggaaaatctactacagcagtgaatcttgcacttgcactagcagcgaacgattcgtccaaggccattggtttgctagatgtggatgtgtatggaccttcagttccaaagatgatgaatctgaaaggaaatccggaattatcacagagcaacctaatgaggcctctcttgaattatggtattgcttgtatgtctatgggctttctggttgaagaaagtgaaccagtagtttggagaggccttatggtaatgtcggccattgagaaattgttgaggcaggtagattggggtcaactggactacttagttgtagacatgccaccaggaactggagatgtgcagttatcagtctcacagaatattcctataacaggtgctgtgattgtctccacgccccaggacatcgcattgatggatgcacacaagggtgctgagatgtttcgcagagtccacgtgcccgtccttggccttgtccaaaacatgagtgttttccagtgtccaaaatgtaaacacaaaactcatatttttggtgctgatggtgcaaggaaactagcacagacccttggtcttgaagttctaggagacattcccttacaccttaatataagggaagcttcagatacaggccagccaattgtgttttcacagcctgaaagtgatgaggccaaagcttacttgaggattgctgtggaagtggtaagaagattgccatcaccttcagaatgattccccaagtgtcctggaaatttgcctggtactgacattaagaggacctttggaaatcagcaatgtggtgatggaacctacagaaataatagaaatcataactgttttatttctaaggaaagaatgtcttcatatttgacttgctaagctaaggttcacaaaactttgatgtatcaatgttaactgctatatttaggaattttttgaaagctggtgtgtaccacctgcaaagaactgcattttattttattgaattacccctttagaaatcatgagtttatgatgttacaagtccattttgggagagaactgtacactttttgcaggaccacagaattagtaatttaaatgatatactaaatttgtgtatgggcataagtattacgccttcccaccaggcaatttggactgtctttgaatcctgtctttggtactgtcttggacatgttcttaatatgaacctctgcttcttcatctggatcacactataccccagacttaatgaatttcagtctccaggagtggagcctgaacataatgtatttttagtaagaccatgatgatgttgatgatgattctggtaatcatggcagtaagaataatagctaacatttaacaagttaattataattgttcttccatttgtgtgagtgggtactattatctccattttacagataagtaatttgagatataatttgaaggcactcaaccttgagtgtcttgctgagggttactgtatctagcaggtgatggagcttggatttgaacttgagtaattcgatattagattcatctttttgtacaccaatgtgcttttgttaattaaaaaaagtcggtggtggctaggcgtggtggctcacgcctgtaatcccagcactttgggaggttgaggtgggtggatcatgaggtcaggagttcaagaccagcctgaccaacatggtgaaaccccgtctctactaaaaatacaaaaattagctgggtgtggtggcatacgcctgtaatcccagctactcgggaggctgaggcaggagaatcatttcaacccgggaggctgaggttgcagtgagtggagattgtaccactgcactccagcctggtcaatggagtgcgactccatctc

SEQ ID NO: 1374 - DNA, 3639 bp, Homo sapiens
gcggcgctgggtcggtggcggaggctgaggagaaggaggagcgggccgtggaggcttcgccgcctaggtactgctataaccagaatttggtagaaaaaggatttacttgttggggccctcttgataaaaagagatgtggggggattctcgacctgctaacagaactggaccttttcgtgggagccaagaagaaaggtttgctcccgggtggaacagggattatcctcctcctccccttaagagtcatgctcaagagagacactctggcaactttcctggcagagattcacttccctttgatttccaggggcattcggggcctccttttgcaaatgtagaggagcattctttcagctatggagctagagacggaccgcatggtgactatcgaggaggggagggacctggacatgatttcagggggggagatttttcgtcttctgatttccagagcagagattcatcacagttggacttcaggggtagggacatacattctggggattttcgggatagagaaggaccacctatggactataggggtggagatggtacttctatggattatagaggtagggaggcacctcatatgaactacagagacagggatgctcacgctgttgacttcagaggtagggatgctcctccatctgacttcaggggccggggcacttatgatttagattttagaggccgggatggatcccatgcagattttaggggaagggatttatcagatttggattttagggccagagaacagtcccgttctgattttaggaatagagatgtatctgatttggactttagagacaaagacggaacacaagtagactttagaggccgaggttcaggtactactgatctagactttagggacagggatacgccacattcagatttcagaggtagacaccgatctaggactgatcaggattttaggggcagagagatgggatcttgtatggaatttaaagatagggagatgccccctgtggatccaaatattttggattacattcagccctctacacaagatagagaacattctggtatgaatgtgaacaggagagaagaatccacacatgaccatacgatagaaaggcctgcttttggcattcagaagggagaatttgagcattcagaaacaagagaaggagaaacacaaggtgtagcctttgaacatgagtctccagcagactttcagaacagccaaagtccagttcaagaccaagataagtcacagctttctggacgtgaagagcagagttcagatgctggtctgtttaaagaagaaggcggtctggactttcttgggcggcaagacaccgattacagaagcatggagtaccgtgatgtggatcataggctgccaggaagccagatgtttggctatggccagagcaagtcttttccagagggcaaaactgcccgagatgcccaacgggaccttcaggatcaagattataggaccggcccaagtgaggagaaacccagcaggcttattcgattaagtggggtacctgaagatgccacaaaagaagagattcttaatgcttttcggactcctgatggcatgcctgtaaagaacttgcagttgaaggagtataacacaggttacgactatggctatgtctgcgtggagttttcactcttggaagatgccatcggatgcatggaggccaaccagggaactctaatgatccaggacaaagaagttaccctggagtatgtatcaagcctggatttttggtactgcaaacgatgtaaggcaaacattggtgggcaccgatcttcctgttcattctgcaagaacccaagagaagtgacagaggccaagcaagaattaataacctaccctcagcctcagaaaacatccataccagcaccattggaaaaacagcccaaccagcccctaagaccagctgataaggaacctgaacccaggaagagggaagaaggccaagagtcacgcttaggacatcaaaagagagaagcagaaaggtatctgcctccttctcgaagggaagggccaactttccgaagagaccgagagagggagtcatggtctggagagacacgccaggatggagagagcaaaactatcatgctaaagcgtatctatcgttccacaccacctgaggtgatagtggaagtgctggagccctatgtccgccttactactgccaacgtccgtatcatcaagaacagaacaggccctatggggcatacctatggctttattgacctcgactcccatgcggaagctcttcgtgtggtgaagatcttacagaaccttgatccgccatttagcattgatgggaagatggtagctgtaaacctggccactggaaaacgaagaaatgattctggggaccattctgaccacatgcattactatcagggtaaaaaatatttccgagataggaggggaggtggcagaaattcagactggtcttcagatacaaatcgacaaggacaacagtcatcatctgactgctacatatatgattctgctactggctactattatgaccccttggcaggaacttattatgaccccaatacccagcaagaagtctatgtgccccaggatcctggattacctgaggaagaagagatcaaggaaaaaaaacccaccagtcaaggaaagtcaagtagcaagaaggaaatgtctaaaagagatggcaaggagaaaaaagacagaggagtgacgaggtttcaggaaaatgccagtgaagggaaggcccctgcagaagacgtctttaagaagcccctgcctcctactgtgaagaaggaagagagtccccctccacctaaagtggtaaacccactgatcggcctcttgggtgaatatggaggagacagtgactatgaggaggaagaagaggaggaacagacccctcccccacagccccgcacagcacagccccagaagcgagaggagcaaaccaagaaggagaatgaagaagacaaactcactgactggaataaactggcttgtctgctttgcagaaggcagtttcccaataaagaagttctgatcaaacaccagcagctgtcagacctgcacaagcaaaacctggaaatccaccggaagataaaacagtctgagcaggagctagcctatctggaaaggagagaacgagagggaaagtttaaaggaagaggaaatgatcgcagggaaaagctccagtcttttgactctccagaaaggaaacggattaagtactccagggaaactgacagtgatcgtaaacttgttgataaagaagatatcgacactagcagcaaaggaggctgtgtccaacaggctactggctggaggaaagggacaggcctgggatatggccatcctggattggcttcatcagaggaggctgaaggccggatgaggggccccagtgttggagcctcaggaagaaccagcaaaagacagtccaacgagacttatcgagatgctgttcgaagagtcatgtttgctcgatataaagaactcgattaagaaaggagacaagttccatgggatacaacctccctcttgttttgtttgtctctccttttcttttgttactgttcttgctgctagaacttttttaaataaactttttttcaatgtgaaaaaaaaaaaaaaaaaaa

SEQ ID NO: 1375 - DNA, 2521 bp, Homo sapiens
gaagctctttcgcggcgctacggcgttggcaccagtctctagaaaagaagtcagctctggttcggagaagcagcggctggcgtgggccatccggggaatgggcgccctcgtgacctagtgttgcggggcaaaaagggtcttgccggcctcgctcgtgcaggggcgtatctgggcgcctgagcgcggcgtgggagccttgggagccgccgcagcagggggcacacccggaaccggcctgagcgcccgggaccatgaacggggaggccatctgcagcgccctgcccaccattccctaccacaaactcgccgacctgcgctacctgagccgcggcgcctctggcactgtgtcgtccgcccgccacgcagactggcgcgtccaggtggccgtgaagcacctgcacatccacactccgctgctcgacagtgaaagaaaggatgtcttaagagaagctgaaattttacacaaagctagatttagttacattcttccaattttgggaatttgcaatgagcctgaatttttgggaatagttactgaatacatgccaaatggatcattaaatgaactcctacataggaaaactgaatatcctgatgttgcttggccattgagatttcgcatcctgcatgaaattgcccttggtgtaaattacctgcacaatatgactcctcctttacttcatcatgacttgaagactcagaatatcttattggacaatgaatttcatgttaagattgcagattttggtttatcaaagtggcgcatgatgtccctctcacagtcacgaagtagcaaatctgcaccagaaggagggacaattatctatatgccacctgaaaactatgaacctggacaaaaatcaagggccagtatcaagcacgatatatatagctatgcagttatcacatgggaagtgttatccagaaaacagccttttgaagatgtcaccaatcctttgcagataatgtatagtgtgtcacaaggacatcgacctgttattaatgaagaaagtttgccatatgatatacctcaccgagcacgtatgatctctctaatagaaagtggatgggcacaaaatccagatgaaagaccatctttcttaaaatgtttaatagaacttgaaccagttttgagaacatttgaagagataacttttcttgaagctgttattcagctaaagaaaacaaagttacagagtgtttcaagtgccattcacctatgtgacaagaagaaaatggaattatctctgaacatacctgtaaatcatggtccacaagaggaatcatgtggatcctctcagctccatgaaaatagtggttctcctgaaacttcaaggtccctgccagctcctcaagacaatgattttttatctagaaaagctcaagactgttattttatgaagctgcatcactgtcctggaaatcacagttgggatagcaccatttctggatctcaaagggctgcattctgtgatcacaagaccactccatgctcttcagcaataataaatccactctcaactgcaggaaactcagaacgtctgcagcctggtatagcccagcagtggatccagagcaaaagggaagacattgtgaaccaaatgacagaagcctgccttaaccagtcgctagatgcccttctgtccagggacttgatcatgaaagaggactatgaacttgttagtaccaagcctacaaggacctcaaaagtcagacaattactagacactactgacatccaaggagaagaatttgccaaagttatagtacaaaaattgaaagataacaaacaaatgggtcttcagccttacccggaaatacttgtggtttctagatcaccatctttaaatttacttcaaaataaaagcatgtaagtgactgtttttcaagaagaaatgtgtttcataaaaggatatttatatctctgttgctttgactttttttatataaaatccgtgagtattaaagctttattgaaggttctttgggtaaatattagtctccctccatgacactgcagtattttttttaattaatacaagtaaaaagtttgaattttgctacatagttcaatttttatgtctcttttgttaacagaaaccacttttaaaggatagtaattattcttgtttataacagtgccttaaggtatgatgtatttctgatggaagccattttcacattcatgttcttcatggattatttgttacttgtctaagatgcaatttgattttatgaagtatataccctttacccaccagagacagtacagaatccctgccctaaaatcccaggcttaattgccctacaaagggttattaatttaaaactccattattaggattacattttaaagttttatttatgaattccctttaaaaatgatatttcaaaggtaaaacaatacaatataaagaaaaaaataaatatattaataccggcttcctgtccccatttttaacctcagccttccctactgtcaccaacaaccaagctaaataaagtcaacagcctgatgtgt

SEQ ID NO: 1376 - DNA, 3923 bp, Homo sapiens
aaagagcccgctccgccgagcgccgggcgacggcaggaagcccctccgcttggccagaatggagcagccgaagggagttgattggacagtcatcatcctgacctgccagtacaaggacagtgtccaggtctttcagagagaactggaagtgcggcagaagcgggagcagatccctgctgggacgctgttactggccgtggaggacccagagaagcgtgtgggcagcggaggagccaccctcaacgccctgctggtggctgctgaacacctgagtgcccgggcaggcttcactgtggtcacatccgatgtcctgcactcggcctggatcctcattctgcacatgggtcgagacttcccctttgatgactgtggcagggctttcacctgcctccccgtggagaaccccgaggcccccgtggaagccttggtctgcaacctggactgcctgctggacatcatgacctatcggctgggcccgggctccccgccaggcgtgtgggtctgcagcaccgacatgctgctgtctgttcctgcaaatcctggtatcagctgggacagcttccggggagccagagtgatcgccctcccagggagcccggcctacgctcagaatcatggcgtctacctaactgacccccagggccttgttttggacatttactaccagggcactgaggcagagattcagcggtgtgtcaggcctgatgggcgggtgccactggtctctggggttgtcttcttctctgtggagactgccgagcgcctcctagccacccacgtgagcccgcccctggatgcctgcacctacctaggcttggactccggagcccggcctgtccagctgtctctgttttttgacattctccactgcatggctgagaacgtgaccagggaggacttcctggtggggaggcccccagagttggggcaaggcgatgcagatgtagcgggttatctgcagagcgcccgggcccagctgtggagggagcttcgcgatcagccccttaccatggcctatgtctccagcggcagctacagctacatgacctcctcagccagtgagttcctgctcagcctcacactccccggggctcctggggcccagattgtgcactcccaggtggaggagcagcagcttctggcggccgggagctctgtggtcagctgcctgctggagggccctgtccagctgggtcctgggagcgtcctgcagcactgccacctgcagggccccattcacataggcgctggctgcttggtgactggcctggatacagcccactccaaggccctgcatggccgggagctgcgtgaccttgtcctgcagggacaccacacgcggctacacggctccccgggccacgccttcaccctcgttggccgtctggacagctgggagagacagggggcaggcacatatctcaacgtgccctggagtgaattcttcaagaggacaggtgttcgagcctgggacctgtgggaccctgagacgctgcccgcagagtactgccttcccagcgcccgcctctttcctgtgctccacccctcgagggagctgggaccccaggacctgctgtggatgctggaccaccaggaggatgggggcgaggccctgcgagcctggcgggcctcctggcgcctgtcctgggagcagctgcagccgtgcctggatcgggctgccacgctggcctctcgccgggacctgttcttccgccaggccctgcataaggcgcggcacgtgctggaggcccggcaggacctcagcctgcgcccgctgatctgggctgctgtccgcgagggctgccccgggcccctgctggccacgctggaccaggttgcagctggggcaggagaccctggtgtggcggcacgggcactggcctgtgtggcggacgtcctgggctgcatggcagagggccgtgggggcttgcggagcgggccagctgccaaccctgagtggatgcggcccttctcatacctggagtgtggagacctggcagcgggcgtggaggcgcttgcccaggagagggacaagtggctaagcaggccagccttgctggtgcgagcggcccgccactatgagggggctggtcagatcctgatccgccaggctgtgatgtcagcccagcactttgtctccacagagcaggtggaactgccgggacctgggcagtgggtggtggctgagtgcccggcccgtgtggatttctctgggggctggagtgacacgccaccccttgcctatgagcttggcggggctgtgctgggcctggctgtgcgagtggacggccgccggcccatcggagccagggcacgccgcatcccggagcctgagctgtggctggcggtggggcctcggcaggatgagatgactgtgaagatagtgtgccggtgcctggctgacctgcgggactactgccagcctcatgccccaggggccctgctgaaggcggccttcatctgtgcagggatcgtgcatgtccactcggaactccagctgagtgagcagctgctccgcaccttcgggggcggctttgagctgcacacctggtctgagctgccccacggctctggcctgggcaccagcagcatcctggcaggcactgccctggctgccttgcagcgagccgcaggccgggtggtgggcacggaagccctgatccacgcagtgctgcacctggagcaggtgctcaccactggaggtggctggcaggaccaagtaggtggcctaatgcctggcatcaaggtggggcgctcccgggctcagctgccactgaaggtggaggtagaagaggtcacggtgcctgagggctttgtccagaagctcaatgaccacctgctcttggtgtacactggcaagacccgcctggctcggaacctgctgcaggatgtgctgaggagctggtatgcccgacttcctgctgtggtgcagaatgcccacagcctggtacggcaaactgaggagtgtgctgaaggcttccgccaaggaagcctgcctctgctgggccagtgcctgacctcgtactgggagcagaagaagctcatggctccaggctgtgagcccctgactgtgcggcgtatgatggatgtcctggccccccacgtgcatggccagagcctggctggggcaggcggtggaggctttctctatctgttgaccaaggagccacagcaaaaggaggccttggaggcggtgctggccaagaccgagggccttgggaattacagcatccacctggttgaagtggacactcagggcctgagcctgaagctgctggggaccgaggcctcaacctgttgccctttcccatgaagctggcttctctctgcaacaggagaaaacctggagctacagtgtcccccaccttccttgccccatgggaacctccacctcctactccccacccacctctgcgaatctgctcccaaaggaagctgaccagagcaagatctgggcaagcagagagtgcctgggacaggactgtgacctggtggacaggggcctagatgtagcctctgttcctcctggacataggaaggtcccaagcttagtatcccacgtggcctttacaaatcctatggctggccttctcattccacaagggccctggaaagggttgacagccagccttggcatatggctgggagtcccttagcaaggccaaccctgaagaggccctttgaggcattccctatggcttagagttgtagacttacactcaaccctcatgtgagcgtgggagtgagggtggcggtcccttgccaagttggtagcagtgacccagtgattcactgccatcccaggccttaactagcaaaactacggagcgtgccaagtgacctggtgcctgtgggaagtgggttctcaggactggcattcttggaataaattcactctgtccttgcaaaaaaaaaaaaaaaaa

SEQ ID NO: 1377 - DNA, 3350 bp, Homo sapiens
gcggtggcggcgggcggcgcgggggcacttgttgttcttcgcgaagtcggagcccgagcgccaggcggcggcggcggccgaggggagcgcgacagtgagcgccggcgcgaggacagcgcgtgcccgcgaggagccgccgcgcgcccgcgccctccgcgcgacgccagctacgagttccagggagctctgtcctggtgaccgtgcccgggttatgacgactaatcccaaaccgaataaggcattaaaggtcaagaaggaggcgggcgagaacgccccggtgctcagcgatgatgagctggtgtccatgtcggtgcgggagctgaaccagcacctgcggggtctcaccaaggaggaggtgacccgcctgaagcagcgtcggcgcacactcaagaaccgcggctacgcggccagctgccgcatcaagcgggtgacgcagaaggaggagctggagcggcagcgcgtggagctgcagcaggaggtggagaagctggcgcgtgagaacagcagcatgcggctggagctggacgccctgcgctccaagtacgaggcgctgcagaccttcgcgcgcaccgtggcccggggacctgtggcgccctccaaggtggccaccaccagcgtcatcaccatcgtcaagtccaccgagctctcctccacctccgtgcccttctcggctgcatcctagtgccggccgggggcggggggtggcgggcggcgggcggcgggcaggcgggtgggggcacacccctcgtacctgtcactgggatgcagactctcgacatccgagtccaagcgcaggcccctcgggcgcaggcagctcacaccaggaagagactgtattgcagggtgaagagtgggctcccgtgggcccagagctgcacgccggtccacagacacactcacgcccgccacctgctccccgcaggatgtgtctgtgtgtgggaattggtatcttgcacccgtgggagtcgggacatataatggaaaggccctcgggaagttccgcgtcctctgtgggggctgccggaagacacggccccaggagtcaggcccctgtggtcaggtctagcatggggcttgttttccactcctgctgtaagcagccttcgacacctgtcctgccacggcctcccagccggtgcgggagcccctcactgccctgaccgactccgcagtccccggggaggagcatggatggtgtgtcggcagctccgtccttccagctgtcccgttgcagtgcccgtgatccgcgtctgccttagcaggggcctgcgtgagtgggcacggtgtgggaggtcgcctgcgtggggtggtgtctgtgtgtgtgcacgcacgcctgccatcaaagcagcagggctgagggggtgcagcttgctggtgttcactgggggagggcctgtgggcacacatggcagagagagtggctcacacgtcgtgaggtctcccctgtgctctggtgacccgaggaggtcgtgcagcacagcgcagaagcccctgcccacgggatccggccccccagacaccgaccccacaggccgtcccggatctcagcggacacaggcaggagcgccccatcatttgacggtgagcaggactcaggctgtgtgtcctggagctacttctcaccaactgtggtcagtgcagggggaacgaggaggtcttttgggggcctggcgaggggaagggctgctgcagtctagggagagggggtgcagcctgggggatgttggtggacatggatgtggaggtggaaggaggaggacgttgcgtggagtggtgggaggaggcgggagccgtgtgcgagagcaggtggaaagccttgaggggcaggaccaggatgcagctggcttgtagaagagctcaggagtgagcctggcactccagagggcgcggcgggtggggaggcagcaggcaccagtccaggagagcttcgtggacgtggctcctgcgcgcacacccccaggagcacagccacgggctgcaggtgtggctggcctcagcactcagtcctcacccggagcctttgcctgctcctccttccaagagcactgaggcaccagtgggcttggcactccaccttgggcttccttttcctggagagccgccttgagggtccctcctgtgactggggtctctgcagcgagagccgcgggggttgcggagcccctgcctgggggagctggcggaatgtgagccgccggccgggggccgccacataagacctgcaaggtggtgcctggggccctggctccttctcggctgcccctgcccacccagtaacagcccccaccagctacagagcccaggcgggtgccagccacgctgggagggcagaggacagacagccccggggctgcgacttggttctgtgtctactgttagaagttgagtgggaagctgcaggcccgccaggaccactgggtccctacagagcaaaggcctgcgtgttcccaaacagccgttgcccccgtggccgtggtaggtaatccatattggatgtcataaggaccagggggatatttaaagagagaaacagaaaatatatagagatataaaattatattcacagtttatctacagatttttcgtaacaatctttcttttccagtttgatactgtaaatctatcagagcagagccgggggcacgggcacaggtgggagttgggagcaaagcggaggcccgggctgcccgccgtcccccttcatctccccacggactgtaccaggcagctgggccccgcaggacaggccgcagcgggtggccggttctgtcccgtcttggggttcttggtgtccacgtcttgtgggccgtgggcttctacctgcccttggcctgcagtgctttgctggagaagggactccctggtccccagggtggacggagccgctgtcaccgcccagagctgggccggggaagcacggtgtgttctgcttttcttttcagattgttgaaatttcattgtcatgatttaatatatggatttttttatttaagaaaaagacgagggactctttgtcacgtgggtttgttttctgtctccgtgcctccggcttcccaaagagatccaggtctttgcgtttccagggcgtggggaccccggccccctatgccgccacgccgccacaccgcctcaccctggcttctgtgctacttggcagttccatttcattatttattttttgtgctgctttttatcatgatataaattattgaaaacagatcacatgtgggcccgtgtctggccgccgccgccctgccccgtccctgcggccaccacctaatttattgccgtgcgtcctgctgctgtgactgcttttgtacctttgcaataaagaattttctggtttcaga

SEQ ID NO: 1378 - DNA, 3010 bp, Homo sapiens
cgggaggaggcgcgggcgcgccgggagggaccggcggcggcatgggccgggggccctgggatgcgggcccgtctcgccgcctgctgccgctgttgctgctgctcggcctggcccgcggcgccgcgggagcgccgggccccgacggtttagacgtctgtgccacttgccatgaacatgccacatgccagcaaagagaagggaagaagatctgtatttgcaactatggatttgtagggaacgggaggactcagtgtgttgataaaaatgagtgccagtttggagccactcttgtctgtgggaaccacacatcttgccacaacacccccgggggcttctattgcatttgcctggaaggatatcgagccacaaacaacaacaagacattcattcccaacgatggcaccttttgtacagacatagatgagtgtgaagtttctggcctgtgcaggcatggagggcgatgcgtgaacactcatgggagctttgaatgctactgtatggatggatacttgccaaggaatggacctgaacctttccacccgaccaccgatgccacatcatgcacagaaatagactgtggtacccctcctgaggttccagatggctatatcataggaaattatacgtctagtctgggcagccaggttcgttatgcttgcagagaaggattcttcagtgttccagaagatacagtttcaagctgcacaggcctgggcacatgggagtccccaaaattacattgccaagagatcaactgtggcaaccctccagaaatgcggcacgccatcttggtaggaaatcacagctccaggctgggcggtgtggctcgctatgtctgtcaagagggctttgagagccctggaggaaagatcacttctgtttgcacagagaaaggcacctggagagaaagtactttaacatgcacagaaattctgacaaagattaatgatgtatcactgtttaatgatacctgtgtgagatggcaaataaactcaagaagaataaaccccaagatctcatatgtgatatccataaaaggacaacggttggaccctatggaatcagttcgtgaggagacagtcaacttgaccacagacagcaggaccccagaagtgtgcctagccctgtacccaggcaccaactacaccgtgaacatctccacagcacctcccaggcgctcgatgccagccgtcatcggtttccagacagctgaagttgatctcttagaagatgatggaagtttcaatatttcaatatttaatgaaacttgtttgaaattgaacaggcgttctaggaaagttggatcagaacacatgtaccaatttaccgttctgggtcagaggtggtatctggctaacttttctcatgcaacatcgtttaacttcacaacgagggaacaagtgcctgtagtgtgtttggatctgtaccctacgactgattatacggtgaatgtgaccctgctgagatctcctaagcggcactcagtgcaaataacaatagcaactcccccagcagtaaaacagaccatcagtaacatttcaggatttaatgaaacctgcttgagatggagaagcatcaagacagctgatatggaggagatgtatttattccacatttggggccagagatggtatcagaaggaatttgcccaggaaatgacctttaatatcagtagcagcagccgagatcccgaggtgtgcttggacctacgtccgggtaccaactacaatgtcagtctccgggctctgtcttcggaacttcctgtggtcatctccctgacaacccagataacagagcctcccctcccggaagtagaattttttacggtgcacagaggacctctaccacgcctcagactgaggaaagccaaggagaaaaatggaccaatcagttcatatcaggtgttagtgcttcccctggccctccaaagcacattttcttgtgattctgaaggcgcttcctccttctttagcaacgcctctgatgctgatggatacgtggctgcagaactactggccaaagatgttccagatgatgccatggagatacctataggagacaggctgtactatggggaatattataatgcacccttgaaaagagggagtgattactgcattatattacgaatcacaagtgaatggaataaggtgagaagacactcctgtgcagtttgggctcaggtgaaagattcgtcactcatgctgctgcagatggcgggtgttggactgggttccctggctgttgtgatcattctcacattcctctccttctcagcggtgtgatggcagatggacactgagtggggaggatgcactgctgctgggcaggtgttctggcagcttctcaggtgcccgcacagaggctccgtgtgacttccgtccagggagcatgtgggcctgcaactttctccattcccagctgggccccattcctggatttaagatggtggctatccctgaggagtcaccataaggagaaaactcaggaattctgagtcttccctgctacaggaccagttctgtgcaatgaacttgagactcctgatgtacactgtgatattgaccgaaggctacatacagatctgtgaatcttggctgggacttcctctgagtgatgcctgagggtcagctcctctagacattgactgcaagagaatctctgcaacctcctatataaaagcatttctgttaattcattcagaatccattctttacaatatgcagtgagatgggcttaagtttgggctagagtttgactttatgaaggaggtcattgaaaaagagaacagtgacgtaggcaaatgtttcaagcactttagaaacagtacttttcctataattagttgatatactaatgagaaaatatactagcctggccatgccaataagtttcctgctgtgtctgttaggcagcattgctttgatgcaatttctattgtcctatatattcaaaagtaatgtctacattccagtaaaaatatcccgtaattaagaaaaaaaaaaaaaaa

SEQ ID NO: 1379 - DNA, 605 bp, Homo sapiens
gaagtggcccttgcaggcaagagtgctggagggcggcagcggcgaccggagcggtaggagcagcaatttatccgtgtgcagccccaaactggaaagaagatgctaattaaagtgaagacgctgaccggaaaggagattgagattgacattgaacctacagacaaggtggagcgaatcaaggagcgtgtggaggagaaagagggaatccccccacaacagcagaggctcatctacagtggcaagcagatgaatgatgagaagacagcagctgattacaagattttaggtggttcagtccttcacctggtgttggctctgagaggaggaggtggtcttaggcagtgatggaccctccattttacctctttaccctgtcgctcataatgaggcatcatatatcctctcactctctgggacaccatagccactgccccctcccctggatgcccagtaatgtatgtctactggtgggagactgtgaggatcccaggattcagtattcctggcccagagggccttgctggctactgggtgttagtttgcagtcctgtgtgcttccctctcttatgactgtgtccctggttgtcaataaaatatttcctggc

SEQ ID NO: 1380 - DNA, 3272 bp, Homo sapiens
gacgttgccgtttccgggtcacccaggcagcttgtggcggcgaagccatcggtgttcgctgatgtccagtctatggagtcagttggtaccggtggcggcgcggaggcagaaggcggtgtccgagtaggggcctctgccccaccaggatgttacccggcttggccgccgccgcggcccacagatgtagctggtcctccctgtgccggctccgtctgcgatgcagggcggcggcctgtaatcccagcgaccgccaggagtggcagaatttagtgacatttggaagcttttcaaacatggttccctgtagtcatccatatattggtaccctgagtcaagtaaagttgtactccacaaatgttcagaaagaaggacagggatcacaaacactcagagtggaaaaagtaccatcatttgaaacagcagaaggtataggcacagaactcaaagctccacttaagcaagaacctctccaagtaagagttaaagcagtccttaagaaaagggagtatggctcaaagtacactcagaataatttcatcactggagtcagagcgataaatgagttctgcctcaaatccagtgatctagaacaacttcgaaaaatcagacgacgaagtccccatgaagatactgagtcttttactgtatacttgagatcagatgtggaagcaaaatctttggaagtttggggaagccctgaagctcttgccagagagaaaaaattgcgtaaggaagcagaaatagaatacagagaaaggctatttagaaaccaaaaaatattaagagaatacagagatttcttgggaaataccaagccacgctccagaacagcatcagtgttttttaagggaccaggaaaagtggtgatggttgcaatttgcatcaatggattaaactgcttctttaaatttcttgcctggatttataccggttcagcaagtatgttctcagaagctatacactcattatctgatacttgtaatcagggtttactagcattgggcatcagtaagtctgttcaaacaccagatccttctcatccgtacggattttcaaatatgcgctatatttcttcgctaattagtggtgttggtattttcatgatgggtgcaggactatcttggtaccatggagtcatgggattgcttcatcctcaaccaatagaatcccttctatgggcatattgtattttagcaggatcattagtatctgaaggagcaacacttcttgttgctgtaaatgaacttcgtaggaatgctcgggctaaaggaatgtcattttacaagtatgtaatggaaagtcgtgatcctagtacaaatgtgatattattggaggatactgctgcagtcttgggagttataatagcagccacttgcatgggccttacttctataacaggcaatccactgtatgacagcctaggttctttgggtgtgggcaccttattaggcatggtctcagcattcctcatctacactaacacagaagcactcttagggcggtccatccagccagaacaagtacaacggctcactgaactcctggagaatgacccatcagtaagggcaattcatgatgttaaagccacagatctgggattaggtaaagtaagatttaaggcagaagtagattttgatgggcgagttgttacaagatcatatttggaaaaacaagattttgaccaaatgttacaagaaattcaagaagtgaaaactcctgaagaactagagacctttatgcttaaacatggagaaaatattattgatactttaggagctgaagtagatagacttgagaaggaactgaaaaaacgaaatcctgaagttcgacatgtagatttggagatactgtgagtttgatggaatgaatcacctgggtggggaccttggaaacaagtttgtccgtccactctacaaagtttcctcctctcctacactgaaagactcagtgccatgcagaagccttttttttaagatgaaggaaatattttatgtaaagagcaactcagcaggacacagaactaaaactactacttacatctaacagacacactacaagttgaatcaatttgaaaatcatgtttttatgcttccatagggaacattttggttatttaaattgttcataatgtcccatatttcacctgttcagtgtatactgtactttgcaatcatctttccttttttcacattggtaaaaataagtggcatccataggatcatgatttttaatttgttgcctctgaagatttcactccatcaagatctgccaatcttcaatattctggctaaatcttggtatgtggtttttaaacagtcactccgtttcaaagtctgtctttccttatagaatgtggaaattatttctccataccttgtgattttgacctgagtgctaagagaatcactctccttacctagttatctacaaatgttcattccagaaatgtttagttactgaattgaatgaagacatctcagtacactcttttaggtcatagtagttgccattttgtaaaatttcttttttcttctttgcttttttccccttatttggtttaatttttctaatgttaggagatatagtcctagatatttccatgggccagtgtgatgacttttttttaaatgaggttcagtaccataatgtttatttactggaagataatgcatttataagcattttaaaattctgtaaagtgggttagaaatatttataattttacaggcaggacagcatttgacttttatttaaaaggcggcactacttatgtaaatctgagctgtgggatatttcttgctttaagagagagacagaatctctcactgaaactcatggtcatgattttgtataatatagttcatactgtgtctgtgagtttcttcagttacaaatgggcatttagtatagttatattgactataacatgtaagtaaatagctttctactgaccctaagttatcaaggtggaaaaaaaacatgcaattcagtaattgaaaatgtggtgaaaagctgcagctgtcatcatcaaaacaactcataacatactttaaaatgttcaggtagcagtgagcattgttcatatgagaatggcggctgggtgatctctttgctgaattaatgagttcttaacatgtggacccaactgcctgtgtgagatctgtgtcttaaaacttactggaatggaaatctatgaattattgcaaattgtaatgctggaaacaaaaaataaatccttggttaaagggtttgtaatggtgaaaaaaaaaaaa

SEQ ID NO: 1381 - DNA, 1182 bp, Homo sapiens
aggtcagcgtgtgaagtaggcgctggcaacgcggggttacccgctgttattgaggagtaacggcccagcggaccacccaggcttgaggcagcggcgggaaccactcggtttgctgcgataccatggaaggaggcgggggaagcggcaacaaaaccacagggggattggccggctttttcggagccggcggagcaggttactcgcacgcggatttggctggcgtcccgctaactggtatgaaccctctgtctccttatttaaatgtggatccacgatacctcgtgcaggatacagatgagtttattttacctaccggagctaataaaacccggggcagatttgagctggccttctttacgattggaggatgttgcatgacaggggctgcgtttggtgcaatgaatggtcttcggctaggattgaaggaaacccagaacatggcctggtccaaaccaagaaatgtacagattttgaatatggtgactaggcaaggggcactttgggctaatactctaggttctctggctttgctctatagtgcatttggtgtcatcattgagaaaacacgaggtgcagaagatgaccttaacacagtagcagctggaaccatgacaggcatgttgtataaatgtacaggtggtcttcgagggatagcacgaggtggtctgacaggactaacacttaccagcctctatgcactatataataactgggagcacatgaaaggctccttgctccaacagtcactctgaagattttgccaactcatgaatggaggacacttcagtagtcatctagatccttttataagacagtttggagttattctctctcttctacctacaattagtttgaaaaattggagattttgatttgctgtgatgaaaatcctggatggctgaccaagactggcacttgttccagccattagtgagttgaagccaaagccctttggtgactcactgagtaccatggttctgttctcctctggagatcttgcacatatctgttttcctcccccatgaactagaaaaccacttactcccagaattcaggtcgtgcttgttagtactatatcaccaagtccattcatttaatgatccaaaactgtaatgttgcactgtattccaaataaagggtaaaaacagaaccaaagttataactccaaaaaaaaaaaaaaaa

SEQ ID NO: 1382 - DNA, 2069 bp, Homo sapiens
gttgagctgtaccatggagcatcctcctgtgtcctgccaacccctgccattatagtcaccggagactcctttacctatccctatctgttagggttttcagatgtcctctcgctgggtttatatttgaaggtatagaatctgggaaagggtggggtgcaagctaaccaaatagggatgctagggttgggtggggaattgaggactcttctgtgcttttattgtagggctggggatcgaggatctgggcaaaaaaaatatgacatttccaaccagggacaaaatggaggcttgggcttagtgatgggtaaatggaagactggttgagtgggatgataatgggagaacttactgatgctcttttgggaaaaggtgctttaaagactcgatttgggagcctactggggcaaggcgactggggaggtgtacgtgttagtcaagtggaggtcaggtgggttatcttctgcctccttcactggcttcatgtgaacttgcctgtgacagaatatcttgccctagatgtcctcttccctcttgccatcgtgcaaaagcattcgatcttatgaccgtgagttcttatttgtggatgctaataactggggtaatctcagggagtactggggccatggctctttcccttgcttctctttctgctcactgctttgctttcaggtgcttagctgctcctttttatttctttgcaggactgggaaagcatgggaggaggattttgataagtttcttgttctctgcgtggtgatggggtggtctgagggccaagttaataagcctacctttggttattaccctggaaaattgagggttgatggtagggttatgattgtggcctgtgtatttgcaatttttctttgtcagtgtggctttctgtcatcttcctttttctccagtgagggttctgccactgtctcaatcccttggttcctgcaaaaaacagctaaatgtgctctcagggccagtggtgatgttctgtgttgcagccccagctcttgaaagtgacctggcccagatgagctctgcctgcttgtcatctttaggtcctgctgcccctgctgcctcagccctcaggctcctaactgctcaagccagaaggagctacaaagccaaatcatttgtcatttttctctggcagattgttttaaaatctccctcccctcttttattttaattatgccacctgtgttaatcctatagcctgcttctttgctttgtggattactgatttcaagttctataacttggggaaagttaggttgagtgaatgggaggacagacactgaatgtgtgttttggaaaaatggactctatcttcagattattcagcttctccacctatcacctctacaacttggccttcattggagaagttttagttggcttattcctggaacaagaccacctagaggcttttagccttgtcagcctgccctcttctgaggtttggaccttgttttaaattgtgtgcatggtgggcttgagactctcttgtaatggaggtaatgggactatcactgaggggttcagcctatccaggtaggctaccgttctagtcatacccatcacttaaattctgccacagtctgcacagacggttggtcctccaggcatattgtcctattaagccaaataggtggacatcatgggatggatgaggtcatcatgaaaacagatttactggatttatggacctagtatatactatgtaacagatggaaaactgaattttacaatctataggtacctttgaaaggtcataaagggtaaaagtctatagttttccagaaaataattcttaaaactgggttttatgtctagatttaaatcatgtatctgtctgtagtgcttcaaatgtggccaggtgtggtagctcacacctgtaattcccagcgctttgggaatttgaggcaagaggattgctagaggccaggattttgagaccagcttcggcaatacggtgagaccttgtctctaccaaaaaaaaaaaaaaaaaaaaaaaaaaaaaaaaaaaaaaaaaaaaaaaaaaaaaaaaaaaaaaaaaaaaaaaaaaacttggg

SEQ ID NO: 1383 - DNA, 3923 bp, Homo sapiens
ggcagttagcccgcccgctcggcgcagggcgtggcttctcgtagccattaggaaacagcaaccctttcacctcagttttcttcactccggcatttgcagcagagcgaaaggtggtcgagtcctgaaggagggcctgatgtcttcatcattctcaaattcttgtaagctctgcgtcgggtgaaaccagacaaagccgcgagcccagggatgggagcacgcgggggacggcctgccggcggggacgacagcattgcgcctgggtgcagcagtgtgcgtctcggggaagggaagatattttaaggcgtgtctgagcagacggggaggcttttccaaacccaggcagcttcgtggcgtgtgcggtttcgacccggtcacacaaagcttcagcatgtcatgtgaggacggtcgggccctggaaggaacgctctcggaattggccgcggaaaccgatctgcccgttgtgtttgtgaaacagagaaagataggcggccatggtccaaccttgaaggcttatcaggagggcagacttcaaaagctactaaaaatgaacggccctgaagatcttcccaagtcctatgactatgaccttatcatcattggaggtggctcaggaggtctggcagctgctaaggaggcagcccaatatggcaagaaggtgatggtcctggactttgtcactcccacccctcttggaactagatggggtctcggaggaacatgtgtgaatgtgggttgcatacctaaaaaactgatgcatcaagcagctttgttaggacaagccctgcaagactctcgaaattatggatggaaagtcgaggagacagttaagcatgattgggacagaatgatagaagctgtacagaatcacattggctctttgaattggggctaccgagtagctctgcgggagaaaaaagtcgtctatgagaatgcttatgggcaatttattggtcctcacaggattaaggcaacaaataataaaggcaaagaaaaaatttattcagcagagagatttctcattgccactggtgaaagaccacgttacttgggcatccctggtgacaaagaatactgcatcagcagtgatgatcttttctccttgccttactgcccgggtaagaccctggttgttggagcatcctatgtcgctttggagtgcgctggatttcttgctggtattggtttagacgtcactgttatggttaggtccattcttcttagaggatttgaccaggacatggccaacaaaattggtgaacacatggaagaacatggcatcaagtttataagacagttcgtaccaattaaagttgaacaaattgaagcagggacaccaggccgactcagagtagtagctcagtccaccaatagtgaggaaatcattgaaggagaatataatacggtgatgctggcaataggaagagatgcttgcacaagaaaaattggcttagaaaccgtaggggtgaagataaatgaaaagactggaaaaatacctgtcacagatgaagaacagaccaatgtgccttacatctatgccattggcgatatattggaggataaggtggagctcaccccagttgcaatccaggcaggaagattgctggctcagaggctctatgcaggttccactgtcaagtgtgactatgaaaatgttccaaccactgtatttactcctttggaatatggtgcttgtggcctttctgaggagaaagctgtggagaagtttggggaagaaaatattgaggtttaccatagttacttttggccattggaatggacgattccgtcaagagataacaacaaatgttatgcaaaaataatctgtaatactaaagacaatgaacgtgttgtgggctttcacgtactgggtccaaatgctggagaagttacacaaggctttgcagctgcgctcaaatgtggactgaccaaaaagcagctggacagcacaattggaatccaccctgtctgtgcagaggtattcacaacattgtctgtgaccaagcgctctggggcaagcatcctccaggctggctgctgaggttaagccccagtgtggatgctgttgccaagactgcaaaccactggctcgtttccgtgcccaaatccaaggcgaagttttctagagggttcttgggctcttggcacctgcgtgtcctgtgcttaccaccgcccaaggcccccttggatctcttggataggagttggtgaatagaaggcaggcagcatcacactggggtcactgacagacttgaagctgacatttggcagggcatcgaagggatgcatccatgaagtcaccagtctcaagcccatgtggtaggcggtgatggaacaactgtcaaatcagttttagcatgacctttccttgtggattttcttattctcgttgtcaagttttctagggttgaatttttttcttttttctccatggtgttaatgatattagagatgaaaaacgttagcagttgatttttgtccaaaagcaagtcatggctagagtatccatgcaaggtgtcttgttgcatggaagggatagtttggctcccttggaggctatgtaggcttgtcccgggaaagagaactgtcctgcagctgaaatggactgttctttactgacctgctcagcagtttcttctctcatatattcccaaaacaagtacatctgcgatcaactctagccaaatttgcccctgtgtgctacatgatggatgattattattttaaggtctgtttaggaagggaaatggctacttggccagccattgcctggcatttggtagtatagtatgattctcaccattatttgtcatggaggcagacatacaccagaaatgggggagaaacagtacatatctttctgtctttagtttattgtgtgctggtctaagcaagctgagatcatttgcaatggaaaacacgtaacttgtttaaaagtttttctggtagctttagctttatgctaaaaaaaataatgacattgggtatctatttctttctaagactacattagtaggaaaataagtcttttcatgcttatgatttagctgttttgtggtaattgctttttaaaggaagttattaatatcataagttattattaatattttgaacacaggtggatgtgaaggattttcatttaaaaaccaagtggttttgactttttctgttgaatgaacaactgtgccttgtggaatttttgcagaagtgtttatgctttgttagcatttcaacttgcattattataaagaggtattaatgcctcagttatgtgtttgtcaatgtactggctgaggattctatctcagctgtcttttctaactgtgtaggttgagttttgaacacgtgcttgtggacatcaggcctcctgccagcagttcttgaagcttctttttcattcctgctactctacctgtatttctcagttgcagcactgagtggtcaaaatacatttctgggccacctcagggaacccatgcatctgcctggcatttaggcagcagagcccctgaccgtcccccacagggctctgcctcacgtcctcatctcatttggctgtgtaaagaaatgggaaaagggaaaaggagagagcaattgaggcagttgaccatattcagttttatttatttatttttaatttgtttttttctccaagtccaccagtctctgaaattagaacagtaggcggtatgagataatcaggcctaatcatgttgtgattctcttttcttagtggagtggaatgttctatccccacaagaaggattatatcttatagacttgtcttgttcagattctgtatttacccattttattgaaacatatactaagttccatgtatttttgttacaaatcttctgaaaaaaaacaaaacaatgtgaaacattaaaattaaaaggcattaataataaaaaaaaaaaaaaaaa

SEQ ID NO: 1384 - DNA, 3694 bp, Homo sapiens
ggcagttagcccgcccgctcggcgcagggcgtggcttctcgtagccattaggaaacagcaaccctttcacctcagttttcttcactccggcatttgcagcagagcgaaaggtggtcgagtcctgaaggagggcctgatgtcttcatcattctcaaattcttaggacggtcgggccctggaaggaacgctctcggaattggccgcggaaaccgatctgcccgttgtgtttgtgaaacagagaaagataggcggccatggtccaaccttgaaggcttatcaggagggcagacttcaaaagctactaaaaatgaacggccctgaagatcttcccaagtcctatgactatgaccttatcatcattggaggtggctcaggaggtctggcagctgctaaggaggcagcccaatatggcaagaaggtgatggtcctggactttgtcactcccacccctcttggaactagatggggtctcggaggaacatgtgtgaatgtgggttgcatacctaaaaaactgatgcatcaagcagctttgttaggacaagccctgcaagactctcgaaattatggatggaaagtcgaggagacagttaagcatgattgggacagaatgatagaagctgtacagaatcacattggctctttgaattggggctaccgagtagctctgcgggagaaaaaagtcgtctatgagaatgcttatgggcaatttattggtcctcacaggattaaggcaacaaataataaaggcaaagaaaaaatttattcagcagagagatttctcattgccactggtgaaagaccacgttacttgggcatccctggtgacaaagaatactgcatcagcagtgatgatcttttctccttgccttactgcccgggtaagaccctggttgttggagcatcctatgtcgctttggagtgcgctggatttcttgctggtattggtttagacgtcactgttatggttaggtccattcttcttagaggatttgaccaggacatggccaacaaaattggtgaacacatggaagaacatggcatcaagtttataagacagttcgtaccaattaaagttgaacaaattgaagcagggacaccaggccgactcagagtagtagctcagtccaccaatagtgaggaaatcattgaaggagaatataatacggtgatgctggcaataggaagagatgcttgcacaagaaaaattggcttagaaaccgtaggggtgaagataaatgaaaagactggaaaaatacctgtcacagatgaagaacagaccaatgtgccttacatctatgccattggcgatatattggaggataaggtggagctcaccccagttgcaatccaggcaggaagattgctggctcagaggctctatgcaggttccactgtcaagtgtgactatgaaaatgttccaaccactgtatttactcctttggaatatggtgcttgtggcctttctgaggagaaagctgtggagaagtttggggaagaaaatattgaggtttaccatagttacttttggccattggaatggacgattccgtcaagagataacaacaaatgttatgcaaaaataatctgtaatactaaagacaatgaacgtgttgtgggctttcacgtactgggtccaaatgctggagaagttacacaaggctttgcagctgcgctcaaatgtggactgaccaaaaagcagctggacagcacaattggaatccaccctgtctgtgcagaggtattcacaacattgtctgtgaccaagcgctctggggcaagcatcctccaggctggctgctgaggttaagccccagtgtggatgctgttgccaagactgcaaaccactggctcgtttccgtgcccaaatccaaggcgaagttttctagagggttcttgggctcttggcacctgcgtgtcctgtgcttaccaccgcccaaggcccccttggatctcttggataggagttggtgaatagaaggcaggcagcatcacactggggtcactgacagacttgaagctgacatttggcagggcatcgaagggatgcatccatgaagtcaccagtctcaagcccatgtggtaggcggtgatggaacaactgtcaaatcagttttagcatgacctttccttgtggattttcttattctcgttgtcaagttttctagggttgaatttttttcttttttctccatggtgttaatgatattagagatgaaaaacgttagcagttgatttttgtccaaaagcaagtcatggctagagtatccatgcaaggtgtcttgttgcatggaagggatagtttggctcccttggaggctatgtaggcttgtcccgggaaagagaactgtcctgcagctgaaatggactgttctttactgacctgctcagcagtttcttctctcatatattcccaaaacaagtacatctgcgatcaactctagccaaatttgcccctgtgtgctacatgatggatgattattattttaaggtctgtttaggaagggaaatggctacttggccagccattgcctggcatttggtagtatagtatgattctcaccattatttgtcatggaggcagacatacaccagaaatgggggagaaacagtacatatctttctgtctttagtttattgtgtgctggtctaagcaagctgagatcatttgcaatggaaaacacgtaacttgtttaaaagtttttctggtagctttagctttatgctaaaaaaaataatgacattgggtatctatttctttctaagactacattagtaggaaaataagtcttttcatgcttatgatttagctgttttgtggtaattgctttttaaaggaagttattaatatcataagttattattaatattttgaacacaggtggatgtgaaggattttcatttaaaaaccaagtggttttgactttttctgttgaatgaacaactgtgccttgtggaatttttgcagaagtgtttatgctttgttagcatttcaacttgcattattataaagaggtattaatgcctcagttatgtgtttgtcaatgtactggctgaggattctatctcagctgtcttttctaactgtgtaggttgagttttgaacacgtgcttgtggacatcaggcctcctgccagcagttcttgaagcttctttttcattcctgctactctacctgtatttctcagttgcagcactgagtggtcaaaatacatttctgggccacctcagggaacccatgcatctgcctggcatttaggcagcagagcccctgaccgtcccccacagggctctgcctcacgtcctcatctcatttggctgtgtaaagaaatgggaaaagggaaaaggagagagcaattgaggcagttgaccatattcagttttatttatttatttttaatttgtttttttctccaagtccaccagtctctgaaattagaacagtaggcggtatgagataatcaggcctaatcatgttgtgattctcttttcttagtggagtggaatgttctatccccacaagaaggattatatcttatagacttgtcttgttcagattctgtatttacccattttattgaaacatatactaagttccatgtatttttgttacaaatcttctgaaaaaaaacaaaacaatgtgaaacattaaaattaaaaggcattaataataaaaaaaaaaaaaaaaaaaaaaaaa

SEQ ID NO: 1385 - DNA, 3813 bp, Homo sapiens
ggcagttagcccgcccgctcggcgcagggcgtggcttctcgtagccattaggaaacagcaaccctttcacctcagttttcttcactccggcatttgcagcagagcgaaaggtggtcgagtcctgaaggagggcctgatgtcttcatcattctcaaattcttgtaagctctgcgtcgggtgaaaccagacaaagccgcgagcccagggatgggagcacgcgggggacggcctgccggcggggacgacagcattgcgcctgggtgcagcagtgtgcgtctcggggaagggaagatattttaaggcgtgtctgagcagacggggaggcttttccaaacccaggcagcttcgtggcgtgtgcggtttcgacccggtcacacaaagcttcagcatgtcatgtggcttatcaggagggcagacttcaaaagctactaaaaatgaacggccctgaagatcttcccaagtcctatgactatgaccttatcatcattggaggtggctcaggaggtctggcagctgctaaggaggcagcccaatatggcaagaaggtgatggtcctggactttgtcactcccacccctcttggaactagatggggtctcggaggaacatgtgtgaatgtgggttgcatacctaaaaaactgatgcatcaagcagctttgttaggacaagccctgcaagactctcgaaattatggatggaaagtcgaggagacagttaagcatgattgggacagaatgatagaagctgtacagaatcacattggctctttgaattggggctaccgagtagctctgcgggagaaaaaagtcgtctatgagaatgcttatgggcaatttattggtcctcacaggattaaggcaacaaataataaaggcaaagaaaaaatttattcagcagagagatttctcattgccactggtgaaagaccacgttacttgggcatccctggtgacaaagaatactgcatcagcagtgatgatcttttctccttgccttactgcccgggtaagaccctggttgttggagcatcctatgtcgctttggagtgcgctggatttcttgctggtattggtttagacgtcactgttatggttaggtccattcttcttagaggatttgaccaggacatggccaacaaaattggtgaacacatggaagaacatggcatcaagtttataagacagttcgtaccaattaaagttgaacaaattgaagcagggacaccaggccgactcagagtagtagctcagtccaccaatagtgaggaaatcattgaaggagaatataatacggtgatgctggcaataggaagagatgcttgcacaagaaaaattggcttagaaaccgtaggggtgaagataaatgaaaagactggaaaaatacctgtcacagatgaagaacagaccaatgtgccttacatctatgccattggcgatatattggaggataaggtggagctcaccccagttgcaatccaggcaggaagattgctggctcagaggctctatgcaggttccactgtcaagtgtgactatgaaaatgttccaaccactgtatttactcctttggaatatggtgcttgtggcctttctgaggagaaagctgtggagaagtttggggaagaaaatattgaggtttaccatagttacttttggccattggaatggacgattccgtcaagagataacaacaaatgttatgcaaaaataatctgtaatactaaagacaatgaacgtgttgtgggctttcacgtactgggtccaaatgctggagaagttacacaaggctttgcagctgcgctcaaatgtggactgaccaaaaagcagctggacagcacaattggaatccaccctgtctgtgcagaggtattcacaacattgtctgtgaccaagcgctctggggcaagcatcctccaggctggctgctgaggttaagccccagtgtggatgctgttgccaagactgcaaaccactggctcgtttccgtgcccaaatccaaggcgaagttttctagagggttcttgggctcttggcacctgcgtgtcctgtgcttaccaccgcccaaggcccccttggatctcttggataggagttggtgaatagaaggcaggcagcatcacactggggtcactgacagacttgaagctgacatttggcagggcatcgaagggatgcatccatgaagtcaccagtctcaagcccatgtggtaggcggtgatggaacaactgtcaaatcagttttagcatgacctttccttgtggattttcttattctcgttgtcaagttttctagggttgaatttttttcttttttctccatggtgttaatgatattagagatgaaaaacgttagcagttgatttttgtccaaaagcaagtcatggctagagtatccatgcaaggtgtcttgttgcatggaagggatagtttggctcccttggaggctatgtaggcttgtcccgggaaagagaactgtcctgcagctgaaatggactgttctttactgacctgctcagcagtttcttctctcatatattcccaaaacaagtacatctgcgatcaactctagccaaatttgcccctgtgtgctacatgatggatgattattattttaaggtctgtttaggaagggaaatggctacttggccagccattgcctggcatttggtagtatagtatgattctcaccattatttgtcatggaggcagacatacaccagaaatgggggagaaacagtacatatctttctgtctttagtttattgtgtgctggtctaagcaagctgagatcatttgcaatggaaaacacgtaacttgtttaaaagtttttctggtagctttagctttatgctaaaaaaaataatgacattgggtatctatttctttctaagactacattagtaggaaaataagtcttttcatgcttatgatttagctgttttgtggtaattgctttttaaaggaagttattaatatcataagttattattaatattttgaacacaggtggatgtgaaggattttcatttaaaaaccaagtggttttgactttttctgttgaatgaacaactgtgccttgtggaatttttgcagaagtgtttatgctttgttagcatttcaacttgcattattataaagaggtattaatgcctcagttatgtgtttgtcaatgtactggctgaggattctatctcagctgtcttttctaactgtgtaggttgagttttgaacacgtgcttgtggacatcaggcctcctgccagcagttcttgaagcttctttttcattcctgctactctacctgtatttctcagttgcagcactgagtggtcaaaatacatttctgggccacctcagggaacccatgcatctgcctggcatttaggcagcagagcccctgaccgtcccccacagggctctgcctcacgtcctcatctcatttggctgtgtaaagaaatgggaaaagggaaaaggagagagcaattgaggcagttgaccatattcagttttatttatttatttttaatttgtttttttctccaagtccaccagtctctgaaattagaacagtaggcggtatgagataatcaggcctaatcatgttgtgattctcttttcttagtggagtggaatgttctatccccacaagaaggattatatcttatagacttgtcttgttcagattctgtatttacccattttattgaaacatatactaagttccatgtatttttgttacaaatcttctgaaaaaaaacaaaacaatgtgaaacattaaaattaaaaggcattaataataaaaaaaaaaaaaaaaa

SEQ ID NO: 1386 - DNA, 3576 bp, Homo sapiens
ggcagttagcccgcccgctcggcgcagggcgtggcttctcgtagccattaggaaacagcaaccctttcacctcagttttcttcactccggcatttgcagcagagcgaaaggtggtcgagtcctgaaggagggcctgatgtcttcatcattctcaaattcttgcttatcaggagggcagacttcaaaagctactaaaaatgaacggccctgaagatcttcccaagtcctatgactatgaccttatcatcattggaggtggctcaggaggtctggcagctgctaaggaggcagcccaatatggcaagaaggtgatggtcctggactttgtcactcccacccctcttggaactagatggggtctcggaggaacatgtgtgaatgtgggttgcatacctaaaaaactgatgcatcaagcagctttgttaggacaagccctgcaagactctcgaaattatggatggaaagtcgaggagacagttaagcatgattgggacagaatgatagaagctgtacagaatcacattggctctttgaattggggctaccgagtagctctgcgggagaaaaaagtcgtctatgagaatgcttatgggcaatttattggtcctcacaggattaaggcaacaaataataaaggcaaagaaaaaatttattcagcagagagatttctcattgccactggtgaaagaccacgttacttgggcatccctggtgacaaagaatactgcatcagcagtgatgatcttttctccttgccttactgcccgggtaagaccctggttgttggagcatcctatgtcgctttggagtgcgctggatttcttgctggtattggtttagacgtcactgttatggttaggtccattcttcttagaggatttgaccaggacatggccaacaaaattggtgaacacatggaagaacatggcatcaagtttataagacagttcgtaccaattaaagttgaacaaattgaagcagggacaccaggccgactcagagtagtagctcagtccaccaatagtgaggaaatcattgaaggagaatataatacggtgatgctggcaataggaagagatgcttgcacaagaaaaattggcttagaaaccgtaggggtgaagataaatgaaaagactggaaaaatacctgtcacagatgaagaacagaccaatgtgccttacatctatgccattggcgatatattggaggataaggtggagctcaccccagttgcaatccaggcaggaagattgctggctcagaggctctatgcaggttccactgtcaagtgtgactatgaaaatgttccaaccactgtatttactcctttggaatatggtgcttgtggcctttctgaggagaaagctgtggagaagtttggggaagaaaatattgaggtttaccatagttacttttggccattggaatggacgattccgtcaagagataacaacaaatgttatgcaaaaataatctgtaatactaaagacaatgaacgtgttgtgggctttcacgtactgggtccaaatgctggagaagttacacaaggctttgcagctgcgctcaaatgtggactgaccaaaaagcagctggacagcacaattggaatccaccctgtctgtgcagaggtattcacaacattgtctgtgaccaagcgctctggggcaagcatcctccaggctggctgctgaggttaagccccagtgtggatgctgttgccaagactgcaaaccactggctcgtttccgtgcccaaatccaaggcgaagttttctagagggttcttgggctcttggcacctgcgtgtcctgtgcttaccaccgcccaaggcccccttggatctcttggataggagttggtgaatagaaggcaggcagcatcacactggggtcactgacagacttgaagctgacatttggcagggcatcgaagggatgcatccatgaagtcaccagtctcaagcccatgtggtaggcggtgatggaacaactgtcaaatcagttttagcatgacctttccttgtggattttcttattctcgttgtcaagttttctagggttgaatttttttcttttttctccatggtgttaatgatattagagatgaaaaacgttagcagttgatttttgtccaaaagcaagtcatggctagagtatccatgcaaggtgtcttgttgcatggaagggatagtttggctcccttggaggctatgtaggcttgtcccgggaaagagaactgtcctgcagctgaaatggactgttctttactgacctgctcagcagtttcttctctcatatattcccaaaacaagtacatctgcgatcaactctagccaaatttgcccctgtgtgctacatgatggatgattattattttaaggtctgtttaggaagggaaatggctacttggccagccattgcctggcatttggtagtatagtatgattctcaccattatttgtcatggaggcagacatacaccagaaatgggggagaaacagtacatatctttctgtctttagtttattgtgtgctggtctaagcaagctgagatcatttgcaatggaaaacacgtaacttgtttaaaagtttttctggtagctttagctttatgctaaaaaaaataatgacattgggtatctatttctttctaagactacattagtaggaaaataagtcttttcatgcttatgatttagctgttttgtggtaattgctttttaaaggaagttattaatatcataagttattattaatattttgaacacaggtggatgtgaaggattttcatttaaaaaccaagtggttttgactttttctgttgaatgaacaactgtgccttgtggaatttttgcagaagtgtttatgctttgttagcatttcaacttgcattattataaagaggtattaatgcctcagttatgtgtttgtcaatgtactggctgaggattctatctcagctgtcttttctaactgtgtaggttgagttttgaacacgtgcttgtggacatcaggcctcctgccagcagttcttgaagcttctttttcattcctgctactctacctgtatttctcagttgcagcactgagtggtcaaaatacatttctgggccacctcagggaacccatgcatctgcctggcatttaggcagcagagcccctgaccgtcccccacagggctctgcctcacgtcctcatctcatttggctgtgtaaagaaatgggaaaagggaaaaggagagagcaattgaggcagttgaccatattcagttttatttatttatttttaatttgtttttttctccaagtccaccagtctctgaaattagaacagtaggcggtatgagataatcaggcctaatcatgttgtgattctcttttcttagtggagtggaatgttctatccccacaagaaggattatatcttatagacttgtcttgttcagattctgtatttacccattttattgaaacatatactaagttccatgtatttttgttacaaatcttctgaaaaaaaacaaaacaatgtgaaacattaaaattaaaaggcattaataataaaaaaaaaaaaaaaaa

SEQ ID NO: 1387 - DNA, 2614 bp, Homo sapiens
cgactgaggcggcgggcggagcggcaggcggcggcggcgcggcagcggagcgcagcatcatggcggaccgagacagcggcagcgagcagggtggtgcggcgctgggttcgggcggctccctggggcaccccggctcgggctcaggctccggcgggggcggtggtggcggcgggggcggcggcggcagtggcggcggcggcggcggggccccaggggggctgcagcacgagacgcaggagctggcctccaagcgggtggacatccagaacaagcgcttctacctggacgtgaagcagaacgccaagggccgcttcctgaagatcgccgaggtgggcgcgggcggcaacaagagccgccttactctctccatgtcagtggccgtggagttccgcgactacctgggcgacttcatcgagcactacgcgcagctgggccccagccagccgccggacctggcccaggcgcaggacgagccgcgccgggcgctcaaaagcgagttcctggtgcgcgagaaccgcaagtactacatggatctcaaggagaaccagcgcggccgcttcctgcgcatccgccagacggtcaaccgggggcctggcctgggctccacgcagggccagaccattgcgctgcccgcgcaggggctcatcgagttccgtgacgctctggccaagctcatcgacgactacggagtggaggaggagccggccgagctgcccgagggcacctccttgactgtggacaacaagcgcttcttcttcgatgtgggctccaacaagtacggcgtgtttatgcgagtgagcgaggtgaagcccacctatcgcaactccatcaccgtgccctacaaggtgtgggccaagttcggacacaccttctgcaagtactcggaggagatgaagaagattcaagagaagcagagggagaagcgggctgcctgtgagcagcttcaccagcagcaacagcagcagcaggaggagaccgccgctgccaccctgctactgcagggtgaggaagaaggggaagaagattgatcaaactgaatgaaacccccacacacacacacatgcatacacacacacacacagccacacacacagaaaatatactgtaaagaaagagagaaaataaaaagttaaaaagttaaaaaaaaaaaaaaacctgttaactccaagggagcaccacccacagaacctccaccaactgacagtttctcttcttgacttgccacccatcgctggatgttgtccactttatccaccatataaaacagtaagcagctgctaaaaacaaaaaaaatacaaaaagtaataacattatatgaactgtgtttcctacttgattaaaaaatataaagaactgagtgtttatttccctaattaaccaagaacttttgtacacgtttaagctattattattaaaaagtgtttgcaaaatggtcaagattataatattgctgaattatataaaagtccttttcatgttgagctaacatttgactttagcacaaaaaagagatattttagaacacgtaaaataatatttttagtttttctcattttgttaccaaatttcaaaccttacatggaggttattatagtatatttgacaccctatatacctgtgattagagatgtgtatatatatgagggctaggcatgctgtgtgtctgagctttgtctaaatgttatgcagaagtttgtagagttaaaggtacgtaggtttaattcatgcaaggtaaacaataagtgctctcttttatacaatatgcattgcatctggaccttaaacttataaaaatggtcagtgaaacttctgtgaacatgaagaaattattaaaaaaggcatttaaatgaaatttgctaagttgtgatttttatggttggaaccaaagttattcaaatagtaaaaggaaaaagaaagaaaaaggagatctcccataatatttttctgcatctgtttgctttgactgagtaggcgttttgtcattattgtgtatatgagatgtacttgtatcgttcataatatattttttttattatgtgtagaaagattttaaaaaactaacgtgcagcaatttccagtgaacctgtacttggacatcaggtagtgagtctatttgtggtcactagcactgtctcctaaacttgtaagaggtctgaagctattctttgatttttgctagtgctattaacttatgtagacctgttaaaaagcagagcaacacaattatagttatcctactgagccatggattctgagttttgttttaaaagtgaaagccaagttggtgtatgtaaaggatttccatgtagctgtggtgctagttattactggctacattatatgctaagtgtatttgtgttccccaagtgtacaagccttctatcaaaagtatgttctataactcatatattcaaggtgtagggtatgaaaatgcaaagtttaggagagcactttaccaagctggtgtcctccaaactgaaattgtttgtaacgatagtcttttacaggttttcctttaaagatgtttgtgtgcttttaattgacaactaacttcttgctgctgtatagtaaaatattaatatatttttatcattaaactgctgcatgactatca

SEQ ID NO: 1388 - DNA, 2438 bp, Homo sapiens
ggaagtcggaccagccggccggcggaagaacctagagcgcgctgcctggcgagtcaggcgcgcggggcggcgttggtggtcttcgcggcgcaactcggcctttcctgggagggagtgatggggcgcaccggggccggggagcgggcgccagtgtagcccgcgcggcgcctggcccggagcgcggcggctgcggcggcggcggcggcgggcgctggaggcctgtgagagccgcagcccggagcgcccggcttcccacgccatggcccccatgggcatccgcctttccccactgggggtggcagtgttttgcctgctggggctcggcgtgctctaccacctctactcgggcttcttggccggccgcttcagcctcttcggcctgggcggcgagcctggcggcggcgcggcggagcccgcggccgcggccgatgggggcaccgtggacttgcgcgagatgctggctgtgtcagtgctggccgcagtccgcggcggcgacgaggtgaggcgcgtccgcgagagcaacgtcctccacgagaagtccaaggggaagacgcgcgagggagccgaggacaagatgaccagcggcgacgtgctgtccaaccgcaagatgttctacctgctcaaggccgccttccccagcgtccagattaatactgaggaacacgtggatgcagctgatcaggaggttatcttgtgggatcataagattcctgaggatatcctagaggaagtaactactcctaaagaggtaccagcagaaagtgttactgtctggattgacccacttgatgctacacaggaatatacagaggatcttcgaaagtacgtcactactatggtgtgtgtggctgtaaatggtaaacccatgctaggagttatacataagccattttccgaatatacagcttgggcaatggtagatggtggttcaaatgtgaaagcccgctcttcctacaatgagaagaccccaaggatcgttgtgtctcgttcccattcagggatggtcaaacaggtcgctcttcagacttttggaaaccagactacaattatcccagctggtggtgctggttataaagttttagcacttttggatgtgcctgataagagtcaagaaaaagctgatttatacatccatgtgacatacatcaaaaagtgggatatatgtgctggtaatgccatcttaaaagccctaggggggcatatgactaccctgagtggtgaagaaatcagttacactggttcagacggcattgaagggggactccttgctagcatcagaatgaaccaccaggccctggtcagaaaactcccagatctagaaaagacaggacataaatgagcataactgattacagggtacagttcttcacagctgaaatggttagcctgagatgctggaagcttcaaaggattggtggagactatgcatggttaaggccatcccgaactttttaaagtatttatgaagcgtcagagacttattttccctgtaatagaatgcaaaatcagggaaaatgggttgctttgtgtctcaagtattgtctttatttttgagactattttcatacagttgtcatacacaaggcgcatatatatatttgtgaattaaaatctgtagctgagtctacattgttatgagtcaccattttcacacaacatcatgaatcttcactgttagtactttcatatagaattcggttgaaggaaagattgatttttgtgtagatgtttaatataactttacaactatatctcattgaaaataaagtcattggggatttttacctctaatttggatggaaagcacaagaagccacacattcattaatatgcaacaaatgttgtatttatgttactgaatatttctatggattaaaatagaaaaagtttaattgattttttcttttaaattttaataacaggttcaccagctggtagaaaatagagacacatgatgatttgcattgtaataatttctgtgtgtatgtgtgtgtgttgttttgtttttataaagaaaagtgtgtttgtacccatgagttcagcatttctgccatcttgctattttcattttccctgtggaagatgcatggttgcatccttttccttctgaccaacacttagtctttaactttgtaaggttcggtttaaggtttcagggttagcactatagttttggttcattttctcattaacgataaaatatgctgtaaggcactataagaatataaatgattctattacaattgaaagttacttgacattacatgaattgaactgcctttcattatcttcagacactttgttttagtatttttttttaatttgctaggtttgtatatagaagatcctttcattatcaagaatgagtatggttgcttttgccatggttgcttttactattaataaatgtatctagcctacccaaaaaaaaaaaaaaa

SEQ ID NO: 1389 - DNA, 5307 bp, Homo sapiens
gaataacagttaagttttggggagtaaaaactgtttcaatttttgactgtgttgggggttggtgctcctaatccctgtgttgttaaagggtcgactatattgtatttttgaaaattgctagagagtggacgtaaagtgttctcactaaacaaattataactatgtgaggtagtgcatatattaagtagctagatttggtcattccacaatgtatatgtacttcaaaacatcatgttgtacatgagaaacacagttttatctgttagtcagttttaaaaataaaaaatattccaactagaaactctgttgtagtttttgaaattacaacttggaggctttgaggaactgattagaagtctcctttctgtttcaggctttcatatccaaaccatagatctttagaagtaacatctgttaattaattattaataaatagtttgagtctttattaattcatggataacttgaccattttctctctccttttgcttagataatcccagatcatggccgggcacagtagctcacgcctgtattcccagcagtttgggaggccgaggcaggcagatcacttgaactcaggagtttgagaccagcttgggcaacatggcaaaaccctgtctctattaaaaatacaaaaattagctgggcatggtagtgcatgcctgtagtcccagctacctgggaggctgaggtgggaggatcgcttgagcctgggaggttgaggcttctgtgcgcgatgattgctccagtgatcacgccattgcactccagcctgggtgacagagtgagaccctgtctccaaaaaaaaaaaaaattaagcaagtagcagttacaagaccaaaagttattttcctttttttttttctctataaaattgcccatttggaccaaatctagttataacttatttcagtgtcattaagaaagttgatgaataagtcatattactcagatgttagtagctatgcatttattaatagttttatttataagtatttagtttcactctgttgcagactattttatgctaaaattagctaaagccaaattactatttcttaaaacatattttttactttttttttttttttaaatattattaggtacttcttgcaagggatatgcattagcacatactcaagaaggggaagaaaagaagcaaacttctggtacatcaaataccagaggatcaagacgaaaacctgcaatgacaactcctacaaggaggtctacacgtaacacaagagctgaaacagccagtcagtctcagagatccccaatatcagacaattctgggtgtgatgccccaggtaacagtaatccatctttaagtgttccctcttcagctgagtcagaaaagcaaacaagacaggctccaaaacggaagtctgtaagaagaggaagaaaaccacctttactgaaaaagaaacttcggagctctgtagctgcccctgaaaaatcatcttccaatgattcagtagatgaagaaacagcagaatctgacacatcacctgtgttagaaaaagagcaccaaccagatgtagacagtagtaacatttgtactgtgcagactcatgtagaaaaccagtctgctaattgcttgaaaagttgcaatgagcaaatagaagaaagtgagaagcatactgcaaattatgatacagaggaaagagtaggatcttcatcttctgagtcttgtgctcaagatcttcctgtgctagttggtgaggaaggggaagttaaaaaactcgagaatacaggtatagaggctaatgttttgtgtttggaaagtgagatttctgaaaatattcttgaaaaaggaggtgatccattggaaaagcaagaccagatatctggactttcacaatcagaggtaaagacagatgtatgtacagttcatcttccaaatgattttcctacatgtttaacatctgaaagcaaagtgtaccaacctgtatcttgtcccctaagtgacttatctgagaatgtagagtcagtggttaatgaagaaaaaataacagagagttccctagtagaaattactgaacataaagattttacactaaaaacagaggagcttatagagagccccaagttagaatcttctgagggtgaaattatacagacagtggacagacaatctgttaagagcccagaggttcaattgcttgggcatgttgaaactgaagatgtagaaataattgcaacatgtgatacttttgggaatgaagatttcaataatattcaagactctgaaaataacttactaaaaaataatcttctgaacaccaaattggaaaaatctttagaagaaaagaatgaatcgctgaccgaacatcctagatctacagagttgcctaaaacacacattgaacagattcagaagcattttagtgaggacaacaatgaaatgatacctatggagtgtgattcattttgcagtgaccaaaatgaatctgaagttgaaccatctgtaaatgctgatcttaaacaaatgaatgaaaattctgtgacacactgttctgaaaataatatgccgtcttctgatcttgcggatgaaaaggttgaaactgtttctcaaccatctgaaagcccaaaagataccatagataaaaccaaaaagcctcgtactcgaagatctagatttcattctccatctacaacttggtcacccaacaaagacactccacaagaaaagaagcggccccagtctccatctcccagaagagaaactgggaaagaaagcaggaagtctcaatcaccatctcctaagaatgagtcagccagaggccggaaaaaatcccgttctcagtccccaaaaaaggatattgcaagagaaaggaggcaatctcagtctcggtctccaaaaagggatactactagggaaagcagaagatctgaatcactgtccccaagaagagaaacttctagagagaacaaaagatctcagccaagagtgaaagattcttccccaggagaaaaatccaggtcccagagcagagaacgagaaagtgatagagatgggcagaggagagagagagaaaggagaaccagaaagtggtctaggtccagatctcattctaggtccccctcaagatgtagaacaaaaagtaagagttcatcatttggtagaattgacagagatagttactctccccggtggaagggaagatgggcaaatgatggttggagatgtccacgaggaaatgatcggtacagaaagaatgacccagagaaacagaatgaaaatacaagaaaagaaaaaaatgacatccatctagatgctgatgatccaaattctgctgacaaacatagaaatgactgtcccaattggataacagaaaaaataaactctgggcctgatccaagaaccagaaatccagaaaagttgaaagagtctcattgggaagaaaatagaaatgaaaattcaggaaattcttggaataaaaactttggttctggttgggtatctaaccgtggtagaggcagaggcaaccgtggcagaggcacttacagaagtagttttgcctataaagatcagaatgaaaatcggtggcaaaatcgaaaacccctctcagggaattcaaacagttcagggagtgaatctttcaagtttgtggaacagcaatcctataagcgaaaaagtgaacaggagttctcatttgatacaccagcagatagatctggatggacatctgcatccagctgggccgtgagaaagactttgccagcagatgtacaaaactactactcacgacgaggcagaaattcttcaggtccacagtctggatggatgaaacaagaggaggaaacatctggacaggattctagcctaaaagaccaaacaaaccagcaagttgatggttctcagctacctataaatatgatgcaaccgcaaatgaatgtaatgcagcaacaaatgaatgcacaacaccagcctatgaatatcttcccatatccagtgggtgttcatgctcctttgatgaacatccaacgcaatccatttaacattcatcctcagctacccttgcatctccacacaggagtgcccctcatgcaggtagccactcctaccagtgtatctcagggactaccaccaccaccaccccctcccccaccatcccaacaagtcaactacattgcttcacaaccagatggaaagcaattgcagggtattcctagttcttctcatgtaagtaataacatgagtacaccagttttgcctgctccgacagcagccccaggaaatacgggaatggttcagggaccaagttctggtaatacttcgtcatcaagtcacagcaaagcctctaatgctgctgtaaaattggcagaaagcaaagtaagtgttgcagtggaagccagcgcagatagctcgaagacagacaagaaattgcaaattcaagaaaaagcagcacaagaggtaaaattggccatcaagccattttaccaaaataaagatatcaccaaggaagaatataaagaaattgtacggaaagcagtagataaagtttgtcatagtaagagtggagaagtaaattctactaaagtggcaaatctggttaaagcctatgtagacaaatacaaatattcacggaaggggagccaaaagaaaactctggaagaacctgtgtctactgaaaaaaacataggctgaaatggggaacgctgtcaaggacattatcaggatatctgcaaagtgcaatttcaacatgtaccattaactgaaaatcatacataactgtgattgaaatttggttttgataaaattatttttttaacataggatatgatgttttgttctaaataaatataggtctgcactgcaacttctgtatccttccttcccctccaccctcccccacaaaattcaagggaaagtaaagggtttaaaggaatgtgcatctttactaggactgtgttatagtgtggatactggaaaatgtatagctttttgattagggcaatggagtgcataaattagaaacttctaagtgcactggttttcaaagagatatatataatgcatttattctgtcaggttaaaatataaagtatgatctttatgattttttccctctaattatagaaagttaaataatgtattaccatgaaaaatgtttctaatattaaatagaacatatcagttgcaaagttcctaatgtgtatttttaaagcacatatctgaataaattgcctagatagaaaaaaaattatcacgagtaaaatttagtgttcaaaacattgaaacactcttcacctattgtatgaccaaataaaggttatgctgcttgttacgcgaaggcc

SEQ ID NO: 1390 - DNA, 2780 bp, Homo sapiens
gtggaagagccatccagagtgagtgcctggggcagagtgagagcaggaccagcgggcaggtggcggagcgggggtcggtggtggatggcccagccctggaaagccgaggtgaaggttacgagtccctgaggatctgtgggtgtgagccagccgcgtggccctgggcaacggcgctgccggacagaagtggcggttgctgacgcctggaaattcccctgaaggtggagcaccacccaacccccctgggtcccaccctccctcaaggcctcctccacctccacctccaccccgcctggcctggcgtccacctctgcggctcctacctgggtgcaatcgagttaaatggctgataagcagatcagcctgccagccaagctcatcaatggcggcatcgccgggctgatcggtgtcacctgcgtgtttcccatcgacctggccaagaccaggctgcagaaccagcagaacggccagcgcgtgtacacgagcatgtccgactgcctcatcaagaccgtccgctccgagggctacttcggcatgtaccggggagctgctgtgaacttgaccctcgtcacccccgagaaggccatcaagctggcagccaacgacttcttccgacatcagctctctaaggacgggcagaagctgaccctgcttaaagagatgctggcgggctgtggggctggcacctgccaggtgatcgtgaccacgcccatggagatgctgaagatccagctgcaggatgcagggcgcattgccgcccagaggaagatcctggctgcccagggccagctctcggcccaggggggtgcccagccctcagtggaggctccagctgcccctcggcccacggccacccagctgacccgcgacctgctgcggagccgtggcattgccggtctctacaagggactcggggccacgctgctcagggatgtccccttctctgtggtgtacttcccgctctttgccaacctgaaccagctgggccgcccggcgtccgaggagaagtcgcctttctacgtgtccttcctggccggctgtgtggctgggagtgccgccgctgtggccgtcaacccctgtgatgtggtgaagacgcggctccagtcacttcagcgaggcgtcaacgaggacacctactctgggatcctggactgtgccaggaagatcctgcggcacgagggcccctcggccttcctgaagggcgcctactgccgcgcgctggtcatcgcgccccttttcggcatcgcacaggtggtctacttcctgggcatcgcggagtccctgctggggctgctgcaggacccccaggcctgagcccagcacccgctccaccccagccagctgggcagggccggtgtggggctggagccaggcagctagcccaggacggagcaagggaagacccctccccagccctcccgtcggcaggggcagcagggggcagggtgcagggtccacataggtggtgcacacgcaagccccccggggtgctgcctgcaccgttgggatcaatgtctcatttatgtagaaaatgcagaaatctttacattcctcaagctagcccctgccccaatcctgccctggcctgaacacccccagggacagagctggtctctgggctgggggcccccgggcctgggccgggcaggctggaccatacccccagtccaccagctccagtctccacagccatcctggcccacacaggcaccccacacaaacctgtttattgaatctgctggacccaagcggctctccagcccttccgtccttccccagccgctcttgtcgccttggcaggacttgactctgcctccctggccagccttgcaagaggactggggtctcctgccctctctgttgagccaggaatcccaagtgaggggttgccctgaggtctgactcttggggcaagcccgccacccactgtgggactttctggtgggctcctcagctcccaccccaggctggggcccagattgtgaggtctgtgtgcatgtgtgtgtgtatgtgtgtgtgcatgcgtgtgtgtgttgtggggatctggcctggcccttggggatggggctgctggggactgccccccttcccgccgtggccaggcgctctgtgtgctgtgtgtgccccaggctctgttgaccccgtccaggaactaacttacccagcttggtctctcctgagtcctccaccctggcctgggattggccagggagcagggcgggcattgggaccagtgtggagcctgagggtgcctgccctgctctggagggagggccaggagctgccacacccccaagtcctctcagggcccaccctcctttttcagcctctgcataaggcccctgggtacactgcagaagccccatccttcccgcctccgggcataaggcccctgaccacacttcagaagccccatcccccctgccaccgggcgatccctgctgtgagccgaagctctccctgccccgccctggccatgtgatcgtgttggtgacagaccctgatgtgctggtgctgtgtccccaaaaccggggccctccacagaggccccttcccagcgacactacctggggctcaggcctggacccccccagttcacggttgctcctgggagctgcccctcccgtcacatcagaaccttggaagctgctgctgctgcttacagaattatatttttttcttttgaagagttttaagaagttgtaactttttgtgtcttgtcatgtcagagaataaataaatattctaagtagaaaaaaaaaaaaaaaaaaaaaaaaaaa

SEQ ID NO: 1391 - DNA, 1765 bp, Homo sapiens
tcccacacccgacgctctggcccacacagacgctactctgtagcatctcaggttccctctggctgcactctggaggaccacactcgttttctttttggctgccagaggcccccgcatccaccgctgagctgggagaaagatggcggcagccgtgcgacaggatttggcccagctcatgaattcgagcggctctcataaagatctggctggcaagtatcgtcagatcctggaaaaagccattcagttatctggagcagaacaactagaagctttgaaagcttttgtggaagcaatggtaaatgagaatgtcagtctcgtgatctcgcggcagttgctgactgatttttgcacacatcttcctaacttgcctgatagcacagccaaagaaatctatcacttcaccttggaaaagatccagcctagagtcatttcatttgaggagcaggttgcttccataagacagcatcttgcatctatatatgagaaagaagaagattggagaaatgcagcccaagtgttggtgggaattcctttggaaacaggacaaaaacagtacaatgtagattataaactggagacttacttgaagattgctaggctatatctggaggatgatgatccagtccaggcagaggcttacataaatcgagcatcgttgcttcagaatgaatcaaccaatgaacaattacagatacattataaggtatgctatgcacgtgttcttgattatagaagaaaattcattgaagctgcacaaaggtacaatgagctctcttacaagacaatagtccacgaaagtgaaagactagaggccttaaaacatgctttgcactgtacgatcttagcatcagcagggcagcagcgttctcggatgctagctactctttttaaggatgaaaggtgccagcaacttgctgcctatgggatcctagagaaaatgtatctagataggatcatcagaggaaatcaacttcaagaatttgctgccatgctgatgcctcaccaaaaagcaactacagctgatggttccagcatcttggacagagctgttattgaacacaatttgttgtctgcaagcaaattatataataatattaccttcgaagaacttggagctcttttagagatccctgcagctaaggcggaaaagatagcatctcaaatgataaccgaaggacgtatgaatggatttattgaccagattgatggaatagttcattttgaaacacgagaagccctgccaacgtgggataagcagatccaatcactttgtttccaagtgaataaccttttggagaaaattagtcaaacagcaccagaatggacagcacaagccatggaagcccagatggctcagtgaatccttgcagaacttctgtgcacatgacatctttttccatgttgtgcagatcagtttcactatctccaaagcatttgcatcatgaccttatacatttcaatcccttttatgctggattccgtttaaagaagacattattagagcaggaagtacaagcatttaaaatatgtagttcccatatatttcagggtctctgtgtattaagctaactcagatgttttgaaagctttttctttaaacagaggtgaaatatctgtggctaaaaagtttgagatttgtgataactttgtagtcatgtaaaacttaagtgcttcatgcctctccaaatgtggttattctaataaatggagaaatgagccaaataaaagtagtactttgtttttagttaaaaaaaaaaaaaaaaaa

SEQ ID NO: 1392 - DNA, 1913 bp, Homo sapiens
gtctgcgcctgcgcgcaagagaggcggggccagcgctcggcatggcggagccagatctggagtgcgagcagatccgtctgaagtgtattcgtaaggagggcttcttcacggtgcctccggaacacagggtgagccaccgcccccagcctggcctggcatttctttgagttcaggaagtgtgacaaggatttggacacccagaaataagcgtgtcgagaagagcacaagcagaggatctgggacgatgccggagtgtgaaggagtttgagaagctgaaccgcattggagagggtacctacggcattgtgtatcgggcccgggacacccagacagatgagattgtcgcactgaagaaggtgcggatggacaaggagaaggatggcatccccatcagcagcttgcgggagatcacgctgctgctccgcctgcgtcatccgaacatcgtggagctgaaggaggtggttgtggggaaccacctggagagcatcttcctggtgatgggttactgtgagcaggacctggccagcctcctggagaatatgccaacacccttctcggaggctcaggtcaagtgcatcgtgctgcaggtgctccggggcctccagtatctgcacaggaacttcattatccacagggacctgaaggtttccaacttgctcatgaccgacaagggttgtgtgaagacagcggatttcggcctggcccgggcctatggtgtcccagtaaagccaatgacccccaaggtggtcactctctggtaccgagcccctgaactgctgttgggaaccaccacgcagaccaccagcatcgacatgtgggctgtgggctgcatactggccgagctgctggcgcacaggcctcttctccccggcacttccgagatccaccagatcgacttgatcgtgcagctgctgggcacgcccagtgagaacatctggccgggcttttccaagctgccactggtcggccagtacagcctccggaagcagccctacaacaacctgaagcacaagttcccatggctgtcggaggccgggctgcgcctgctgcacttcctgttcatgtacgaccctaagaaaagggcgacggccggggactgcctggagagctcctatttcaaggagaagcccctaccctgtgagccggagctcatgccgacctttccccaccaccgcaacaagcgggccgccccagccacctccgagggccagagcaagcgctgtaaaccctgacggtgggcctggcacacgcctgtattcccacaccaggtcttccgatcagtggtgtctgtgaagggtgccgcgagccaggctgaccaggcgcccgggatccagctcatccccttggctgggaacatcctccactgacttcctcccactgtctgccctgaacccactgctgcccccagaaaaaggccgggtgacaccggggggctcccagcccgtgcaccctggaagggcaggtctggcggctccatccgtggctgcaggggtctcatgtggtcctcctcgctatgttggaaatgtgcaaccactgcttcttgggaggagtggtgggtgcagtccccccgctgtctttgagttgtggtggacgctggcctgggatgagagggcccagaagaccttcgtatcccctctcagtcgcccggggctgtcccgtgcatgggttggctgtggggaccccaggtgggcctggcaggactccagatgaggacaagagggacaaggtatggggtgggagccacaattgaggataccccgagactaccaggagagccctgggctggaggctgagctgcatccctgctccccacatggaggacccaacaggaggccgtggctctgatgctgagcgaagctataggctcttgttggataaaagcttttttaacagaaaaaaaaaaaaaaaaaaaa

SEQ ID NO: 1393 - DNA, 1633 bp, Homo sapiens
gtctgcgcctgcgcgcaagagaggcggggccagcgctcggcatggcggagccagatctggagtgcgagcagatccgtctgaagtgtattcctgggacgatgccggagtgtgaaggagtttgagaagctgaaccgcattggagagggtacctacggcattgtgtatcgggcccgggacacccagacagatgagattgtcgcactgaagaaggtgcggatggacaaggagaaggatggcatccccatcagcagcttgcgggagatcacgctgctgctccgcctgcgtcatccgaacatcgtggagctgaaggaggtggttgtggggaaccacctggagagcatcttcctggtgatgggttactgtgagcaggacctggccagcctcctggagaatatgccaacacccttctcggaggctcaggtcaagtgcatcgtgctgcaggtgctccggggcctccagtatctgcacaggaacttcattatccacagggacctgaaggtttccaacttgctcatgaccgacaagggttgtgtgaagacagcggatttcggcctggcccgggcctatggtgtcccagtaaagccaatgacccccaaggtggtcactctctggtaccgagcccctgaactgctgttgggaaccaccacgcagaccaccagcatcgacatgtgggctgtgggctgcatactggccgagctgctggcgcacaggcctcttctccccggcacttccgagatccaccagatcgacttgatcgtgcagctgctgggcacgcccagtgagaacatctggccgggcttttccaagctgccactggtcggccagtacagcctccggaagcagccctacaacaacctgaagcacaagttcccatggctgtcggaggccgggctgcgcctgctgcacttcctgttcatgtacgaccctaagaaaagggcgacggccggggactgcctggagagctcctatttcaaggagaagcccctacgtcttccgatcagtggtgtctgtgaagggtgccgcgagccaggctgaccaggcgcccgggatccagctcatccccttggctgggaacatcctccactgacttcctcccactgtctgccctgaacccactgctgcccccagaaaaaggccgggtgacaccggggggctcccagcccgtgcaccctggaagggcaggtctggcggctccatccgtggctgcaggggtctcatgtggtcctcctcgctatgttggaaatgtgcaaccactgcttcttgggaggagtggtgggtgcagtccccccgctgtctttgagttgtggtggacgctggcctgggatgagagggcccagaagaccttcgtatcccctctcagtcgcccggggctgtcccgtgcatgggttggctgtggggaccccaggtgggcctggcaggactccagatgaggacaagagggacaaggtatggggtgggagccacaattgaggataccccgagactaccaggagagccctgggctggaggctgagctgcatccctgctccccacatggaggacccaacaggaggccgtggctctgatgctgagcgaagctataggctcttgttggataaaagcttttttaacagaaaaaaaaaaaaaaaaaaaa

SEQ ID NO: 1394 - DNA, 1803 bp, Homo sapiens
gtctgcgcctgcgcgcaagagaggcggggccagcgctcggcatggcggagccagatctggagtgcgagcagatccgtctgaagtgtattcgtaaggagggcttcttcacggtgcctccggaacacaggatcgggcccgggacacccagacagatgagattgtcgcactgaagaaggtgcggatggacaaggagaaggatggcatccccatcagcagcttgcgggagatcacgctgctgctccgcctgcgtcatccgaacatcgtggagctgaaggaggtggttgtggggaaccacctggagagcatcttcctggtgatgggttactgtgagcaggacctggccagcctcctggagaatatgccaacacccttctcggaggctcaggtcaagtgcatcgtgctgcaggtgctccggggcctccagtatctgcacaggaacttcattatccacagggacctgaaggtttccaacttgctcatgaccgacaagggttgtgtgaagacaggtgggtgcaacttgggccaggccctgtccctagatggcacttggtgacacacactcccctctctgctgcagcggatttcggcctggcccgggcctatggtgtcccagtaaagccaatgacccccaaggtggtcactctctggtaccgagcccctgaactgctgttgggaaccaccacgcagaccaccagcatcgacatgtgggctgtgggctgcatactggccgagctgctggcgcacaggcctcttctccccggcacttccgagatccaccagatcgacttgatcgtgcagctgctgggcacgcccagtgagaacatctggccgggcttttccaagctgccactggtcggccagtacagcctccggaagcagccctacaacaacctgaagcacaagttcccatggctgtcggaggccgggctgcgcctgctgcacttcctgttcatgtacgaccctaagaaaagggcgacggccggggactgcctggagagctcctatttcaaggagaagcccctaccctgtgagccggagctcatgccgacctttccccaccaccgcaacaagcgggccgccccagccacctccgagggccagagcaagcgctgtaaaccctgacggtgggcctggcacacgcctgtattcccacaccaggtcttccgatcagtggtgtctgtgaagggtgccgcgagccaggctgaccaggcgcccgggatccagctcatccccttggctgggaacatcctccactgacttcctcccactgtctgccctgaacccactgctgcccccagaaaaaggccgggtgacaccggggggctcccagcccgtgcaccctggaagggcaggtctggcggctccatccgtggctgcaggggtctcatgtggtcctcctcgctatgttggaaatgtgcaaccactgcttcttgggaggagtggtgggtgcagtccccccgctgtctttgagttgtggtggacgctggcctgggatgagagggcccagaagaccttcgtatcccctctcagtcgcccggggctgtcccgtgcatgggttggctgtggggaccccaggtgggcctggcaggactccagatgaggacaagagggacaaggtatggggtgggagccacaattgaggataccccgagactaccaggagagccctgggctggaggctgagctgcatccctgctccccacatggaggacccaacaggaggccgtggctctgatgctgagcgaagctataggctcttgttggataaaagcttttttaacagaaaaaaaaaaaaaaaaaaaa

SEQ ID NO: 1395 - DNA, 1666 bp, Homo sapiens
ctccataaggcacaaactttcagagacagcagagcacacaagcttctaggacaagagccaggaagaaaccaccggaaggaaccatctcactgtgtgtaaacatgacttccaagctggccgtggctctcttggcagccttcctgatttctgcagctctgtgtgaaggtgcagttttgccaaggagtgctaaagaacttagatgtcagtgcataaagacatactccaaacctttccaccccaaatttatcaaagaactgagagtgattgagagtggaccacactgcgccaacacagaaattattgtaaagctttctgatggaagagagctctgtctggaccccaaggaaaactgggtgcagagggttgtggagaagtttttgaagagggctgagaattcataaaaaaattcattctctgtggtatccaagaatcagtgaagatgccagtgaaacttcaagcaaatctacttcaacacttcatgtattgtgtgggtctgttgtagggttgccagatgcaatacaagattcctggttaaatttgaatttcagtaaacaatgaatagtttttcattgtaccatgaaatatccagaacatacttatatgtaaagtattatttatttgaatctacaaaaaacaacaaataatttttaaatataaggattttcctagatattgcacgggagaatatacaaatagcaaaattgaggccaagggccaagagaatatccgaactttaatttcaggaattgaatgggtttgctagaatgtgatatttgaagcatcacataaaaatgatgggacaataaattttgccataaagtcaaatttagctggaaatcctggatttttttctgttaaatctggcaaccctagtctgctagccaggatccacaagtccttgttccactgtgccttggtttctcctttatttctaagtggaaaaagtattagccaccatcttacctcacagtgatgttgtgaggacatgtggaagcactttaagttttttcatcataacataaattattttcaagtgtaacttattaacctatttattatttatgtatttatttaagcatcaaatatttgtgcaagaatttggaaaaatagaagatgaatcattgattgaatagttataaagatgttatagtaaatttattttattttagatattaaatgatgttttattagataaatttcaatcagggtttttagattaaacaaacaaacaattgggtacccagttaaattttcatttcagataaacaacaaataattttttagtataagtacattattgtttatctgaaattttaattgaactaacaatcctagtttgatactcccagtcttgtcattgccagctgtgttggtagtgctgtgttgaattacggaataatgagttagaactattaaaacagccaaaactccacagtcaatattagtaatttcttgctggttgaaacttgtttattatgtacaaatagattcttataatattatttaaatgactgcatttttaaatacaaggctttatatttttaactttaagatgtttttatgtgctctccaaattttttttactgtttctgattgtatggaaatataaaagtaaatatgaaacatttaaaatataatttgttgtcaaagtaaaaaaaaaaaaaaa

SEQ ID NO: 1396 - DNA, 1497 bp, Homo sapiens
agcggcgccgcgggcctgcgtgctggggcagcgggcacttcttcgacctcgtcctcctcgtcctgtgcggccggccgggtgaggccgggcccgcgtagggggcagtcggcggctgcctccggcggaggtgcctcgcggcgcccgggccggcccgcgcctcggcggcgtgctccatgcatccggagcccgccccgcccccgagccgcagcagtcccgagcttcccccaagcggcggcagcaccaccagcggcagccgccggagccgccgccgcagcggggacggggagcccccgggggccccgccaccgccgccgtccgccgtcacctacccggactggatcggccagagttactccgaggtgatgagcctcaacgagcactccatgcaggcgctgtcctggcgcaagctctacttgagccgcgccaagcttaaagcctccagccggacctcggctctgctctccggcttcgccatggtggcaatggtggaggtgcagctggacgctgaccacgactacccaccggggctgctcatcgccttcagtgcctgcaccacagtgctggtggctgtgcacctgtttgcgctcatgatcagcacctgcatcctgcccaacatcgaggcggtgagcaacgtgcacaatctcaactcggtcaaggagtccccccatgagcgcatgcaccgccacatcgagctggcctgggccttctccaccgtcatcggcacgctgctcttcctagctgaggtggtgctgctctgctgggtcaagttcttgcccctcaagaagcagccaggccagccaaggcccaccagcaagccccccgccagtggcgcagcagccaacgtcagcaccagcggcatcaccccgggccaggcagctgccatcgcctcgaccaccatcatggtgcccttcggcctgatctttatcgtcttcgccgtccacttctaccgctcactggttagccataagactgaccgacagttccaggagctcaacgagctggcggagtttgcccgcttacaggaccagctggaccacagaggggaccaccccctgacgcccggcagccactatgcctaggcccatgtggtctgggcccttccagtgctttggccttacgcccttccccttgaccttgtcctgccccagcctcacggacagcctgcgcagggggctgggcttcagcaaggggcagagcatggagggaagaggatttttataagagaaatttctgcactttgaaactgtcctctaagagaataagcatttcctgttcttccagctccaggtccacctcctgttgggaggcggtggggggccaaagtggggccacacactcgctgtgtcccctctcctcccctgtgccagtgccacctgggtgcctcctcctgtcctgtccgtctcaacctccctcccgtccagcattgagtgtgtacatgtgtgtgtgacacataaatatactcataaggaaaaaaaaaaaaaaaaaaaaaaaaaaaaa

SEQ ID NO: 1397 - DNA, 1361 bp, Homo sapiens
ggggaggtagcccgcagtgcaggggcagcgcggcgcggggccaccgacgggacgcggctccgggaacatggctcgcttcgctctgactgttgtccggcatggagaaacaagatttaacaaggagaaaataatccaaggacaaggagtagatgaacctctttcagaaactggatttaaacaagcagcagctgctggtatatttctgaataatgtgaagtttactcatgctttctccagtgatctcatgaggacaaagcagaccatgcatggaattttggagagaagcaaattttgcaaagatatgacggtaaagtatgactcaagacttcgggaaaggaaatacggggttgtagaaggcaaagcgctaagtgagctgagggccatggccaaagcagccagggaagagtgccctgtgtttacaccgcccggaggagagacgctggaccaggtgaaaatgcgtggaatagacttttttgaatttctttgtcaactaatcctgaaagaagcggatcaaaaagaacagttttcccaaggatctccaagcaactgtctggaaacttctttggcagagatatttcctttaggaaaaaatcacagctctaaagttaattcagacagcggtattccaggattagcagccagtgtcttagttgtgagtcacggtgcttacatgagaagtctgtttgattattttctgactgaccttaagtgttccttaccagccactctgagcagatctgaacttatgtcagtcactcccaatacagggatgagtctctttatcataaactttgaggaaggaagagaagttaaaccaacggttcagtgtatttgtatgaacctacaggatcatctaaatggactgactgaaactcgctaaggttaaatctgcatcaaaatctaaccaatttgagcctctgaagggagtgccattggctttatttacttctctcctctgctagtcctgatttggaaacagttaaaagccaatttttagctccagtggaaccatagccacataaaactttaatggacaaccatatagaattaacttattttgtccaagtacagttggcattttccagaataattttaccaccctgctagatgtcatctctggattgcacatggatgatgaaggaactcagcattgaaagttgggggattagtaaccttgttacaacggtttctttttcattttagcctattttaatggctattggtaagatactgtatgtttttagtatctcatccagtgcttagaagaaagaatggtttataattcccagtacatgtttatattgactgtgttatatttttaaatcctttaaataaaaaatccttataagtttatgtaaagc

SEQ ID NO: 1398 - DNA, 579 bp, Homo sapiens
tctttcttttcgccatcttttgtctttccgtggagctgtcgccatgaaggtcgagctgtgcagttttagcgggtacaagatctaccccggacacgggaggcgctacgccaggaccgacgggaaggttttccagtttcttaatgcgaaatgcgagtcggctttcctttccaagaggaatcctcggcagataaactggactgtcctctacagaaggaagcacaaaaagggacagtcggaagaaattcaaaagaaaagaacccgccgagcagtcaaattccagagggccattactggtgcatctcttgctgatataatggccaagaggaatcagaaacctgaagttagaaaggctcaacgagaacaagctatcagggctgctaaggaagcaaaaaaggctaagcaagcatctaaaaagactgcaatggctgctgctaaggcacctacaaaggcagcacctaagcaaaagattgtgaagcctgtgaaagtttcagctccccgagttggtggaaaacgctaaactggcagattagatttttaaataaagattggattataactctagaaaaaaaaaaaaaaaaa

SEQ ID NO: 1399 - DNA, 927 bp, Homo sapiens
gaggtcagagacttaagtctaaggcactgagcgtatcatgttaaagatgagcgggtggcagcgacagagccaaaatcagagctggaacctgaggagagagtgttcaagaaggaagtgtatcttcatacatcaccacacctgaaagcagatgtgcttttccagactgatccaactgcagagatggcagctgagtcattgcctttctccttcgggacactgtccagctgggagctggaagcctggtatgaggacctgcaagaggtcctgtcttcagatgaaaatgggggtacctatgtttcacctcctggaaatgaagaggaagaatcaaaaatcttcaccactcttgaccctgcttctctggcttggctgactgaggaggagccagaaccagcagaggtcacaagcacctcccagagccctcactctccagattccagtcagagctccctggctcaggaggaagaggaggaagaccaagggagaaccaggaaacggaaacagagtggtcattccccagcccgggctggaaagcagcgcatgaaggagaaagaacaggagaatgaaaggaaagtggcacagctagctgaagagaatgaacggctcaagcaggaaatcgagcgcctgaccagggaagtagaggcgactcgccgagctctgattgaccgaatggtgaatctgcaccaagcatgaacaattgggagcatcagtcccccacttgggccacactacccacctttcccagaagtggctactgactaccctctcactagtgccaatgatgtgaccctcaatcccacatacgcagggggaaggcttggagtagacaaaaggaaaggtctcagcttgtatatagagattgtacatttatttattactgtccctatctattaaagtgactttctatgagccaaaaaaaaaaaaaaaaaa

SEQ ID NO: 1400 - DNA, 3286 bp, Homo sapiens
ctgaggcggcgacgagtggtaggagtcttctttcccctccttcccctttcccttcccttcccgggagaggctgggacccggcaccagggcagtactgtggccgctgcggcctcagctccgactgggtcaggttgcggagactccaggccgcttccagggcgagtactcctgattgtgacatcacattcatcccctgggcgatggagcttgtcactgggaaggaatactcagtcggagaatagccaacaagatgggttactgggagaatctcttcagtggcactgagtggaggcatcagggggttggagccttgtgaacagggaacctgccccccaacacttggaaggacctgggtttcagtgatgagacatggggtatgatgtaacccgtttccagggggatgttgacgaagatcttatctgccctatttgcagtggagtcttggaggagccagtacaggcacctcattgtgaacatgctttctgcaacgcctgcatcacccagtggttctctcagcaacagacatgtccagtggaccgtagtgttgtgacggtcgcccatctgcgcccagtacctcggatcatgcggaacatgttgtcaaagctgcagattgcctgtgacaacgctgtgttcggctgtagtgccgttgtccggcttgacaacctcatgtctcacctcagcgactgtgagcacaacccgaagcggcctgtgacctgtgaacagggctgtggcctggagatgcccaaagatgagctgcccaaccataactgcattaagcacctgcgctcagtggtacagcagcagcagacacgcatcgcagagctggagaagacgtcagctgaacacaaacaccagctggcggagcagaagcgagacatccagctgctaaaggcatacatgcgtgcaatccgcagtgtcaaccccaaccttcagaacctggaggagacaattgaatacaacgagatcctagagtgggtgaactcccttcagccagcaagagtgacccgctggggagggatgatctcgactcctgatgctgtgctccaggctgtaatcaagcgctccctggtggagagtggctgtcctgcttctattgtcaacgagctgattgaaaatgcccacgagcgtagctggccccagggtctggccacactagagactagacagatgaaccgacgctactatgagaactacgtggccaagcgcatccctggcaagcaggctgttgtcgtgatggcctgtgagaaccagcacatgggggatgacatggtgcaagagccaggccttgtcatgatatttgcgcatggcgtggaagagatataagagaactcgactggctatcaggaagagatggaaatcagaaaatcccatcactccagcagctgggacctgagtcctacccaccattcttaatactgtggcttatacctgagccacacatctccctgcccttctggcactgaagggccttggggtagtttgctcagcctttcaggtgggaaacccagatttcctccctttgccatattcccctaaaatgtctataaattatcagtctgggtgggaaagcccccacctccatccattttcctgcttagggtccctggttccagttattttcagaaagcacaaagagattcaatttccctggaggatcaggacagaggaaggaatctctaatcgtccctctcctccaaaaccagggaatcagagcagtcaggcctgttgactctaagcagcagacatcctgaagaaatggtaagggtggagccaaatctctagaaataagtagtgaggccgttaattggccatcactgatggcccttagggaaagactggacctctgtgccaagcagtatccctgttcagcccaccttaaaggtgtaggcacccactgggtctaccagtatgcaggttgggatactgaaaatttccagatgagctcttctttcctacaagttttcataattagggaatgccagggtttagggtaggggttaatctgttgggggttgatgtgtttagcaagaagctactcctagcttttgctaaaatatggttggcactgcctcttgtggcacaggccataattgttccatagacccctctctagccctgtgactgtagttagttactttgataattttctttggccattgtttgtttatatttcacaaactccacctactgcccccccccctcttttttttaagaatggcctgatcatggctatctcagccacattgttggcaatttaatttatttacttcctttttttttttttaagaaaggaaaaaagaaaaaaaaatcaaacttgaaacttttcttttgatgttcctattgtgggggttctggatagggtgggacagggatgggggtgtgttttatattttttccttttcagcacaacctttggctttaatataggaagagccaagggagtcctcggctgaacttacgatatctgccccaaacctctgtaaccccaactgaaatgaggagcttcctctcttcctgtgaaggatatgacagtccagcatcgatgcctgtgccctctggaaaaatttcctcctagcccttccagggccttatcataaaactctggatttagagtattcattttgaaggcaactcccccttccccaagtttccttggagctgtatagctgggttctaagcttcaccatgcaaatcagaaattttatctctaagtacaggctgtgccgtgtctcacccacacccccctggggacttcagttccatttcaggttacctggggtataccttgatccctagagtgactggcagagtaagagaaggggagagataataggtgtgattattttaatatggaggtgggagtgtggttggagatagaaaggctcctccccaccatgtaatggcttcctctcagaattttattccaggctagcttgctgcaggtctgggtagttggatcatggctccactgggattggggtggaaagcttgaggggagtagggttccagctctgggacattgtgctcaggaatttgaaaacgctgctatacttactctggttactacatttcttccactcccctttcccctacctgccttaaccaaggctcatactgtcctgtccttaccctcagatggagccaggaagctcagtgaaaggcttccctaccctttgcactagtgtctctgcaggttgctggttgtgttgtatgtgctgttccatggtgttgactgcactaataataaaccttttactcaactctctaaaaaaaaaaaaaaaaaaaa

SEQ ID NO: 1401 - DNA, 3429 bp, Homo sapiens
ctgaggcggcgacgagtggtaggagtcttctttcccctccttcccctttcccttcccttcccgggagaggctgggacccggcaccagggcagtactgtggccgctgcggcctcagctccgactgggtcaggttgcggagactccaggccgcttccagggcgagtactcctgattgtgacatcacattcatcccctgggcgatggagcttgtcactgggaaggaatactcagtcggagaatagccaacaagatgggttactgggagaatctcttcagtggcactgagtggaggcatcagggggttggagccttgtgaacagggaacctgccccccaacacttggaaggacctgggtttcagtgatgagacatggggtatgatgtaacccgtttccagggggatgttgacgaagatcttatctgccctatttgcagtggagtcttggaggagccagtacagaccagcttttgatacagccatgcactctgcattttgatgtgaaagctgccaccttcaataggtcatttctctgccagccttgccagaccagagtcagttgtatcatcctggggcaagtatgaggagaagctcacgattaccaggcacctcattgtgaacatgctttctgcaacgcctgcatcacccagtggttctctcagcaacagacatgtccagtggaccgtagtgttgtgacggtcgcccatctgcgcccagtacctcggatcatgcggaacatgttgtcaaagctgcagattgcctgtgacaacgctgtgttcggctgtagtgccgttgtccggcttgacaacctcatgtctcacctcagcgactgtgagcacaacccgaagcggcctgtgacctgtgaacagggctgtggcctggagatgcccaaagatgagctgcccaaccataactgcattaagcacctgcgctcagtggtacagcagcagcagacacgcatcgcagagctggagaagacgtcagctgaacacaaacaccagctggcggagcagaagcgagacatccagctgctaaaggcatacatgcgtgcaatccgcagtgtcaaccccaaccttcagaacctggaggagacaattgaatacaacgagatcctagagtgggtgaactcccttcagccagcaagagtgacccgctggggagggatgatctcgactcctgatgctgtgctccaggctgtaatcaagcgctccctggtggagagtggctgtcctgcttctattgtcaacgagctgattgaaaatgcccacgagcgtagctggccccagggtctggccacactagagactagacagatgaaccgacgctactatgagaactacgtggccaagcgcatccctggcaagcaggctgttgtcgtgatggcctgtgagaaccagcacatgggggatgacatggtgcaagagccaggccttgtcatgatatttgcgcatggcgtggaagagatataagagaactcgactggctatcaggaagagatggaaatcagaaaatcccatcactccagcagctgggacctgagtcctacccaccattcttaatactgtggcttatacctgagccacacatctccctgcccttctggcactgaagggccttggggtagtttgctcagcctttcaggtgggaaacccagatttcctccctttgccatattcccctaaaatgtctataaattatcagtctgggtgggaaagcccccacctccatccattttcctgcttagggtccctggttccagttattttcagaaagcacaaagagattcaatttccctggaggatcaggacagaggaaggaatctctaatcgtccctctcctccaaaaccagggaatcagagcagtcaggcctgttgactctaagcagcagacatcctgaagaaatggtaagggtggagccaaatctctagaaataagtagtgaggccgttaattggccatcactgatggcccttagggaaagactggacctctgtgccaagcagtatccctgttcagcccaccttaaaggtgtaggcacccactgggtctaccagtatgcaggttgggatactgaaaatttccagatgagctcttctttcctacaagttttcataattagggaatgccagggtttagggtaggggttaatctgttgggggttgatgtgtttagcaagaagctactcctagcttttgctaaaatatggttggcactgcctcttgtggcacaggccataattgttccatagacccctctctagccctgtgactgtagttagttactttgataattttctttggccattgtttgtttatatttcacaaactccacctactgcccccccccctcttttttttaagaatggcctgatcatggctatctcagccacattgttggcaatttaatttatttacttcctttttttttttttaagaaaggaaaaaagaaaaaaaaatcaaacttgaaacttttcttttgatgttcctattgtgggggttctggatagggtgggacagggatgggggtgtgttttatattttttccttttcagcacaacctttggctttaatataggaagagccaagggagtcctcggctgaacttacgatatctgccccaaacctctgtaaccccaactgaaatgaggagcttcctctcttcctgtgaaggatatgacagtccagcatcgatgcctgtgccctctggaaaaatttcctcctagcccttccagggccttatcataaaactctggatttagagtattcattttgaaggcaactcccccttccccaagtttccttggagctgtatagctgggttctaagcttcaccatgcaaatcagaaattttatctctaagtacaggctgtgccgtgtctcacccacacccccctggggacttcagttccatttcaggttacctggggtataccttgatccctagagtgactggcagagtaagagaaggggagagataataggtgtgattattttaatatggaggtgggagtgtggttggagatagaaaggctcctccccaccatgtaatggcttcctctcagaattttattccaggctagcttgctgcaggtctgggtagttggatcatggctccactgggattggggtggaaagcttgaggggagtagggttccagctctgggacattgtgctcaggaatttgaaaacgctgctatacttactctggttactacatttcttccactcccctttcccctacctgccttaaccaaggctcatactgtcctgtccttaccctcagatggagccaggaagctcagtgaaaggcttccctaccctttgcactagtgtctctgcaggttgctggttgtgttgtatgtgctgttccatggtgttgactgcactaataataaaccttttactcaactctctaaaaaaaaaaaaaaaaaaaa

SEQ ID NO: 1402 - DNA, 3174 bp, Homo sapiens
gtagcagcggtgggcggggcaaaggatccgtctgaggcggcgacgagtgagtactcctgattgtgacatcacattcatcccctgggcgatggagcttgtcactgggaaggaatactcagtcggagaatagccaacaagatgggttactgggagaatctcttcagtggcactgagtggaggcatcagggggttggagccttgtgaacagggaacctgccccccaacacttggaaggacctgggtttcagtgatgagacatggggtatgatgtaacccgtttccagggggatgttgacgaagatcttatctgccctatttgcagtggagtcttggaggagccagtacaggcacctcattgtgaacatgctttctgcaacgcctgcatcacccagtggttctctcagcaacagacatgtccagtggaccgtagtgttgtgacggtcgcccatctgcgcccagtacctcggatcatgcggaacatgttgtcaaagctgcagattgcctgtgacaacgctgtgttcggctgtagtgccgttgtccggcttgacaacctcatgtctcacctcagcgactgtgagcacaacccgaagcggcctgtgacctgtgaacagggctgtggcctggagatgcccaaagatgagctgcccaaccataactgcattaagcacctgcgctcagtggtacagcagcagcagacacgcatcgcagagctggagaagacgtcagctgaacacaaacaccagctggcggagcagaagcgagacatccagctgctaaaggcatacatgcgtgcaatccgcagtgtcaaccccaaccttcagaacctggaggagacaattgaatacaacgagatcctagagtgggtgaactcccttcagccagcaagagtgacccgctggggagggatgatctcgactcctgatgctgtgctccaggctgtaatcaagcgctccctggtggagagtggctgtcctgcttctattgtcaacgagctgattgaaaatgcccacgagcgtagctggccccagggtctggccacactagagactagacagatgaaccgacgctactatgagaactacgtggccaagcgcatccctggcaagcaggctgttgtcgtgatggcctgtgagaaccagcacatgggggatgacatggtgcaagagccaggccttgtcatgatatttgcgcatggcgtggaagagatataagagaactcgactggctatcaggaagagatggaaatcagaaaatcccatcactccagcagctgggacctgagtcctacccaccattcttaatactgtggcttatacctgagccacacatctccctgcccttctggcactgaagggccttggggtagtttgctcagcctttcaggtgggaaacccagatttcctccctttgccatattcccctaaaatgtctataaattatcagtctgggtgggaaagcccccacctccatccattttcctgcttagggtccctggttccagttattttcagaaagcacaaagagattcaatttccctggaggatcaggacagaggaaggaatctctaatcgtccctctcctccaaaaccagggaatcagagcagtcaggcctgttgactctaagcagcagacatcctgaagaaatggtaagggtggagccaaatctctagaaataagtagtgaggccgttaattggccatcactgatggcccttagggaaagactggacctctgtgccaagcagtatccctgttcagcccaccttaaaggtgtaggcacccactgggtctaccagtatgcaggttgggatactgaaaatttccagatgagctcttctttcctacaagttttcataattagggaatgccagggtttagggtaggggttaatctgttgggggttgatgtgtttagcaagaagctactcctagcttttgctaaaatatggttggcactgcctcttgtggcacaggccataattgttccatagacccctctctagccctgtgactgtagttagttactttgataattttctttggccattgtttgtttatatttcacaaactccacctactgcccccccccctcttttttttaagaatggcctgatcatggctatctcagccacattgttggcaatttaatttatttacttcctttttttttttttaagaaaggaaaaaagaaaaaaaaatcaaacttgaaacttttcttttgatgttcctattgtgggggttctggatagggtgggacagggatgggggtgtgttttatattttttccttttcagcacaacctttggctttaatataggaagagccaagggagtcctcggctgaacttacgatatctgccccaaacctctgtaaccccaactgaaatgaggagcttcctctcttcctgtgaaggatatgacagtccagcatcgatgcctgtgccctctggaaaaatttcctcctagcccttccagggccttatcataaaactctggatttagagtattcattttgaaggcaactcccccttccccaagtttccttggagctgtatagctgggttctaagcttcaccatgcaaatcagaaattttatctctaagtacaggctgtgccgtgtctcacccacacccccctggggacttcagttccatttcaggttacctggggtataccttgatccctagagtgactggcagagtaagagaaggggagagataataggtgtgattattttaatatggaggtgggagtgtggttggagatagaaaggctcctccccaccatgtaatggcttcctctcagaattttattccaggctagcttgctgcaggtctgggtagttggatcatggctccactgggattggggtggaaagcttgaggggagtagggttccagctctgggacattgtgctcaggaatttgaaaacgctgctatacttactctggttactacatttcttccactcccctttcccctacctgccttaaccaaggctcatactgtcctgtccttaccctcagatggagccaggaagctcagtgaaaggcttccctaccctttgcactagtgtctctgcaggttgctggttgtgttgtatgtgctgttccatggtgttgactgcactaataataaaccttttactcaactctctaaaaaaaaaaaaaaaaaaaa

SEQ ID NO: 1403 - DNA, 4176 bp, Homo sapiens
ggcggtcccctgttctccccgctcaggtgcggcgctgtggcaggaagccaccccctcggtcggccggtgcgcggggctgttgcgccatccgctccggctttcgtaaccgcaccctgggacggcccagagacgctccagcgcgagttcctcaaatgttttcctgcgttgccaggaccgtccgccgctctgagtcatgtgcgagtgggaagtcgcactgacactgagccgggccagagggagaggagccgagcgcggcgcggggccgagggactcgcagtgtgtgtagagagccgggctcctgcggatgggggctgcccccggggcctgagcccgcctgcccgcccaccgccccgccccgcccctgccacccctgccgcccggttcccattagcctgtccgcctctgcgggaccatggagtggtagccgaggaggaagcatgctggccgtcggctgcgcgctgctggctgccctgctggccgcgccgggagcggcgctggccccaaggcgctgccctgcgcaggaggtggcgagaggcgtgctgaccagtctgccaggagacagcgtgactctgacctgcccgggggtagagccggaagacaatgccactgttcactgggtgctcaggaagccggctgcaggctcccaccccagcagatgggctggcatgggaaggaggctgctgctgaggtcggtgcagctccacgactctggaaactattcatgctaccgggccggccgcccagctgggactgtgcacttgctggtggatgttccccccgaggagccccagctctcctgcttccggaagagccccctcagcaatgttgtttgtgagtggggtcctcggagcaccccatccctgacgacaaaggctgtgctcttggtgaggaagtttcagaacagtccggccgaagacttccaggagccgtgccagtattcccaggagtcccagaagttctcctgccagttagcagtcccggagggagacagctctttctacatagtgtccatgtgcgtcgccagtagtgtcgggagcaagttcagcaaaactcaaacctttcagggttgtggaatcttgcagcctgatccgcctgccaacatcacagtcactgccgtggccagaaacccccgctggctcagtgtcacctggcaagacccccactcctggaactcatctttctacagactacggtttgagctcagatatcgggctgaacggtcaaagacattcacaacatggatggtcaaggacctccagcatcactgtgtcatccacgacgcctggagcggcctgaggcacgtggtgcagcttcgtgcccaggaggagttcgggcaaggcgagtggagcgagtggagcccggaggccatgggcacgccttggacagaatccaggagtcctccagctgagaacgaggtgtccacccccatgcaggcacttactactaataaagacgatgataatattctcttcagagattctgcaaatgcgacaagcctcccagtgcaagattcttcttcagtaccactgcccacattcctggttgctggagggagcctggccttcggaacgctcctctgcattgccattgttctgaggttcaagaagacgtggaagctgcgggctctgaaggaaggcaagacaagcatgcatccgccgtactctttggggcagctggtcccggagaggcctcgacccaccccagtgcttgttcctctcatctccccaccggtgtcccccagcagcctggggtctgacaatacctcgagccacaaccgaccagatgccagggacccacggagcccttatgacatcagcaatacagactacttcttccccagatagctggctgggtggcaccagcagcctggaccctgtggatgataaaacacaaacgggctcagcaaaagatgcttctcactgccatgccagcttatctcaggggtgtgcggcctttggcttcacggaagagccttgcggaaggttctacgccaggggaaaatcagcctgctccagctgttcagctggttgaggtttcaaacctccctttccaaatgcccagcttaaaggggctagagtgaacttgggccactgtgaagagaaccatatcaagactctttggacactcacacggacactcaaaagctgggcaggttggtgggggcctcggtgtggagaagcggctggcagcccacccctcaacacctctgcacaagctgcaccctcaggcaggtgggatggatttccagccaaagcctcctccagccgccatgctcctggcccactgcatcgtttcatcttccaactcaaactcttaaaacccaagtgccttagcaaattctgtttttctaggcctggggacggcttttacttaaaccgccaaggctgggggaagaagctctctcctccctttcttccctacagttgaaaaacagctgagggtgagtgggtgaataatacagtatctcagggcctggtcgttttcaacagaattataattagttcctcattagcattttgctaaatgtgaatgatgatcctaggcatttgctgaatacagaggcaactgcattggctttgggttgcaggacctcaggtgagaagcagaggaaggagaggagaggggcacagggtctctaccatcccctgtagagtgggagctgagtgggggatcacagcctctgaaaaccaatgttctctcttctccacctcccacaaaggagagctagcagcagggagggcttctgccatttctgagatcaaaacggttttactgcagctttgtttgttgtcagctgaacctgggtaactagggaagataatattaaggaagacaatgtgaaaagaaaaatgagcctggcaagaatgtgtttaaacttggtttttaaaaaactgctgactgttttctcttgagagggtggaatatccaatattcgctgtgtcagcatagaagtaacttacttaggtgtgggggaagcaccataactttgtttagcccaaaaccaagtcaagtgaaaaaggaggaagagaaaaaatattttcctgccaggcatggtggcccacgcacttcgggaggtcgaggcaggaggatcacttgagtccagaagtttgagatcagcctgggcaatgtgataaaaccccatctctacaaaaagcataaaaattagccaagtgtggtagagtgtgcctgaagtcccagatacttggggggctgaggtgggaggatctcttgagcctgggaggtcaaggctgcagtgagccgagattgcaccactgcactccagcctgggtgacagagcaagtgagaccctgtctcaaaaaaagaaaaagaaaaagaaaaaatattttccctattagagaagagattgtggtttcattctgtattttgtttttgtcttaaaaagtggaaaaatagcctgcctcttctctactctagggaaaaaccagcgtgtgactactcccccaggtggttatggagagggtgtccggtccctgtcccagtgccgagaaggaagcctcccacgactgcccggcagggtcctagaaattccccaccctgaaagccctgagctttctgctatcaaagaggttttaaaaaaatcccatttaaaaaaaatcccttacctcggtgccttcctctttttatttagttccttgagttgattcagctctgcaagaattgaagcaggactaaatgtctagttgtaacaccatgattaaccacttcagctgacttttctgtccgagctttgaaaattcagtggtgttagtggttacccagttagctctcaagttatcagggtattccagagtggggatatgatttaaatcagccgtgtaaccatggacccaatatttaccagaccacaaaacttttctaatactctaccctcttagaaaaaccaccaccatcaccagacaggtgcgaaaggatgaaagtgaccatgttttgtttacggttttccaggtttaagctgttactgtcttcagtaagccgtgattttcattgctgggcttgtctgtagattttagaccctattgctgcttgaggcaactcatcttaggttggcaaaaaggcaggatggccgggcgcggtggctcacgcctgtaatcctagcactttgggaggccaaggtgggaggattgcttgagctcaggagtttgagaccaacctggg

SEQ ID NO: 1404 - DNA, 4082 bp, Homo sapiens
ggcggtcccctgttctccccgctcaggtgcggcgctgtggcaggaagccaccccctcggtcggccggtgcgcggggctgttgcgccatccgctccggctttcgtaaccgcaccctgggacggcccagagacgctccagcgcgagttcctcaaatgttttcctgcgttgccaggaccgtccgccgctctgagtcatgtgcgagtgggaagtcgcactgacactgagccgggccagagggagaggagccgagcgcggcgcggggccgagggactcgcagtgtgtgtagagagccgggctcctgcggatgggggctgcccccggggcctgagcccgcctgcccgcccaccgccccgccccgcccctgccacccctgccgcccggttcccattagcctgtccgcctctgcgggaccatggagtggtagccgaggaggaagcatgctggccgtcggctgcgcgctgctggctgccctgctggccgcgccgggagcggcgctggccccaaggcgctgccctgcgcaggaggtggcgagaggcgtgctgaccagtctgccaggagacagcgtgactctgacctgcccgggggtagagccggaagacaatgccactgttcactgggtgctcaggaagccggctgcaggctcccaccccagcagatgggctggcatgggaaggaggctgctgctgaggtcggtgcagctccacgactctggaaactattcatgctaccgggccggccgcccagctgggactgtgcacttgctggtggatgttccccccgaggagccccagctctcctgcttccggaagagccccctcagcaatgttgtttgtgagtggggtcctcggagcaccccatccctgacgacaaaggctgtgctcttggtgaggaagtttcagaacagtccggccgaagacttccaggagccgtgccagtattcccaggagtcccagaagttctcctgccagttagcagtcccggagggagacagctctttctacatagtgtccatgtgcgtcgccagtagtgtcgggagcaagttcagcaaaactcaaacctttcagggttgtggaatcttgcagcctgatccgcctgccaacatcacagtcactgccgtggccagaaacccccgctggctcagtgtcacctggcaagacccccactcctggaactcatctttctacagactacggtttgagctcagatatcgggctgaacggtcaaagacattcacaacatggatggtcaaggacctccagcatcactgtgtcatccacgacgcctggagcggcctgaggcacgtggtgcagcttcgtgcccaggaggagttcgggcaaggcgagtggagcgagtggagcccggaggccatgggcacgccttggacagaatccaggagtcctccagctgagaacgaggtgtccacccccatgcaggcacttactactaataaagacgatgataatattctcttcagagattctgcaaatgcgacaagcctcccaggttcaagaagacgtggaagctgcgggctctgaaggaaggcaagacaagcatgcatccgccgtactctttggggcagctggtcccggagaggcctcgacccaccccagtgcttgttcctctcatctccccaccggtgtcccccagcagcctggggtctgacaatacctcgagccacaaccgaccagatgccagggacccacggagcccttatgacatcagcaatacagactacttcttccccagatagctggctgggtggcaccagcagcctggaccctgtggatgataaaacacaaacgggctcagcaaaagatgcttctcactgccatgccagcttatctcaggggtgtgcggcctttggcttcacggaagagccttgcggaaggttctacgccaggggaaaatcagcctgctccagctgttcagctggttgaggtttcaaacctccctttccaaatgcccagcttaaaggggctagagtgaacttgggccactgtgaagagaaccatatcaagactctttggacactcacacggacactcaaaagctgggcaggttggtgggggcctcggtgtggagaagcggctggcagcccacccctcaacacctctgcacaagctgcaccctcaggcaggtgggatggatttccagccaaagcctcctccagccgccatgctcctggcccactgcatcgtttcatcttccaactcaaactcttaaaacccaagtgccttagcaaattctgtttttctaggcctggggacggcttttacttaaaccgccaaggctgggggaagaagctctctcctccctttcttccctacagttgaaaaacagctgagggtgagtgggtgaataatacagtatctcagggcctggtcgttttcaacagaattataattagttcctcattagcattttgctaaatgtgaatgatgatcctaggcatttgctgaatacagaggcaactgcattggctttgggttgcaggacctcaggtgagaagcagaggaaggagaggagaggggcacagggtctctaccatcccctgtagagtgggagctgagtgggggatcacagcctctgaaaaccaatgttctctcttctccacctcccacaaaggagagctagcagcagggagggcttctgccatttctgagatcaaaacggttttactgcagctttgtttgttgtcagctgaacctgggtaactagggaagataatattaaggaagacaatgtgaaaagaaaaatgagcctggcaagaatgtgtttaaacttggtttttaaaaaactgctgactgttttctcttgagagggtggaatatccaatattcgctgtgtcagcatagaagtaacttacttaggtgtgggggaagcaccataactttgtttagcccaaaaccaagtcaagtgaaaaaggaggaagagaaaaaatattttcctgccaggcatggtggcccacgcacttcgggaggtcgaggcaggaggatcacttgagtccagaagtttgagatcagcctgggcaatgtgataaaaccccatctctacaaaaagcataaaaattagccaagtgtggtagagtgtgcctgaagtcccagatacttggggggctgaggtgggaggatctcttgagcctgggaggtcaaggctgcagtgagccgagattgcaccactgcactccagcctgggtgacagagcaagtgagaccctgtctcaaaaaaagaaaaagaaaaagaaaaaatattttccctattagagaagagattgtggtttcattctgtattttgtttttgtcttaaaaagtggaaaaatagcctgcctcttctctactctagggaaaaaccagcgtgtgactactcccccaggtggttatggagagggtgtccggtccctgtcccagtgccgagaaggaagcctcccacgactgcccggcagggtcctagaaattccccaccctgaaagccctgagctttctgctatcaaagaggttttaaaaaaatcccatttaaaaaaaatcccttacctcggtgccttcctctttttatttagttccttgagttgattcagctctgcaagaattgaagcaggactaaatgtctagttgtaacaccatgattaaccacttcagctgacttttctgtccgagctttgaaaattcagtggtgttagtggttacccagttagctctcaagttatcagggtattccagagtggggatatgatttaaatcagccgtgtaaccatggacccaatatttaccagaccacaaaacttttctaatactctaccctcttagaaaaaccaccaccatcaccagacaggtgcgaaaggatgaaagtgaccatgttttgtttacggttttccaggtttaagctgttactgtcttcagtaagccgtgattttcattgctgggcttgtctgtagattttagaccctattgctgcttgaggcaactcatcttaggttggcaaaaaggcaggatggccgggcgcggtggctcacgcctgtaatcctagcactttgggaggccaaggtgggaggattgcttgagctcaggagtttgagaccaacctggg

SEQ ID NO: 1405 - DNA, 2160 bp, Homo sapiens
gctccagtcgcctccgacctcggcgctgggcgggcgcgccgggcctggggaaggggcgggcgcggggacccgatgcgcgggagcggaggccgagatggcttcggcgggaggcgaagactgcgagagccccgcgccggaggccgaccgtccgcaccagcggcccttcctgataggggtgagcggcggcactgccagcgggaagtcgaccgtgtgtgagaagatcatggagttgctgggacagaacgaggtggaacagcggcagcggaaggtggtcatcctgagccaggacaggttctacaaggtcctgacggcagagcagaaggccaaggccttgaaaggacagtacaattttgaccatccagatgcctttgataatgatttgatgcacaggactctgaagaacatcgtggagggcaaaacggtggaggtgccgacctatgattttgtgacacactcaaggttaccagagaccacggtggtctaccctgcggacgtggttctgtttgagggcatcttggtgttctacagccaggagatccgggacatgttccacctgcgcctcttcgtggacaccgactccgacgtcaggctgtctcgaagagttctccgggacgtgcgccgagggagggacctggagcagattctgacgcagtacaccaccttcgtgaagccggccttcgaggagttctgcctgccgacaaagaagtatgccgatgtgatcatcccacgaggagtggacaatatggttgccatcaacctgatcgtgcagcacatccaggacattctgaatggtgacatctgcaaatggcaccgaggagggtccaatgggcggagctacaagcggaccttttctgagccaggggaccaccctgggatgctgacctctggcaaacggtcacatttggagtccagcagcagaccccactgaggggctgccgagcctcagggcaggtctcccgcccggcatgtgtgttcagggactgagcctggggacgcccacccacacccactgcttcctctcggcgcaccccaggggagtgttagcagcgaggccttcctcactcaggagtggaaactcagatgtgtcactcagactcaacttgctgggacactgacaggcgttcctgaggttttcagccacttaggctcgttgcggtttaaagatccctctaggtcactgagaaatgccacagaatgtgcaggaagcctgggaggcttctgtgaggaatgtgaggcacattattggggaaattgaggagacagcctagacactggctggcctgatgttttgttgacagtgaacccacagtgggagagagttttttccagtctgatctggttcttacacacacacataactcaaaagttttgtgaacaagtactttccttttttacatgttacatgtcctcatgttttctgttttctgtttcataacacaaggctggttgtggcctacaaacctaatttcatgacccagtggtttgcagtccagcgtggcctacacggatatggggagccactgagggatgttttccccccttgcttgtgccttaaaggcagagaagcgaggcggatgccctggaagcacccagcatcacacccaggcttgtgcggggccaggctgggagcccatgcagtagggcagaaggcagcggaggccaggtctgtcccggctggagaacagcgtccacgcagtcctgcctggggtcaggccctcactgaccctcaggggagcccccaaggtgctgtctgtctagacaggctgtcccaccccagggtggctagtggccatatgcagggaatggtgcttctggctgtggcacgcactggatcacccaggtcccagcagacatggccgcccaaagtcagcaagcctcctttgtgctatgtggagctcacagcctcacatgtgaacacccgtgtctgggttgcctggggtgatcctccctcctgcgtggtggctgtctctggaaagcatcccttgccgctgccacgggcagccccagcccccgtccgtccaggctcacccacagtagtgatgcagacgtgacgtgggggaagggggctgagccctgtggctgggttctgacaactgtaacggttttgtcgagcttaggcccctttggagggagaatcaataaataacaaacaccaactac

SEQ ID NO: 1406 - DNA, 894 bp, Homo sapiens
aggcggggcttgcacacgctggtcacgcggtcagctattgacacttcctggtgggatccgagtgaggcgacggggtaggggttggcgctcaggcggcgaccatggcgtatcacggcctcactgtgcctctcattgtgatgagcgtgttctggggcttcgtcggcttcttggtgccttggttcatccctaagggtcctaaccggggagttatcattaccatgttggtgacctgttcagtttgctgctatctcttttggctgattgcaattctggcccaactcaaccctctctttggaccgcaattgaaaaatgaaaccatctggtatctgaagtatcattggccttgaggaagaagacatgctctacagtgctcagtctttgaggtcacgagaagagaatgccttctagatgcaaaatcacctccaaaccagaccacttttcttgacttgcctgttttggccattagctgccttaaacgttaacagcacatttgaatgccttattctacaatgcagcgtgttttcctttgccttttttgcactttggtgaattacgtgcctccataacctgaactgtgccgactccacaaaacgattatgtactcttctgagatagaagatgctgttcttctgagagatacgttactctctccttggaatctgtggatttgaagatggctcctgccttctcacgtgggaatcagtgaagtgtttagaaactgctgcaagacaaacaagactccagtggggtggtcagtaggagagcacgttcagagggaagagccatctcaacagaatcgcaccaaactatactttcaggatgaatttcttctttctgccatcttttggaataaatattttcctcctttctatggaaatctggaaaaaaaaaaaa

SEQ ID NO: 1407 - DNA, 2289 bp, Homo sapiens
tacgcatagccgggcactaggttcgtgggctgtggaggcgacggagcagggggccagtggggccagctcagggaggacctgcctgggagctttctcttgcataccctcgcttaggctggccggggtgtcacttctgcctccctgccctccagaccatggacggctccttcgtccagcacagtgtgagggttctgcaggagctcaacaagcagcgggagaagggccagtactgcgacgccactctggacgtggggggcctggtgtttaaggcacactggagtgtccttgcctgctgcagtcactttttccagagcctctacggggatggctcagggggcagtgtcgtcctccctgctggcttcgctgagatctttggcctcttgttggactttttctacactggtcacctcgctctcacctcagggaaccgggatcaggtgctcctggcagccagggagttgcgagtgccagaggccgtagagctgtgccagagcttcaagcccaaaacttcagtgggacaggcagcaggtggccagagtgggctggggccccctgcctcccagaatgtgaacagccacgtcaaggagccggcaggcttggaagaagaggaagtttcgaggactctgggtctagtccccagggatcaggagcccagaggcagtcatagtcctcagaggccccagctccattccccagctcagagtgagggcccctcctccctctgtgggaaactgaagcaggccttgaagccttgtccccttgaggacaagaaacccgaggactgcaaagtgcccccaaggcccttagaggctgaaggtgcccagctgcagggcggcagtaatgagtgggaagtggtggttcaagtggaggatgatggggatggcgattacatgtctgagcctgaggctgtgctgaccaggaggaagtcaaatgtaatccgaaagccctgtgcagctgagccagccctgagcgcgggctccctagcagctgagcctgctgagaacagaaaaggtacagcggtgccggtcgaatgccccacatgtcataaaaagttcctcagcaaatattatctaaaagtccacaacaggaaacatactggggagaaaccctttgagtgtcccaaatgtgggaagtgttactttcggaaggagaacctcctggagcatgaagcccggaattgcatgaaccgctcggaacaggtcttcacgtgctctgtgtgccaggagacattccgccgaaggatggagctgcgggtgcacatggtgtctcacacaggggagatgccctacaagtgttcctcctgctcccagcagttcatgcagaagaaggacttgcagagccacatgatcaaacttcatggagcccccaagccccatgcatgccccacctgtgccaagtgcttcctgtctcggacagagctgcagctgcatgaagctttcaagcaccgtggtgagaagctgtttgtgtgtgaggagtgtgggcaccgggcctcgagccggaatggcctgcagatgcacatcaaggccaagcacaggaatgagaggccacacgtatgtgagttctgcagccacgccttcacccaaaaggccaatctcaacatgcacctgcgcacacacacgggtgagaagcccttccagtgccacctctgtggcaagaccttccgaacccaagccagcctggacaagcacaaccgcacccacaccggggaaaggcccttcagttgcgagttctgtgaacagcgcttcactgagaaggggcccctcctgaggcacgtggccagccgccatcaggagggccggccccacttctgccagatatgcggcaagaccttcaaagccgtggagcaactgcgtgtgcacgtcagacggcacaagggggtgaggaagtttgagtgcaccgagtgtggctacaagtttacccgacaggcccacctgcggaggcacatggagatccacgaccgggtagagaactacaacccgcggcagcgcaagctccgcaacctgatcatcgaggacgagaagatggtggtggtggcgctgcagccgcctgcagagctggaggtgggctcggcggaggtcattgtggagtccctggcccagggcggcctggcctcccagctccccggccagagactgtgtgcagaggagagcttcaccggcccaggtgtcctggagccctccctcatcatcacagctgctgtccccgaggactgtgacacatagcccattctggccaccagagcccacttggccccacccctcaataaaccgtgtggctttggactctcgt

SEQ ID NO: 1408 - DNA, 3880 bp, Homo sapiens
gccgcggctcatgcgcggtgcacagaggcttgtttcacatctgtaacaacaggaggaggcccagcctcgtgatgaggaatagcaaggagagaattcagctccagttcaaaagcctacaaaatctgagactgtcattgcttttataaggattccagctttccctcctggccagaaatgttcagcctggactcattcagaaaagatcgggcccagcacaggcagcgtcagtgcaaacttcccccaccccgccttccacccatgtgtgtcaaccctaccccaggagggaccatctctcgaggctgaacgttaacatttccaacatggcagcttctagggacctattaaaagagttcccacagcccaaaaatcttctcaacagtgtgattggaagagccctcggcatctcacatgcaaaagacaaactagtctacgtgcacacaaatggaccgaagaaaaagaaagtcacactgcacataaaatggcccaagagcgtggaggtagaaggctatggcagcaagaagatcgatgctgagcggcaggctgcagctgcagcctgccagctgttcaagggttggggtctgctaggtccccggaatgagttgtttgacgcagccaaataccgagtgctagctgatcgctttggctcccctgccgacagctggtggcgtccggaacccaccatgccccctacttcctggcggcagctgaatccagagagtattcgaccagggggacctgggggcctatcccgctctttaggccgggaagaagaggaggacgaggaggaagagctagaagaagggaccatagatgttaccgacttcttgtccatgacccagcaggattcccacgctccactcagggactcaagggggagttcctttgagatgacagatgacgacagtgccattagggctctgacccagtttccacttcccaagaaccttctggccaaggtgattcagattgcaacgtcatcctccacagctaagaacctcatgcagttccatactgtgggcaccaagaccaagctgtctacactcaccctgctctggccctgccccatgacctttgttgccaaagggcgccgcaaagcagaggctgagaataaggcggcagccttggcctgcaagaaactgaagagcctgggcctggtggacaggaacaacgaaccgcttacacacgccatgtataacctggcctctttgcgtgagctgggtgagacccagcgccgaccatgcaccatccaggtgcccgagcccatcctccgcaagatagagaccttcctgaaccattaccctgtggagagttcatggatcgccccagaactccggctgcagagtgatgacatcttgcccttgggcaaggactcagggcctctgagtgaccctatcacaggcaagccctatgtgcccctgttggaagcagaggaggtacgtctcagccagagtctgctagaactgtggcggcggcgagggccggtctggcaggaggccccccagctacctgtggacccacatcgggacaccatcctcaacgccattgagcagcacccggtggtggtcatctctggggacacgggctgtgggaagaccacgcgcatcccccagctgttgctggagcgctatgtgaccgagggccgaggtgcccgctgcaatgttatcatcacccaacctcgccgcatctctgctgtgtctgtggcacagcgggtcagccacgaactgggcccctccctgcgccggaatgtgggcttccaggtgcggttggaaagtaagcccccatcccgaggcggggccctgctcttctgcactgtgggtatcctgctgcgtaagctgcagagcaaccccagcctggagggcgtgagccacgtcatcgtggatgaggtgcatgagcgggacgtgaacacagactttctgctgatcctgctcaagggcctgcagcggctcaacccggccctgcggctggtgctcatgagtgccacaggggacaatgagcgcttctcccgatactttggtggctgccccgtcatcaaggtgcctggcttcatgtacccagtcaaggagcactacctagaggacatcctggccaagttgggcaagcaccagtacctgcaccggcaccggcaccatgagtctgaggatgaatgcgcactcgatttggaccttgtgactgatctggttctgcacatcgatgctcgcggggaaccaggtgggatcctgtgcttcctgcctgggtggcaggagatcaaaggagtgcagcagcgcctccaggaggccctgggcatgcacgagagcaagtacctcatcctgccagtgcactccaacatccccatgatggatcagaaggccatattccagcagcctccagttggggtgcgcaagattgtcttggccaccaacattgctgagacttccatcacaatcaatgacatcgtgcatgtggtggacagtgggctgcacaaggaagaacgctatgacctgaagaccaaggtgtcctgcctggagacagtgtgggtatcaagagccaatgtgatccagcgccggggccgggcgggccgctgccagtccggctttgcctaccacttgttccctcgaagccggctggagaaaatggtccctttccaagtgccagagatcctgcgcacacctcttgagaacctggtgctgcaagcgaaaatccacatgcctgagaagacggcggtggagttcctgtccaaggctgtggacagtccaaacatcaaggcagtggacgaggctgtgatcttgctccaggagatcggggtgctggaccagcgggagtacctgactaccctggggcagcgcctggctcacatctccaccgacccccggttggccaaggccattgtgttggctgccatcttccgttgcctgcacccactactggtggtcgtttcctgcctcacccgggaccccttcagcagcagcctacagaaccgggcagaggtggacaaggtgaaagcactgttgagccatgacagcggcagtgaccacctggcctttgtgcgggctgtcgccggctgggaggaggtgctgcgttggcaggaccgcagctcccgggagaattacctggaggaaaacctgctgtacgcacccagcctgcgcttcatccacggactcatcaagcagttctcagagaacatttatgaggccttcctggtggggaagccctcggactgcaccctggcctccgcccagtgcaacgagtacagtgaggaggaggagctggtgaagggcgtgctgatggccggcctctaccccaacctcatccaggtgaggcagggcaaggtcacccggcaggggaagttcaagcccaacagcgtcacatataggaccaaatcaggcaacatcctgctgcacaagtcgaccattaacagggaggccacacggttacggagccgatggctgacgtatttcatggcagtcaagtccaatggcagcgtcttcgtccgggactcctctcaggtgcacccgctagctgtgctgctgctgaccgacggggacgtgcacatccgtgatgacgggcgccgggccaccatctcactgagcgacagtgacctgctgcggctggagggtgactcgcgtaccgtgcggctgctgaaggagctgcggcgggccctgggccgcatggtggagcggagcctgcgcagcgagctggctgcacttccccccagcgtacaggaggagcacgggcagctgcttgcgctactggcagagctgctgcgaggaccctgtggcagctttgatgtgcgcaagacagctgacgactgagccctgcttctgctggggctgtgtacagagtgcaaatgtttatttaaaataaagttctatttatcccttgtgaaaaaaaaaaaaaaaaaaaa

SEQ ID NO: 1409 - DNA, 1574 bp, Homo sapiens
gttctcttcgcccggtccctgccgcgcacaggcctcggggtcggcgggagcacgatggcggccgctaggagactcatggcgctggccgccggcatctctccgcgcctgcagccgctgggtccccgcgctgctgggcgacagggtcgctcgcgcggcttctcttcaagctgcgcccaccccgaccacaccaaggaagccgccgaggccgagtcagggatggcccccggcgggcctggggaaggcgacggaagcttggtgaacgcttctagggacctattaaaagagttcccacagcccaaaaatcttctcaacagtgtgattggaagagccctcggcatctcacatgcaaaagacaaactagtctacgtgcacacaaatggaccgaagaaaaagaaagtcacactgcacataaaatggcccaagagcgtggaggtagaaggctatggcagcaagaagatcgatgctgagcggcaggctgcagctgcagcctgccagctgttcaagggttggggtctgctaggtccccggaatgagttgtttgacgcagccaaataccgagtgctagctgatcgctttggctcccctgccgacagctggtggcgtccggaacccaccatgccccctacttcctggcggcagctgaatccagagagtattcgaccagggggacctgggggcctatcccgctctttaggccgggaagaagaggaggacgaggaggaagagctagaagaagggaccatagatgttaccgacttcttgtccatgacccagcaggattcccacgctccactcagggactcaagggggagttcctttgagatgacagatgacgacagtgccattagggctctgacccagtttccacttcccaagaaccttctggccaaggtgattcagattgcaacgtcatcctccacagctaagaacctcatgcagttccatactgtgggcaccaagaccaagctgtctacactcaccctgctctggccctgccccatgacctttgttgccaaagggcgccgcaaagcagaggctgagaataaggcggcagccttggcctgcaagaaactgaagagcctgggcctggtggacaggaacaacgaaccgcttacacacggttacggagccgatggctgacgtatttcatggcagtcaagtccaatggcagcgtcttcgtccgggactcctctcaggtgcacccgctagctgtgctgctgctgaccgacggggacgtgcacatccgtgatgacgggcgccgggccaccatctcactgagcgacagtgacctgctgcggctggagggtgactcgcgtaccgtgcggctgctgaaggagctgcggcgggccctgggccgcatggtggagcggagcctgcgcagcgagctggctgcacttccccccagcgtacaggaggagcacgggcagctgcttgcgctactggcagagctgctgcgaggaccctgtggcagctttgatgtgcgcaagacagctgacgactgagccctgcttctgctggggctgtgtacagagtgcaaatgtttatttaaaataaagttctatttatcccttgtg

SEQ ID NO: 1410 - DNA, 3851 bp, Homo sapiens
gccgcggctcatgcgcggtgcacagaggcttgtttcacatctgtaacaacaggaggaggcccagcctcgtgatgaggaatagcaaggagagaattcagctccagttcaaaagcctacaaaatctgagactgtcattgcttttataaggattccagctttccctcctggccagaaatgttcagcctggactcattcagaaaagatcgggcccagcacaggcagcgtcagtgcaaacttcccccaccccgccttccacccatgtgtgtcaaccctaccccaggagggaccatctctcgagcttctagggacctattaaaagagttcccacagcccaaaaatcttctcaacagtgtgattggaagagccctcggcatctcacatgcaaaagacaaactagtctacgtgcacacaaatggaccgaagaaaaagaaagtcacactgcacataaaatggcccaagagcgtggaggtagaaggctatggcagcaagaagatcgatgctgagcggcaggctgcagctgcagcctgccagctgttcaagggttggggtctgctaggtccccggaatgagttgtttgacgcagccaaataccgagtgctagctgatcgctttggctcccctgccgacagctggtggcgtccggaacccaccatgccccctacttcctggcggcagctgaatccagagagtattcgaccagggggacctgggggcctatcccgctctttaggccgggaagaagaggaggacgaggaggaagagctagaagaagggaccatagatgttaccgacttcttgtccatgacccagcaggattcccacgctccactcagggactcaagggggagttcctttgagatgacagatgacgacagtgccattagggctctgacccagtttccacttcccaagaaccttctggccaaggtgattcagattgcaacgtcatcctccacagctaagaacctcatgcagttccatactgtgggcaccaagaccaagctgtctacactcaccctgctctggccctgccccatgacctttgttgccaaagggcgccgcaaagcagaggctgagaataaggcggcagccttggcctgcaagaaactgaagagcctgggcctggtggacaggaacaacgaaccgcttacacacgccatgtataacctggcctctttgcgtgagctgggtgagacccagcgccgaccatgcaccatccaggtgcccgagcccatcctccgcaagatagagaccttcctgaaccattaccctgtggagagttcatggatcgccccagaactccggctgcagagtgatgacatcttgcccttgggcaaggactcagggcctctgagtgaccctatcacaggcaagccctatgtgcccctgttggaagcagaggaggtacgtctcagccagagtctgctagaactgtggcggcggcgagggccggtctggcaggaggccccccagctacctgtggacccacatcgggacaccatcctcaacgccattgagcagcacccggtggtggtcatctctggggacacgggctgtgggaagaccacgcgcatcccccagctgttgctggagcgctatgtgaccgagggccgaggtgcccgctgcaatgttatcatcacccaacctcgccgcatctctgctgtgtctgtggcacagcgggtcagccacgaactgggcccctccctgcgccggaatgtgggcttccaggtgcggttggaaagtaagcccccatcccgaggcggggccctgctcttctgcactgtgggtatcctgctgcgtaagctgcagagcaaccccagcctggagggcgtgagccacgtcatcgtggatgaggtgcatgagcgggacgtgaacacagactttctgctgatcctgctcaagggcctgcagcggctcaacccggccctgcggctggtgctcatgagtgccacaggggacaatgagcgcttctcccgatactttggtggctgccccgtcatcaaggtgcctggcttcatgtacccagtcaaggagcactacctagaggacatcctggccaagttgggcaagcaccagtacctgcaccggcaccggcaccatgagtctgaggatgaatgcgcactcgatttggaccttgtgactgatctggttctgcacatcgatgctcgcggggaaccaggtgggatcctgtgcttcctgcctgggtggcaggagatcaaaggagtgcagcagcgcctccaggaggccctgggcatgcacgagagcaagtacctcatcctgccagtgcactccaacatccccatgatggatcagaaggccatattccagcagcctccagttggggtgcgcaagattgtcttggccaccaacattgctgagacttccatcacaatcaatgacatcgtgcatgtggtggacagtgggctgcacaaggaagaacgctatgacctgaagaccaaggtgtcctgcctggagacagtgtgggtatcaagagccaatgtgatccagcgccggggccgggcgggccgctgccagtccggctttgcctaccacttgttccctcgaagccggctggagaaaatggtccctttccaagtgccagagatcctgcgcacacctcttgagaacctggtgctgcaagcgaaaatccacatgcctgagaagacggcggtggagttcctgtccaaggctgtggacagtccaaacatcaaggcagtggacgaggctgtgatcttgctccaggagatcggggtgctggaccagcgggagtacctgactaccctggggcagcgcctggctcacatctccaccgacccccggttggccaaggccattgtgttggctgccatcttccgttgcctgcacccactactggtggtcgtttcctgcctcacccgggaccccttcagcagcagcctacagaaccgggcagaggtggacaaggtgaaagcactgttgagccatgacagcggcagtgaccacctggcctttgtgcgggctgtcgccggctgggaggaggtgctgcgttggcaggaccgcagctcccgggagaattacctggaggaaaacctgctgtacgcacccagcctgcgcttcatccacggactcatcaagcagttctcagagaacatttatgaggccttcctggtggggaagccctcggactgcaccctggcctccgcccagtgcaacgagtacagtgaggaggaggagctggtgaagggcgtgctgatggccggcctctaccccaacctcatccaggtgaggcagggcaaggtcacccggcaggggaagttcaagcccaacagcgtcacatataggaccaaatcaggcaacatcctgctgcacaagtcgaccattaacagggaggccacacggttacggagccgatggctgacgtatttcatggcagtcaagtccaatggcagcgtcttcgtccgggactcctctcaggtgcacccgctagctgtgctgctgctgaccgacggggacgtgcacatccgtgatgacgggcgccgggccaccatctcactgagcgacagtgacctgctgcggctggagggtgactcgcgtaccgtgcggctgctgaaggagctgcggcgggccctgggccgcatggtggagcggagcctgcgcagcgagctggctgcacttccccccagcgtacaggaggagcacgggcagctgcttgcgctactggcagagctgctgcgaggaccctgtggcagctttgatgtgcgcaagacagctgacgactgagccctgcttctgctggggctgtgtacagagtgcaaatgtttatttaaaataaagttctatttatcccttgtgaaaaaaaaaaaaaaaaaaaa

SEQ ID NO: 1411 - DNA, 1983 bp, Homo sapiens
agcgggtggcagccccgcgggtcacagcgccgccgccgcccatgctgctgcccctagcctgcctgcacggccgcgtcgctcagtgcctgacctccttgcttttgcttgcagagccgctcccgaggccccggcgcggcgcgagggcgcggggcgcggcgtccacaggcgccgaggctgcccccgccgccccgcccgcgaagatggcggcggaactctacgctcccgcccacactcggcaacaaccaccaggagagccccggctggcggtgctgccgccccacgctgcgcgagaggaacgcgctcatgttcaacaatgagctcatggccgacgtgcacttcgtcgtggggcccccgggggcgaccaggacggtgcccgcccacaagtacgtcttggctgtcggcagctccgtcttctatgccatgttctacggagacctggcggaagtcaaatctgaaattcacattccagacgtggagcccgcagcctttctgatcctcttaaagtacatgtacagtgatgagatcgatctggaagccgacacggtgctggccactctgtatgctgctaagaagtacatcgtcccagcattggcaaaagcctgtgtcaactttctggagacaagtttggaagccaagaacgcctgcgtcctgctgtcccagagccggctgtttgaggagcccgagctgacgcagcgctgctgggaggtcattgacgcacaggccgagatggccctacggtccgaaggcttctgtgagatagaccggcagacgctggagatcattgtcactcgggaggccctcaacaccaaagaggcggtggtcttcgaggccgtcctgaactgggccgaggcggagtgcaagaggcaggggctgccaatcaccccacgaaacaaggggcatgttctggggcgagccctctatctggtccgaattccaaccatgaccctagaggagtttgccaacggcgctgcccagtcagacatcctgactctggaggagacccacagcatcttcctgtggtacacggccaccaacaagccccgcctggactttcccctgaccaagaggaagggcctcgccccgcagaggtgccaccgattccagtcttctgcctaccgcagcaaccagtggcggtaccgcgggcgctgcgacagcatccagtttgcagtggacagaagggtatttattgcagggctgggcctgtatggctccagctctgggaaggctgagtacagcgtgaagattgagctcaagcggctcggggtggttctggctcagaacttgaccaagttcatgtcagacggatccagtaacaccttcccggtctggtttgaacacccggtccaggttgaacaagacaccttctacacggccagtgccgtcctggacggcagcgaactcagctactttgggcaggaggggatgacggaagtgcagtgtggaaaggtggccttccagttccagtgctcctcggacagcaccaacgggactggggtccagggtgggcagatccctgagctcattttctatgcctgaggtgcccggggaggctgcagcaggtcagcgagtgagtggaggggaagtcaaggtgctaactgcttcttgacaccatgaaaggctgctcttaactttgtctctctttgacatgtagtcagctgaagcttgactgtgtagagacattttccacacagccagaacccagggattggagtcttaggcatctctggtacagtggggtgcacgtctcaggtggaggaagatttacggctcaagacaggccccagatcccctcccagtggcacccacgccacctgctttgaggggttggatcttcctgctaccctcttggattctaagtggttccaagcttaacttgagaccttcccttcaaatctaaaattggcaaaaagtcacttaaaatagtggacttctgtaataaaggttgcctaaaataacaaaaaaaaaagaaaaaaaaaaaaaaaa

SEQ ID NO: 1412 - DNA, 1162 bp, Homo sapiens
gggaggggcgcgctggggagcttcggcgcatgcgcgctgaggcctgcctgaccgaccttcagcagggctgtggctaccatgttctctcgcgcgggtgtcgctgggctgtcggcctggaccttgcagccgcaatggattcaagttcgaaatatggcaactttgaaagatatcaccaggagactaaagtccatcaaaaacatccagaaaattaccaagtctatgaaaatggtagcggcagcaaaatatgcccgagctgagagagagctgaaaccagctcgaatatatggattgggatctttagctctgtatgaaaaagctgatatcaaggggcctgaagacaagaagaaacacctccttattggtgtgtcctcagatcgaggactgtgtggtgctattcattcctccattgctaaacagatgaaaagcgaggttgctacactaacagcagctgggaaagaagttatgcttgttggaattggtgacaaaatcagaggcatactttataggactcattctgaccagtttctggtggcattcaaagaagtgggaagaaagccccccacttttggagatgcgtcagtcattgcccttgaattactaaattctggatatgaatttgatgaaggctccatcatctttaataaattcaggtctgtcatctcctataagacagaagaaaagcccatcttttcccttaataccgttgcaagtgctgacagcatgagtatctatgacgatattgatgctgacgtgctgcaaaattaccaagaatacaatctggccaacatcatctactactctctgaaggagtccaccactagtgagcagagtgccaggatgacagccatggacaatgccagcaagaatgcttctgagatgattgacaaattgacattgacattcaaccgtacccgccaagctgtcatcacaaaagagttgattgaaattatctctggtgctgcagctctggattaatgaaaatcaagttccatcctcagacaagaggtaaagaaggaaaattcagccagttgattttgtttttagcttactgctgcctttgtccgaagaaactgttcctccattatttgaattactgaagacagcaagatatttgtaaattatcttaaaataaacaacttaaaataaaaaaaaaaaaaaaaaa

SEQ ID NO: 1413 - DNA, 1125 bp, Homo sapiens
gggaggggcgcgctggggagcttcggcgcatgcgcgctgaggcctgcctgaccgaccttcagcagggctgtggctaccatgttctctcgcgcgggtgtcgctgggctgtcggcctggaccttgcagccgcaatggattcaagttcgaaatatggcaactttgaaagatatcaccaggagactaaagtccatcaaaaacatccagaaaattaccaagtctatgaaaatggtagcggcagcaaaatatgcccgagctgagagagagctgaaaccagctcgaatatatggattgggatctttagctctgtatgaaaaagctgatatcaaggggcctgaagacaagaagaaacacctccttattggtgtgtcctcagatcgaggactgtgtggtgctattcattcctccattgctaaacagatgaaaagcgaggttgctacactaacagcagctgggaaagaagttatgcttgttggaattggtgacaaaatcagaggcatactttataggactcattctgaccagtttctggtggcattcaaagaagtgggaagaaagccccccacttttggagatgcgtcagtcattgcccttgaattactaaattctggatatgaatttgatgaaggctccatcatctttaataaattcaggtctgtcatctcctataagacagaagaaaagcccatcttttcccttaataccgttgcaagtgctgacagcatgagtatctatgacgatattgatgctgacgtgctgcaaaattaccaagaatacaatctggccaacatcatctactactctctgaaggagtccaccactagtgagcagagtgccaggatgacagccatggacaatgccagcaagaatgcttctgagatgattgacaaattgacattgacattcaaccgtacccgccaagctgtcatcacaaaagagttgattgaaattatctctggtgctgcagctctgtaaagaaggaaaattcagccagttgattttgtttttagcttactgctgcctttgtccgaagaaactgttcctccattatttgaattactgaagacagcaagatatttgtaaattatcttaaaataaacaacttaaaataaaaaaaaaaaaaaaaaa

SEQ ID NO: 1414 - DNA, 3035 bp, Homo sapiens
ggcgtaggtagatcgccgggggctgacgagtgcaccatggccaccgcggcaacctcacccgcgctgaagcggctggatctgcgcgaccctgcggctcttttcgagacgcatggagcggaggagatccgcgggctggagcgccaggttcgggccgagatcgagcacaagaaggaggagctgcggcagatggtgggcgaacggtaccgcgacctgatcgaggcggccgacaccatcggccagatgcgccgctgcgccgtggggctagtggacgccgtgaaggccaccgaccagtactgcgcccgcctccgccaggccggctcggccgcgccccggccaccgcgggcccagcagccacagcagccatcccaggagaagttctacagcatggctgcccagatcaagctactcttagaaattccggagaagatctggagctcgatggaagcctctcagtgtctccacgccacacagctctacctgctctgctgccacctccacagcctgctccagctggattcttctagttcccgatacagtcccgtcctctcccggtttcctatactcatccggcaggtggcagccgccagccacttccggtcaactattctgcatgaaagcaagatgttgctcaaatgccaaggtgtgtctgaccaagctgtggccgaggccctgtgctctataatgctcttagaagagagttctcctcgccaagccctcacagacttcctgctggccagaaaggcaactattcagaaacttctcaaccagccacaccatggtgctggtatcaaggctcagatttgctcattagtggagttgctggccaccactctgaagcaagctcatgcccttttctacactttgccagaaggactgctgccagatccagccctgccatgtggcttgctcttctctactctggagaccatcacaggccagcatcctgccggaaagggcactggtgtcctgcaggaagagatgaaactctgcagctggtttaaacacctgccagcatccatcgtcgagttccagccaacactccgaacccttgcacatcccatcagtcaggaatacctgaaagacacgctgcagaaatggatccacatgtgtaatgaagacattaaaaatgggatcaccaacctgctcatgtacgtgaagagcatgaagggtctcgcgggaatccgggacgccatgtgggagttacttaccaatgagtccaccaatcacagctgggatgtgctatgtcggcggcttctggagaagccgctcttgttctgggaagatatgatgcagcaactgttccttgaccgattacagactctgacaaaagaaggctttgactccatctccagtagctccaaggagctcttggtttcagctttgcaggaacttgaaagcagcaccagcaactccccttcaaataagcacatccactttgagtacaacatgtcgctcttcctctggtctgagagtcctaatgacctgccttccgatgcggcctgggtcagcgtggcaaaccggggtcagtttgccagtagcggcctctccatgaaagcacaagccatcagcccttgtgtacagaacttctgttctgccctggattctaagctgaaggttaaactagatgacctcctggcttacctcccctctgatgactcatcactgcccaaggacgtttctcccacacaggccaagagttctgcctttgacagatacgcagatgcggggaccgtgcaggagatgctgcggactcagtccgtggcatgcatcaagcacatcgtggactgcatccgggcagagctacagagcattgaagagggtgtgcaagggcaacaggatgccctcaacagtgccaagctgcactcagttcttttcatggccagactctgccagtccctgggagagctgtgcccccatctgaagcagtgcatcctgggaaaatcagagagctcagagaaaccagcaagggagtttagggctctgagaaaacagggaaaggtgaaaactcaggaaatcattcctacacaggccaagtggcaagaggttaaagaagtactcctccagcagagcgtgatgggctaccaggtctggagcagtgcagttgtgaaagttttgattcatggattcacccagtcattacttctagatgatgctggctcagttctggccacagccaccagctgggatgagctagaaattcaggaggaggcagagtctggcagcagtgtcacatccaagatccgactccctgcacagccgtcctggtatgtacagtccttcctgtttagtttatgccaggaaattaatcgggttggaggccatgccttgccaaaggtgacattacaggagatgctgaaaagctgtatggttcaagtagtagctgcctatgagaaactctccgaagaaaaacagattaagaaagaaggtgcatttccagtcacccagaaccgggcgctgcagctgctttatgatctgcgttacctcaacattgttctgacagccaagggtgacgaggtgaagagtggccggagcaagccagactccagaattgagaaagtgactgaccacctggaagccctcattgatccatttgacctggacgttttcacgccacacctcaacagcaaccttcatcgcctggtgcagcgaacttctgttctgtttggattggtgactggtacagagaatcagctcgccccccggagcagtacgttcaactcccaagaaccccataacatcctgccactggcatccagtcagatcaggtttggacttctcccactgagcatgacaagcactcgaaaggctaaatcaaccagaaacatcgaaacaaaagctcaggttgtccccccggcacgctccacagctggtgacccgacagttcctggctccttgttcagacagcttgtcagtgaagaagacaacacgtctgcaccttcattattcaaacttggctggctctctagtatgactaagtaacatggcaacacatctgtctctccctaaataaatactaccacattatttcttctaaa

SEQ ID NO: 1415 - DNA, 2286 bp, Homo sapiens
gttcctcacccccgcttcgccctcacactttcgggatgtctgcgattcctgctgaggagagcgaccagctgctgatccgaccccttggagctgggcaagaagtaggaagatcatgtattattctcgagttcaaaggaagaaaaataatgctcgactgtgggatccaccctggcctagaaggaatggatgctcttccttatattgatttaattgacccagctgagattgatctcctattaattagtcatttccatttggatcactgtggagctctgccctggtttctacagaagacaagtttcaaaggaagaacatttatgactcatgccacaaaagctatttatagatggcttctttctgattatgtcaaagttagtaacatatcagcagacgacatgctgtataccgagacagatttggaagaaagcatggacaaaattgaaactatcaactttcatgaagttaaggaagttgcgggaatcaagttttggtgttaccatgcaggtcacgtcctaggagccgccatgttcatgattgagatcgcaggcgtgaagcttttgtacactggtgatttctcaagacaagaagataggcacttaatggcagctgaaattcctaatattaagcctgatattcttatcattgaatctacttatgggacccatatccatgagaaacgtgaagagcgagaagcaagattctgtaacactgtccacgatattgtaaacagaggaggcaggggtctcattcctgtctttgctcttggaagggctcaggagctgctcttgattctagatgagtactggcagaatcacccagaactacatgacattccaatatactatgcatcatctttggccaagaagtgtatggcagtgtaccagacatatgtaaatgccatgaatgacaaaatccgcaaacagatcaacatcaataatccctttgttttcaaacacattagtaacctcaagagcatggatcattttgatgacattggtcccagtgttgtaatggcctccccaggcatgatgcaaagtggcttatccagagaattatttgaaagctggtgtactgataagaggaatggtgtcattatagcgggatactgtgtagaagggacacttgccaagcacatcatgtctgaacctgaagaaatcactactatgtctggacagaagttaccactgaaaatgtctgttgattacatttctttctcagctcacacggattaccagcaaaccagtgaatttattcgtgctttgaaaccgcctcatgtgattttagtccatggagaacagaatgaaatggccagattgaaagcagcactgattcgagaatatgaagataacgatgaagttcacatagaggttcataatcctcggaatacagaagcagtgaccttaaacttcagaggagaaaaactagccaaggttatgggatttttagcagacaaaaaaccagaacaaggccagcgggtctcaggaatacttgttaaaagaaactttaattatcacatactttctccttgcgacctgtccaattatactgacctggccatgagcacggtgaagcagacccaagccattccatatactggtccctttaatttgctctgttaccagctgcagaaattgacaggtgatgtggaagaattagaaattcaagaaaaacctgctctgaaagtgttcaaaaatattactgtaatacaagaaccaggcatggtggtattagaatggctggcaaacccttctaatgatatgtatgcagatacagtaacaactgtgatattggaagttcagtcaaatcccaaaataagaaaaggtgcagtacagaaggtttctaaaaaattagaaatgcacgtttacagcaagaggttggagatcatgctccaggacatatttggagaagactgtgtaagtgtaaaggatgactctattcttagcgtcacagtggacgggaaaactgccaaccttaacttggagacacggactgtagaatgtgaagagggaagtgaagacgatgaatccctccgagaaatggtggagctggctgcacagagactgtacgaggccctgacgccagttcactgagactgtgcctgtatatgaactttgaaaaaatacttgactctacttttgttacctaaaataaaatgcattcgtttctctgggaaaaaaaaaaaaaaaaaaaaaaaaaaaaaaaaaaaaaaaaaaaaaaaaaaaaaaaaaaaaaaaaaaaaaaaaaaaaaaaaaaaaaaaaaaaaaaaaaaaaaaaaaaaaaaaaaaa

SEQ ID NO: 1416 - DNA, 1199 bp, Homo sapiens
cccaggaaagcttgaaggcagagatagactcacgtctctaagacatatacataatatagccgcaaccgcggcggccttactttcccggagctgcatccccttttaggcgaagagcggaggcgaccagggactaccctaggtgaaagggcagccacctggccctacccgggctcaacgccgagcctctcggaggtacggcctcccggggaccttccagactggtcggcgcaagcgaagggcggggaccaccgaaggagtgtgtgacttaggcatccagcgcactgcctgacccgaagtaccgacccgagttatgcccaccctccaactttgcgacggaaatgtgtcatcgaaagccaggtacaccaggggttggaaaaaccacactaggcaaagaacttgcgtcaaaatcaggactgaaatacattaatgtgggtgatttagctcgagaagagcaattgtatgatggctatgatgaagagtatgactgtcccattttagatgaagacagagtagttgatgagttagataaccaaatgagagaaggtggagttattgttgattaccatggttgtgatttcttccctgaacgctggtttcatatagtttttgtgctgagaacagataccaatgtattgtacgaaagacttgaaacaaggggttataatgagaagaaactaacagacaatattcagtgtgagatttttcaagttctttatgaagaagccacagcatcctacaaggaagaaatcgtgcatcagctgcccagtaataaaccagaagagctagaaaataatgtagatcagatcttgaaatggattgagcagtggatcaaagatcataactcttgacttataaggctagctacttaataatcactcttgttgatatctctgccgacatcatagaaattgttcaagtgtcagtaacactttattaaaatcatgttgcagaaccagcaggtggatagtatataggtttatgcctgtgtttctttttctccatgagaaagctaaacatgaaatataatgaatatagtattattaaggattgagacaaaaactgtgattttaatacttaaattgctaaagaataaataaatctgacaaaatgggtggatatcttttaagtttattacagaaaaaaatgcagatgatctcttaaaataaaactaaagataaagcaaaaaaaaaaaaaaaaaa

SEQ ID NO: 1417 - DNA, 1482 bp, Homo sapiens
cccaggaaagcttgaaggcagagatagactcacgtctctaagacatatacataatatagccgcaaccgcggcggccttactttcccggagctgcatccccttttaggcgaagagcggaggcgaccagggactaccctaggtgaaagggcagccacctggccctacccgggctcaacgccgagcctctcggaggtacggcctcccggggaccttccagactggtcggcgcaagcgaagggcggggaccaccgaaggagtgtgtgacttaggcatccagcgcactgcctgacccgaagtaccgacccgagttatgcccaccctccaactttgcgacggaaatgtgtcatcgaaagccaggtacaccaggggttggaaaaaccacactaggcaaagaacttgcgtcaaaatcaggactgaaatacattaatgtgggtgatttagctcgagaagtctgatcatcggatatcatggagtctggcaagacggcttctcccaagagcatgccgaaagatgcacagatgatggcacaaatcctgaaggatatggggattacagaatatgagccaagagttataaatcagatgttggagtttgccttccgatatgtgaccacaattctagatgatgcaaaaatttattcaagccatgctaagaaagctactgttgatgcagatgatgtgcgattggcaatccagtgccgcgctgatcagtcttttacctctcctcccccaagagattttttattagatattgcaaggcaaagaaatcaaacccctttgccattgatcaagccatattcaggtcctaggttgccacctgatagatactgcttaacagctccaaactataggctgaaatctttacagaaaaaggcatcaacttctgcgggaagaataacagtcccgcggttaagtgttggttcagttactagcagaccaagtactcccacactaggcacaccaaccccacagaccatgtctgtttcaactaaagtagggactcccatgtccctcacaggtcaaaggtttacagtacagatgcctacttctcagtctccagctgtaaaagcttcaattcctgcaacctcagcagttcagaatgttctgattaatccatcattaatcgggtccaaaaacattcttattaccactaatatgatgtcatcacaaaatactgccaatgaatcatcaaatgcattgaaaagaaaacgtgaagatgatgatgatgacgatgatgatgatgatgactatgataatctgtaatctagccttgctgaatgtaacatgtatacttggtcttgaattcattgtactgatattaaacatgcatgctggatgttttcaagttgtgttttagaaaactaataataatgagtaaacacagttaccatacttttcaattgaaatgaaggtttttcatcagccttaaaagtgtaagaaaaataaagttgtcattcattcgaaaaaaaaaaaaaaaaaaaaa

SEQ ID NO: 1418 - DNA, 1245 bp, Homo sapiens
gtgggcttttgctgccgcccgccccttccggctcctccctgtagagcaaagggcacgtgagcgaggcgcccgaagccgtcgcggcggggaccatgttgcttccgaacatcctgctcaccggtacaccaggggttggaaaaaccacactaggcaaagaacttgcgtcaaaatcaggactgaaatacattaatgtgggtgatttagctcgagaagtctgatcatcggatatcatggagtctggcaagacggcttctcccaagagcatgccgaaagatgcacagatgatggcacaaatcctgaaggatatggggattacagaatatgagccaagagttataaatcagatgttggagtttgccttccgatatgtgaccacaattctagatgatgcaaaaatttattcaagccatgctaagaaagctactgttgatgcagatgatgtgcgattggcaatccagtgccgcgctgatcagtcttttacctctcctcccccaagagattttttattagatattgcaaggcaaagaaatcaaacccctttgccattgatcaagccatattcaggtcctaggttgccacctgatagatactgcttaacagctccaaactataggctgaaatctttacagaaaaaggcatcaacttctgcgggaagaataacagtcccgcggttaagtgttggttcagttactagcagaccaagtactcccacactaggcacaccaaccccacagaccatgtctgtttcaactaaagtagggactcccatgtccctcacaggtcaaaggtttacagtacagatgcctacttctcagtctccagctgtaaaagcttcaattcctgcaacctcagcagttcagaatgttctgattaatccatcattaatcgggtccaaaaacattcttattaccactaatatgatgtcatcacaaaatactgccaatgaatcatcaaatgcattgaaaagaaaacgtgaagatgatgatgatgacgatgatgatgatgatgactatgataatctgtaatctagccttgctgaatgtaacatgtatacttggtcttgaattcattgtactgatattaaacatgcatgctggatgttttcaagttgtgttttagaaaactaataataatgagtaaacacagttaccatacttttcaattgaaatgaaggtttttcatcagccttaaaagtgtaagaaaaataaagttgtcattcattcgaaaaaaaaaaaaaaaaaaaaa

SEQ ID NO: 1419 - DNA, 962 bp, Homo sapiens
gtgggcttttgctgccgcccgccccttccggctcctccctgtagagcaaagggcacgtgagcgaggcgcccgaagccgtcgcggcggggaccatgttgcttccgaacatcctgctcaccggtacaccaggggttggaaaaaccacactaggcaaagaacttgcgtcaaaatcaggactgaaatacattaatgtgggtgatttagctcgagaagagcaattgtatgatggctatgatgaagagtatgactgtcccattttagatgaagacagagtagttgatgagttagataaccaaatgagagaaggtggagttattgttgattaccatggttgtgatttcttccctgaacgctggtttcatatagtttttgtgctgagaacagataccaatgtattgtacgaaagacttgaaacaaggggttataatgagaagaaactaacagacaatattcagtgtgagatttttcaagttctttatgaagaagccacagcatcctacaaggaagaaatcgtgcatcagctgcccagtaataaaccagaagagctagaaaataatgtagatcagatcttgaaatggattgagcagtggatcaaagatcataactcttgacttataaggctagctacttaataatcactcttgttgatatctctgccgacatcatagaaattgttcaagtgtcagtaacactttattaaaatcatgttgcagaaccagcaggtggatagtatataggtttatgcctgtgtttctttttctccatgagaaagctaaacatgaaatataatgaatatagtattattaaggattgagacaaaaactgtgattttaatacttaaattgctaaagaataaataaatctgacaaaatgggtggatatcttttaagtttattacagaaaaaaatgcagatgatctcttaaaataaaactaaagataaagcaaaaaaaaaaaaaaaaaa

SEQ ID NO: 1420 - DNA, 4039 bp, Homo sapiens
ggcgggcggcggcggggcccgagccggagaagatggcggtgcggaagaaggacggcggccccaacgtgaagtactacgaggccgcggacaccgtgacccagttcgacaacgtgcggctgtggctcggcaagaactacaagaagtatatacaagctgaaccacccaccaacaagtccctgtctagcctggttgtacagttgctacaatttcaggaagaagtttttggcaaacatgtcagcaatgcaccgctcactaaactgccgatcaaatgtttcctagatttcaaagcgggaggctccttgtgccacattcttgcagctgcctacaaattcaagagtgaccagggatggcggcgttacgatttccagaatccatcacgcatggaccgcaatgtggaaatgtttatgaccattgagaagtccttggtgcagaataattgcctgtctcgacctaacatttttctgtgcccagaaattgagcccaaactactagggaaattaaaggacattatcaagagacaccagggaacagtcactgaggataagaacaatgcctcccatgttgtgtatcctgtcccggggaatctagaagaagaggaatgggtacgaccagtcatgaagagggataagcaggttcttctgcactggggctactatcctgacagttacgacacgtggatcccagcgagtgaaattgaggcatctgtggaagatgctccaactcctgagaaacctaggaaggttcatgcaaagtggatcctggacaccgacaccttcaatgaatggatgaatgaggaagactatgaagtaaatgatgacaaaaaccctgtctcccgccgaaagaagatttcagccaagacactgacagatgaggtgaacagcccagattcagatcgacgggacaagaaggggggaaactataagaagaggaagcgctccccctctccttcaccaaccccagaagcaaagaagaaaaatgctaagaaaggtccctcaacaccttacactaagtcaaagcgtggccacagagaagaggagcaagaagacctgacaaaggacatggacgagccctcaccagtccccaatgtagaagaggtgacacttcccaaaacagtcaacacaaagaaagactcagagtcggccccagtcaaaggcggcaccatgaccgacctggatgaacaggaagatgaaagcatggagacgacgggcaaggatgaggatgagaacagtacggggaacaagggagagcagaccaagaatccagacctgcatgaggacaatgtgactgaacagacccaccacatcatcattcccagctacgctgcctggtttgactacaatagtgttcatgccattgagcggagggctctccccgagttcttcaacggcaagaacaagtccaagactccagagatctacctggcctatcgaaactttatgattgacacttaccgactgaacccccaagagtatcttacctctaccgcctgccgccgaaacctagcgggtgatgtctgtgccatcatgagggtccatgccttcctagaacagtggggtcttattaactaccaggtggatgctgagagtcgaccaaccccaatggggcctccgcctacctctcacttccatgtcttggctgacacaccatcagggctggtgcctctgcagcccaagacacctcagcagacctctgcttcccaacaaatgctcaactttcctgacaaaggcaaagagaaaccaacagacatgcaaaactttgggctgcgcacagacatgtacacaaaaaagaatgttccctccaagagcaaggctgcagccagtgccactcgtgagtggacagaacaggaaaccctgcttctcctggaggcactggaaatgtacaaagatgactggaacaaagtgtccgagcatgtgggaagccgcacacaggacgagtgcatcttgcattttcttcgtcttcccattgaagacccatacctggaggactcagaggcctccctaggccccctggcctaccaacccatccccttcagtcagtcgggcaaccctgttatgagcactgttgccttcctggcctctgtcgtcgatccccgagtcgcctctgctgctgcaaagtcagccctagaggagttctccaaaatgaaggaagaggtacccacggccttggtggaggcccatgttcgaaaagtggaagaagcagccaaagtaacaggcaaggcggaccctgccttcggtctggaaagcagtggcattgcaggaaccacctctgatgagcctgagcggattgaggagagcgggaatgacgaggctcgggtggaaggccaggccacagatgagaagaaggagcccaaggaaccccgagaaggagggggtgctatagaggaggaagcaaaagagaaaaccagcgaggctcccaagaaggatgaggagaaagggaaagaaggcgacagtgagaaggagtccgagaagagtgatggagacccaatagtcgatcctgagaaggagaaggagccaaaggaagggcaggaggaagtgctgaaggaagtggtggagtctgagggggaaaggaagacaaaggtggagcgggacattggcgagggcaacctctccaccgctgctgccgccgccctggccgccgccgcagtgaaagctaagcacttggctgctgttgaggaaaggaagatcaaatctttggtggccctgctggtggagacccagatgaaaaagttggagatcaaacttcggcactttgaggagctggagactatcatggaccgggagcgagaagcactggagtatcagaggcagcagctcctggccgacagacaagccttccacatggagcagctgaagtatgcggagatgagggctcggcagcagcacttccaacagatgcaccaacagcagcagcagccaccaccagccctgcccccaggctcccagcctatccccccaacaggggctgctgggccacccgcagtccatggcttggctgtggctccagcctctgtagtccctgctcctgctggcagtggggcccctccaggaagtttgggcccttctgaacagattgggcaggcagggtcaactgcagggccacagcagcagcaaccagctggagccccccagcctggggcagtcccaccaggggttcccccccctggaccccatggcccctcaccgttccccaaccaacaaactcctccctcaatgatgccaggggcagtgccaggcagcgggcacccaggcgtggcgggtaatgctcctttgggtttgccttttggcatgccgcctcctcctcctcctcctgctccatccatcatcccatttggtagtctagctgactccatcagtattaacctccccgctcctcctaacctgcatgggcatcaccaccatctcccgttcgccccgggcactctccccccacctaacctgcctgtgtccatggcgaaccctctacatcctaacctgccggcgaccaccaccatgccatcttccttgcctctcgggccggggctcggatccgccgcagcccaaagccctgccattgtggcagctgttcagggcaacctcctgcccagtgccagcccactgccagacccaggcacccccctgcctccagaccccacagccccgagcccaggcacggtcacccctgtgccacctccacagtgaggagccagccagacatctctccccctcaccccctgtggacatcacggttccaggaacagcccttcccccaccactgggaccctccccagcctggagagttcatcactacgtaaggaaagctccttccgcccctccaaagccctcaccatgcctaacagaggcatgcatttttatatcagattattcaaggacttctgtttaaaagatgtttataatgtctgggagagaggataggatgggaatgctgccctaaaggaagggctggtgaaaggtgtttatacaaggttctattaaccacttctaagggtacacctccctccaaactactgcattttctatggattaaaaaaaaaaaaaaaaaa

SEQ ID NO: 1421 - DNA, 3786 bp, Homo sapiens
ggcgggcggcggcggggcccgagccggagaagatggcggtgcggaagaaggacggcggccccaacgtgaagtactacgaggccgcggacaccgtgacccagttcgacaacgtgcggctgtggctcggcaagaactacaagaagtatatacaagctgaaccacccaccaacaagtccctgtctagcctggttgtacagttgctacaatttcaggaagaagtttttggcaaacatgtcagcaatgcaccgctcactaaactgccgatcaaatgtttcctagatttcaaagcgggaggctccttgtgccacattcttgcagctgcctacaaattcaagagtgaccagggatggcggcgttacgatttccagaatccatcacgcatggaccgcaatgtggaaatgtttatgaccattgagaagtccttggtgcagaataattgcctgtctcgacctaacatttttctgtgcccagaaattgagcccaaactactagggaaattaaaggacattatcaagagacaccagggaacagtcactgaggataagaacaatgcctcccatgttgtgtatcctgtcccggggaatctagaagaagaggaatgggtacgaccagtcatgaagagggataagcaggttcttctgcactggggctactatcctgacagttacgacacgtggatcccagcgagtgaaattgaggcatctgtggaagatgctccaactcctgagaaacctaggaaggttcatgcaaagtggatcctggacaccgacaccttcaatgaatggatgaatgaggaagactatgaagtaaatgatgacaaaaaccctgtctcccgccgaaagaagatttcagccaagacactgacagatgaggtgaacagcccagattcagatcgacgggacaagaaggggggaaactataagaagaggaagcgctccccctctccttcaccaaccccagaagcaaagaagaaaaatgctaagaaaggtccctcaacaccttacactaagtcaaagcgtggccacagagaagaggagcaagaagacctgacaaaggacatggacgagccctcaccagtccccaatgtagaagaggtgacacttcccaaaacagtcaacacaaagaaagactcagagtcggccccagtcaaaggcggcaccatgaccgacctggatgaacaggaagatgaaagcatggagacgacgggcaaggatgaggatgagaacagtacggggaacaagggagagcagaccaagaatccagacctgcatgaggacaatgtgactgaacagacccaccacatcatcattcccagctacgctgcctggtttgactacaatagtgttcatgccattgagcggagggctctccccgagttcttcaacggcaagaacaagtccaagactccagagatctacctggcctatcgaaactttatgattgacacttaccgactgaacccccaagagtatcttacctctaccgcctgccgccgaaacctagcgggtgatgtctgtgccatcatgagggtccatgccttcctagaacagtggggtcttattaactaccaggtggatgctgagagtcgaccaaccccaatggggcctccgcctacctctcacttccatgtcttggctgacacaccatcagggctggtgcctctgcagcccaagacacctcagggccgccaggttgatgctgataccaaggctgggcgaaagggcaaagagctggatgacctggtgccagagacggctaagggcaagccagagctgcagacctctgcttcccaacaaatgctcaactttcctgacaaaggcaaagagaaaccaacagacatgcaaaactttgggctgcgcacagacatgtacacaaaaaagaatgttccctccaagagcaaggctgcagccagtgccactcgtgagtggacagaacaggaaaccctgcttctcctggaggcactggaaatgtacaaagatgactggaacaaagtgtccgagcatgtgggaagccgcacacaggacgagtgcatcttgcattttcttcgtcttcccattgaagacccatacctggaggactcagaggcctccctaggccccctggcctaccaacccatccccttcagtcagtcgggcaaccctgttatgagcactgttgccttcctggcctctgtcgtcgatccccgagtcgcctctgctgctgcaaagtcagccctagaggagttctccaaaatgaaggaagaggtacccacggccttggtggaggcccatgttcgaaaagtggaagaagcagccaaagtaacaggcaaggcggaccctgccttcggtctggaaagcagtggcattgcaggaaccacctctgatgagcctgagcggattgaggagagcgggaatgacgaggctcgggtggaaggccaggccacagatgagaagaaggagcccaaggaaccccgagaaggagggggtgctatagaggaggaagcaaaagagaaaaccagcgaggctcccaagaaggatgaggagaaagggaaagaaggcgacagtgagaaggagtccgagaagagtgatggagacccaatagtcgatcctgagaaggagaaggagccaaaggaagggcaggaggaagtgctgaaggaagtggtggagtctgagggggaaaggaagacaaaggtggagcgggacattggcgagggcaacctctccaccgctgctgccgccgccctggccgccgccgcagtgaaagctaagcacttggctgctgttgaggaaaggaagatcaaatctttggtggccctgctggtggagacccagatgaaaaagttggagatcaaacttcggcactttgaggagctggagactatcatggaccgggagcgagaagcactggagtatcagaggcagcagctcctggccgacagacaagccttccacatggagcagctgaagtatgcggagatgagggctcggcagcagcacttccaacagatgcaccaacagcagcagcagccaccaccagccctgcccccaggctcccagcctatccccccaacaggggctgctgggccacccgcagtccatggcttggctgtggctccagcctctgtagtccctgctcctgctggcagtggggcccctccaggaagtttgggcccttctgaacagattgggcaggcagggtcaactgcagggccacagcagcagcaaccagctggagccccccagcctggggcagtcccaccaggggttcccccccctggaccccatggcccctcaccgttccccaaccaacaaactcctccctcaatgatgccaggggcagtgccaggcagcgggcacccaggcgtggcggacccaggcacccccctgcctccagaccccacagccccgagcccaggcacggtcacccctgtgccacctccacagtgaggagccagccagacatctctccccctcaccccctgtggacatcacggttccaggaacagcccttcccccaccactgggaccctccccagcctggagagttcatcactacgtaaggaaagctccttccgcccctccaaagccctcaccatgcctaacagaggcatgcatttttatatcagattattcaaggacttctgtttaaaagatgtttataatgtctgggagagaggataggatgggaatgctgccctaaaggaagggctggtgaaaggtgtttatacaaggttctattaaccacttctaagggtacacctccctccaaactactgcattttctatggattaaaaaaaaaaaaaaaaa

SEQ ID NO: 1422 - DNA, 3204 bp, Homo sapiens
acagagctgggtgtgtccctccgagtgccccccgctagggactgtgcaggccggagctaggcagggacagcggggcgaaccgggctgatagagtcggtccctgctcctgtgaggctctcaccgaatccctgctgtttccgggcagctgaagagcgctgggccctcgcgtcgcgggcgtggctgtggccgtgtctcctggtagtctgagcccactgtgcgtgtggatccacgtgggagctgggttccagagcctggtcctgaggaggagccgagccggggcttccccttctcagaatcctgctcttcctccagagagattcccaggagaagagggaacaaccaattcattcctgaaagccaggcctcgggacctgatgacatttgaagatgtggctgtggaattcagccagtgggagtgggggcagctgaaccctgctcagaaggacctctacagggaggtgatgctggagaacttcaggaacttggccattctgggccttctagtatccaaaccatatgtgatctgccagttggaggaagggggtgagcccttcatggtggagagagaaatctcaacaggagcccactcagactggaagagaaggtctaaatccaaggaatcaatgccaagttggggaatttccaaagaagaattattccaggtagtatcagtggaaaaacacattcaagatgtgctgcagttctcgaagttgaaagcagcctgcggttgtgatggccagttagagatgcagcagataaaacaggagagacacctgaaacaaatgtcaaccattcacaaatctgccaccacccttagcagagattataaatggaatggatttgggagaagcttaggtttaagatcagtccttgttaaccaacacagcattctcatgggagaaggatcttataaatgtgatacagaattcaggcagactttagggggaaacaactctcagagaacccacccagaaaagaaatcttgtaaatgtaatgagtgtgggaagtcctttcacttccagtcagaacttaggcgccatcagcgatgtcacactggagaaaagccgtatgaatgcagtgactgtggaagagcctttggtcatatttcatcccttattaaacatcaaagaactcatactggagaaaagccctatgaatgcagtgaatgtgggagagccttcagccagagttcgtctcttgttctgcactatagatttcacactggagagaaaccctacaaatgtaatgaatgtggacgagcctttggtcacacttcatcccttattaagcatcagaggactcatactggagaaaagccctatgaatgccgggaatgtgggagaaccttcagccagagctcatcactcattgtgcattacagatttcatactggagagaaaccttacaaatgtaataaatgtgggagagccttcagccagagttcatctctcactcaacattacagatttcacactggagagaaaccctacaaatgtaatgagtgtggaagggcctttgctcatactgcatcccttattaaacatcagagaagtcatgctggaaaaaaaaccctataaattcagtgaatatagaagggctttcagctggagtgcagacatcactggaacttaaagaattcatatcagagagagatcctaaaggtgtaatgtatgtgggaagaccacatcttgttccacatcaggcaataattactaaagagaatccctgtcaatgtcaagagggggtgggcttcccctctcttaccaaacatgggagaatccatactagtgagaaaccacgtgaatgtaatgaatgtgggaacgctttgatcagaggatgcatattattcagcatcagacagccgacactggggaggagccttatcaatgcagtgagtgtggcaagccttcagttacatactgattctttaagaaaatcagataacttgtactggagagaaatcctacaagtgtggtaagtatggaaaaatcttcagttgtatctcttcctttactaagcatcaagaacacatactagagagaggccctatgaaagcaggaaatagaggaaggccttcagtcagggctcatcccttattaagcatcagaaaattcatacctgagaaaaacctgtgaatgtgggtaatgtgggagagccttcagccaaacctcattgctttataaaccccttagaactctccctactagctggaaactctggtgacgtgatgaatgtgggaagggctttggtggatgttccaccaaaacacgttagagaatttgtacattagagaatttgtgctagagcaactcttcaaatttagtgaaactgggaaaacccattagtagagttcaagcttcagtattcatctcaaagagaaaccttgggaacatgatgaatgtgaggaaagttcctttccaacttgagatgtataaaactagagctgaaaagaagctgagaaatcaccttgtctggtgattttctgcctggtggggccatttgtataacgacacttgtgcattgcctcctcatgctgttactgacggggcagggtgtcatgcatgggtgcagaggatggaggctgagaaaggtagacagctacccatgatctagcccagtcgtattttagagctaataaaactgatgttcagaaagtgacatgccttggcctatagtcctaactgggctgggcctctttcctgtggttcacagctgtagtatggagattaatagacaggatctttgcagtacaacacctctatgcacttctttctctgtagcacatgttacctttctttgtgaggcaatggagtggtctaggattgagcaaaaagcaatttttgttacatctttatgctaatagatttggaatttttgaaatgaaatgaaaccttgtttaaacattaaaattactaaaataggctgggcgcggtggctcacgcctgtaacctcagcactttgggaggccgaggcggacagatcacgaggtcaggagttcgagaccatcctggctaacacagtgaaaccctgtctctcctaaaaatacaaaaaaattagccaggcatggtggcgggcgcctgtagtcccagctacttggaaggctgagacaggagaatggcgtgaatcggggaggcagagcttgcagtcagccgagatcacgccactgcactccagcctgggagacagagtgagactccgtctcag

SEQ ID NO: 1423 - DNA, 4416 bp, Homo sapiens
gaaaaagggtgaaagagaaacttggcgacctcccggaggagttcgcgaagcgaccaggagcgtgttgccatcgtcctcacccggcacccaattccaccacagagtcgggatttcgtcggtgatcgtgatggggtgcttttatttttctctttgattttcaaaaaatgtctatgtgactgtccctatcttaaggggaagttgaaagtgggggcgggggtgctcaatgagaaacgttgccttgtgtgtagttgtttggagcacactgcaaattatattggcatctctttccaaaagtcactttgattcaacttcgatagctttctcgtaaatggcacgtttaggtggtgagaggtggatgaggaaacaggcaccagtgcagctgatttgacctccagtgggatagatacgattagcaccaggatcgtgtctcattttgaacccagatctgaacagaattaagacgaacgagctttcacaattgcagcagatgaagatccattggtaaattgatcaggatttttggcctaccctccaaagaaaaggagcggaaagaatgtcggagcgggccgcggatgacgtcaggggggagccgcgccgcgcggcggcggcggcgggcggagcagcggccgcggccgcccggcagcagcagcagcagcagcagcagcagcagccgccgcctccgcagccccagcggcagcagcacccgccaccgccgccacggcgcacacggccggaggacggcgggcccggcgccgcctccacctcggccgccgcaatggcgacggtcggggagcgcaggcctctgcccagtcctgaagtgatgctgggacagtcgtggaatctgtgggttgaggcttccaaacttcctgggaaggacgggacagaattggacgaaagtttcaaggagtttgggaaaaaccgcgaagtcatggggctctgtcgggaagacatgccaatatttggtttctgtccagcccatgatgatttctacttggtggtgtgtaacgactgtaatcaggttgtcaaaccgcaggcatttcaatcacattatgaaagaagacatagctcatccagcaagccgcctttggccgttcctcccacttcagtattttccttcttcccttctctgtccaaaagcaaaggaggcagtgcaagtggaagcaaccgttcttccagtggaggtgttcttagcgcatcctcatcaagttccaagttgttgaaatcacccaaagagaaactgcagctcagggggaacaccaggccaatgcatcccattcagcaaagtagagttccccatggtagaatcatgacaccctctgtgaaagtggaaaagattcatccgaaaatggatggcacactactgaaatctgcggtggggccaacctgtcctgctactgtgagttccttagtcaagcctggccttaactgcccctcaataccaaagccaaccttgccttcacctggacagattctgaatggcaaagggcttcctgcaccgcccactctggaaaagaaacctgaagacaattccaataataggaaatttttaaataagagattatcagaaagagagtttgatcctgacatccactgtggggttattgatctcgacaccaagaagccctgcacccggtctttgacatgcaagacacattccttaacccagcgcagggctgtccagggtagaagaaaacgatttgatgtgttattagccgagcacaaaaacaaaaccagggaaaaggaattgattcgccatccggactctcagcaaccaccgcagcctctcagggacccgcatcccgcccctcctagaacgtcacaggagccgcaccaaaaccctcacggagtgattccttccgaatcaaagccttttgtagctagtaaacctaaacctcacacccccagtcttccaaggcctccaggctgccctgctcagcaaggtgggagtgcccccattgaccctcctccagtccatgaatctccacaccctcccctgcctgccactgagccagcttctcggttatccagtgaggagggcgaaggcgatgacaaagaagagtctgttgaaaaactggactgtcattattcaggtcatcatcctcagccagcatctttttgcacatttgggagccggcagataggaagaggctattacgtgtttgactccaggtggaatcgacttcgctgcgccctcaacctcatggtggagaagcatctgaatgcacagctatggaagaaaatcccaccagtgcccagtaccacctcacccatctccacacgtattcctcaccggacaaactctgtgccgacatcacaatgtggagtcagctatctggcagcagccaccgtctctacatccccagtcctgctctcatctacctgcatctccccaaatagcaaatcggtaccagctcatggaaccacactaaatgcacagcctgctgcttcaggggcgatggatcctgtgtgcagtatgcaatccagacaagtgtcctcttcatcctcatccccttccacgccctctggcctttcctcggttccttcctcccccatgtccaggaaacctcagaaattgaaatccagcaaatctttgaggcccaaggagtcttctggtaacagcactaactgtcaaaatgccagtagcagtaccagtggcggctcaggaaagaaacgcaaaaacagttccccactgttggttcactcttcctcctcctcttcctcctcctcctcttcttctcattccatggagtcttttaggaaaaactgtgtggctcactctgggcctccctacccctcaacggtaacatcttcccatagcatcggcctcaactgtgtgacgaataaagcaaatgcggtgaacgtccggcatgaccagtcagggaggggcccccccaccgggagccctgctgaatccatcaagaggatgagtgtgatggtgaacagcagtgattctactctttctcttgggccattcattcaccagtccaatgaactgcctgtcaactcccacggcagtttttcccactcacacactcctctagacaaactcataggaaagaaaagaaagtgctcacccagctcgagcagcatcaacaacagcagcagcaaacccacaaaggttgccaaagtgccagccgtgaacaatgtccacatgaaacacacaggcaccatcccaggggcacaaggactgatgaacagttccctccttcatcagccaaaggcacgtccctgacagctgaaaatagcacggggaggaataatgcggacacttttgaggacaagttacacctccactcagcactctggactccacgatgcctttgagtctgttttcccaacctcctgtgggcctcaagggtagaaacctgccgggctgttgttttaacgaggatttccctgaagctatgtctctagcagtgagtactcataaaggacactggatcaagttcagccaccgaattgcttttatcagtgttaaagtggtctgaactgcttgctaccaatctgtgagaagtttttgtttttgttttgttttttaacttgcagtatatcacagagccactcttcaagtagattggctgggcaaaagaatgttttggcaagagcgttactgtagacctttctccctccttccttttactaccatttttttttaacactgtcatctgtaggtcactctccagcagttaggcaccttaactggagaccagaaaccttccagagaacacagggctgcatcccgagcaaccctctgaagaagggaattaggctttagattttgatagcaatgttccaggaatgaaatatagatgttagcccaagacaccatgacaaaatagcccagccttttgagagtaatttgggaaaagaagctgtcagaagtttctaacttacaaactggtttgaaatttttgatgcccagacagcaagtataaatcattttggaggcttacttttcatgatacaaaagcaattctgtgtgatttttttttttaagaagaaagaaaatgcaagctagttttgagaaaggaaggccaaattgggtcgggggagggtgggagtgaggaagttaaaatcactatagggagaaaaaacttttttcaagatttccaaagagatgaaattttcttaatccttttaagttttcatagtaaacagtatggcagattgggttggttgtcctacctggtctatttttaaaagtcaccttttaaagtgacattattagatacacttaaatgtttccaaggcactctctacattacccttgtttttctctttggatactgtcctgggactaagtgtagatttctgcttcaagcacttctggcattgtgtgtttttgtatgcactccccttcatgccacttcagatgtttatttggatgtggttggggacgagagcagacaccaagga

SEQ ID NO: 1424 - DNA, 3077 bp, Homo sapiens
gggggtccgttccccaacttcctcggcgctccggactcccaagtctccgccggaccctcctttggatattcctcgtgtctccgattctgagacagagggggaagacggtggggcctccccacctgccccgcagaagatgcagttctttggccgcctggtcaataccttcagtggcgtcaccaacttgttctctaacccattccgggtgaaggaggtggctgtggccgactacacctcgagtgaccgagttcgggaggaagggcagctgattctgttccagaacactcccaaccgcacctgggactgcgtcctggtcaaccccaggaactcacagagtggattccgactcttccagctggagttggaggctgacgccctagtgaatttccatcagtattcttcccagctgctacccttctatgagagctcccctcaggtcctgcacactgaggtcctgcagcacctgaccgacctcatccgtaaccaccccagctggtcagtggcccacctggctgtggagctagggatccgcgagtgcttccatcacagccgtatcatcagctgtgccaattgcgcggagaacgaggagggctgcacacccctgcacctggcctgccgcaagggtgatggggagatcctggtggagctggtgcagtactgccacactcagatggatgtcaccgactacaagggagagaccgtcttccattatgctgtccagggtgacaattctcaggtgctgcagctccttggaaggaacgcagtggctggcctgaaccaggtgaataaccaagggctgaccccgctgcacctggcctgccagctggggaagcaggagatggtccgcgtgctgctgctgtgcaatgctcggtgcaacatcatgggccccaacggctaccccatccactcggccatgaagttctctcagaaggggtgtgcggagatgatcatcagcatggacagcagccagatccacagcaaagacccccgttacggagccagccccctccactgggccaagaacgcagagatggcccgcatgctgctgaaacggggctgcaacgtgaacagcaccagctccgcggggaacacggccctgcacgtggcggtgatgcgcaaccgcttcgactgtgccatagtgctgctgacccacggggccaacgcggatgcccgcggagagcacggcaacaccccgctgcacctggccatgtcgaaagacaacgtggagatgatcaaggccctcatcgtgttcggagcagaagtggacaccccgaatgactttggggagactcctacattcctagcctccaaaatcggcagacaactacaggatctcatgcacatctcacgggcccggaagccagcgttcatcctgggctccatgagggacgagaagcggacccacgaccacctgctgtgcctggatggaggaggagtgaaaggcctcatcatcatccagctcctcatcgccatcgagaaggcctcgggtgtggccaccaaggacctgtttgactgggtggcgggcaccagcactggaggcatcctggccctggccattctgcacagtaagtccatggcctacatgcgcggcatgtactttcgcatgaaggatgaggtgttccggggctccaggccctacgagtcggggcccctggaggagttcctgaagcgggagtttggggagcacaccaagatgacggacgtcaggaaacccaaggtgatgctgacagggacactgtctgaccggcagccggctgaactccacctcttccggaactacgatgctccagaaactgtccgggagcctcgtttcaaccagaacgttaacctcaggcctccagctcagccctcagaccagctggtgtggcgggcggcccgaagcagcggggcagctcctacttacttccgacccaatgggcgcttcctggacggtgggctgctggccaacaaccccacgctggatgccatgaccgagatccatgagtacaatcaggacctgatccgcaagggtcaggccaacaaggtgaagaaactctccatcgttgtctccctggggacagggaggtccccacaagtgcctgtgacctgtgtggatgtcttccgtcccagcaacccctgggagctggccaagactgtttttggggccaaggaactgggcaagatggtggtggactgttgcacggatccagacgggcgggctgtggaccgggcacgggcctggtgcgagatggtcggcatccagtacttcagattgaacccccagctggggacggacatcatgctggatgaggtcagtgacacagtgctggtcaacgccctctgggagaccgaggtctacatctatgagcaccgcgaggagttccagaagctcatccagctgctgctctcaccctgagggtccccagcctctcaccggccccagctgacctcgtccattcagcccctgccaggccaagcccagccactgccctcccgggcagatctgggcccaggcacctctgagtccatagaccaggcctgggagaatgccaagctgcctgcccgaggctggtcctgaaggcctgtctcccactaaccccgccttccagcactttctgtcattccaggctgggaaagtctagagccccctttggcccctttccctgactgtcaaggacaactgactcccccatcagctcaaacattaagggtacccgggcacaaccgtacccctgcccccagccccagcctccctgagggcctgccgggctgcctctgccccagcccccagcaagggcactcccaggcttcctggtgggtgcagcccactccctctgccctctgctccgttccctgggggctgggactaaagaaatgggtgtcccccaccccatcagctgggaaagcccaggccgcaggagtgggatgcccgttggactttgcccctcacactggcccagcccctcacactgccccaccccgagaaccctcagctctcaaaggtcactcctgggagtttcttcttcccaatggaagtggcttaagagccaaaactgaaataaatcatttggattcaagttcaaaaaaaaaaaaaaaaa

SEQ ID NO: 1425 - DNA, 3239 bp, Homo sapiens
gggggtccgttccccaacttcctcggcgctccggactcccaagtctccgccggaccctcctttggatattcctcgtgtctccgattctgagacagagggggaagacggtggggcctccccacctgccccgcagaagatgcagttctttggccgcctggtcaataccttcagtggcgtcaccaacttgttctctaacccattccgggtgaaggaggtggctgtggccgactacacctcgagtgaccgagttcgggaggaagggcagctgattctgttccagaacactcccaaccgcacctgggactgcgtcctggtcaaccccaggaactcacagagtggattccgactcttccagctggagttggaggctgacgccctagtgaatttccatcagtattcttcccagctgctacccttctatgagagctcccctcaggtcctgcacactgaggtcctgcagcacctgaccgacctcatccgtaaccaccccagctggtcagtggcccacctggctgtggagctagggatccgcgagtgcttccatcacagccgtatcatcagctgtgccaattgcgcggagaacgaggagggctgcacacccctgcacctggcctgccgcaagggtgatggggagatcctggtggagctggtgcagtactgccacactcagatggatgtcaccgactacaagggagagaccgtcttccattatgctgtccagggtgacaattctcaggtgctgcagctccttggaaggaacgcagtggctggcctgaaccaggtgaataaccaagggctgaccccgctgcacctggcctgccagctggggaagcaggagatggtccgcgtgctgctgctgtgcaatgctcggtgcaacatcatgggccccaacggctaccccatccactcggccatgaagttctctcagaaggggtgtgcggagatgatcatcagcatggacagcagccagatccacagcaaagacccccgttacggagccagccccctccactgggccaagaacgcagagatggcccgcatgctgctgaaacggggctgcaacgtgaacagcaccagctccgcggggaacacggccctgcacgtggcggtgatgcgcaaccgcttcgactgtgccatagtgctgctgacccacggggccaacgcggatgcccgcggagagcacggcaacaccccgctgcacctggccatgtcgaaagacaacgtggagatgatcaaggccctcatcgtgttcggagcagaagtggacaccccgaatgactttggggagactcctacattcctagcctccaaaatcggcagacttgtcaccaggaaggcgatcttgactctgctgagaaccgtgggggccgaatactgcttcccacccatccacggggtccccgcggagcagggctctgcagcgccacatcatcccttctccctggaaagagctcagcccccaccgatcagcctaaacaacctagaactacaggatctcatgcacatctcacgggcccggaagccagcgttcatcctgggctccatgagggacgagaagcggacccacgaccacctgctgtgcctggatggaggaggagtgaaaggcctcatcatcatccagctcctcatcgccatcgagaaggcctcgggtgtggccaccaaggacctgtttgactgggtggcgggcaccagcactggaggcatcctggccctggccattctgcacagtaagtccatggcctacatgcgcggcatgtactttcgcatgaaggatgaggtgttccggggctccaggccctacgagtcggggcccctggaggagttcctgaagcgggagtttggggagcacaccaagatgacggacgtcaggaaacccaaggtgatgctgacagggacactgtctgaccggcagccggctgaactccacctcttccggaactacgatgctccagaaactgtccgggagcctcgtttcaaccagaacgttaacctcaggcctccagctcagccctcagaccagctggtgtggcgggcggcccgaagcagcggggcagctcctacttacttccgacccaatgggcgcttcctggacggtgggctgctggccaacaaccccacgctggatgccatgaccgagatccatgagtacaatcaggacctgatccgcaagggtcaggccaacaaggtgaagaaactctccatcgttgtctccctggggacagggaggtccccacaagtgcctgtgacctgtgtggatgtcttccgtcccagcaacccctgggagctggccaagactgtttttggggccaaggaactgggcaagatggtggtggactgttgcacggatccagacgggcgggctgtggaccgggcacgggcctggtgcgagatggtcggcatccagtacttcagattgaacccccagctggggacggacatcatgctggatgaggtcagtgacacagtgctggtcaacgccctctgggagaccgaggtctacatctatgagcaccgcgaggagttccagaagctcatccagctgctgctctcaccctgagggtccccagcctctcaccggccccagctgacctcgtccattcagcccctgccaggccaagcccagccactgccctcccgggcagatctgggcccaggcacctctgagtccatagaccaggcctgggagaatgccaagctgcctgcccgaggctggtcctgaaggcctgtctcccactaaccccgccttccagcactttctgtcattccaggctgggaaagtctagagccccctttggcccctttccctgactgtcaaggacaactgactcccccatcagctcaaacattaagggtacccgggcacaaccgtacccctgcccccagccccagcctccctgagggcctgccgggctgcctctgccccagcccccagcaagggcactcccaggcttcctggtgggtgcagcccactccctctgccctctgctccgttccctgggggctgggactaaagaaatgggtgtcccccaccccatcagctgggaaagcccaggccgcaggagtgggatgcccgttggactttgcccctcacactggcccagcccctcacactgccccaccccgagaaccctcagctctcaaaggtcactcctgggagtttcttcttcccaatggaagtggcttaagagccaaaactgaaataaatcatttggattcaagttcaaaaaaaaaaaaaaaaa

SEQ ID NO: 1426 - DNA, 9027 bp, Homo sapiens
gcggcccaggcggggtgcgagtggcgcagtcggagcccgttgcggcccctgaggaagcgaggaggcgtcggcgtcggctgaggcgggcggaccggcgaggcgaggcggcggccccaggcccgagggactcgggagctcgagcagcggcggcggcaagacctctccccctcggaggcggcgggcggaggcggcgggagcggtggtgccccccccgggcacggggccatgtacaacgggatcgggctgccgacgccccggggcagcggcaccaacggctacgtccagcgcaacctgtccctggtgcggggccgccggggtgagcggcctgactacaagggagaggaggaactgcggcgcctggaggctgccctggtgaagcggcctaatcctgacatcctggaccacgagcgcaagcggcgcgtcgagctgcgatgcctcgagctggaggagatgatggaagagcaggggtacgaggaacagcaaattcaggaaaaagtggcgacctttcgactcatgttgctggagaaggatgtgaaccctgggggcaaggaggagaccccagggcagaggccagcggtcacggagactcaccagttggcagaattaaatgagaagaagaatgaaagactccgtgctgcctttggcatcagtgattcttacgtagatggcagctcttttgatcctcagcgtcgtgcccgagaagctaaacaaccagctcctgagcctcccaaaccttacagccttgttcgggagtctagcagttctcgctcaccaaccccaaagcagaagaagaagaaaaagaagaaagatagaggacgcaggtcagagagcagctctcctcgacgggagagaaagaaaagctcaaagaagaagaagcacaggtcagaatctgagtccaagaaacgtaagcataggtctcccactccaaagagcaaacgtaaatctaaggacaaaaagcgaaagcggtctcgaagtacaacaccagcccccaagagccgccgggcccaccgttcaacttctgctgactctgcttcctcctccgatacttcccgcagtcggtctcgaagtgctgcagctaaaactcatacaactgccttggctgggcgaagtccttcccctgcttcagggcgacgcggggagggagatgcgcctttcagtgaaccaggtactaccagcacacaacggcctagtagcccggagactgctacgaaacagcctagcagcccttatgaagacaaagataaagacaagaaggagaaatctgcaactcgacctagcccctctccggaaaggagcagcacaggcccagaaccacctgctcccactccgctccttgctgagcgacatggcggctccccacaaccccttgcaaccacccccttaagccaggagccagtgaaccccccatctgaggcctctccaactcgggaccgttcaccacctaagtctcccgagaaacttccccagtcttcttcctcagagagcagcccaccatcccctcaacctaccaaagtttctcggcatgccagctcttccccagaaagtcctaaacctgctccagctccagggtcccaccgagagatttcttcttctcccacatctaagaatcgctcacatggccgagcaaaacgggataaatcacattctcataccccctcccgtaggatggggaggtcccgtagccctgccaccgctaagagagggcgatctcggtctcgaacccctaccaagagaggtcattctcgatcccgatctccccagtggcgtaggtccaggtctgcacagaggtggggaagatctagaagcccccagcgacgtggccgctctaggtctcctcagcgaccaggctggtctaggagcagaaatacccagagaagaggcaggtctaggtcagcaaggcgagggaggtcccactctagatccccagccactaggggtagatctcgttctagaacaccagcccgccggggcaggtcccgctctagaacacctgccaggcggagatcacgatccagaactcccaccaggcgtaggtctcggtctagaacaccagcccggaggggcaggtctcggtctagaacacctgctaggcgcagatctaggacccgatcaccagtacgacgcaggtctcgtagtagatcaccagccaggagaagtggcaggtcacgctctagaaccccagctagacgtggccgctcacgctccagaaccccagccagacgtggccgctcacgctctagaaccccagctagacgcagtggtcgctcacgctccagaacaccagccaggagagggaggtctcggtctaggacaccaagacgaggaagatcccgcagtagaagcttagttagacgtggaagatctcactctagaacacctcaaagaagaggcagatctggctcatcttcagagcggaaaaacaaatccagaacatctcaaagaagaagcaggtccaattcaagcccagaaatgaagaaatctcgcatttcttcaaggcggagcaggtctctctcttcaccacggtccaaagcaaaatctcgcttgtctttgaggcgcagcctttcagggtcttccccatgccctaagcaaaagtcacagacaccacccaggcgcagtcgctctggatcctcccaacctaaagctaaatctagaacgccacccagacgcagtcgctccagttcttctccgccacctaaacagaaatctaagacaccatcaagacaaagtcattccagttcatctcctcatcctaaagtgaaatctggaacaccaccgaggcaagggtccataacaagtccccaggccaatgagcaatctgtaacgccacagagacggagctgttttgaatcatcacctgaccctgagttgaaatctaggaccccttctagacatagctgctcagggtcctctcctcctagagtgaaatctagcacacctcccagacagagcccatctaggtcatcatctccacaacccaaagtgaaggcaataatatcaccaagacaaagaagccattctggctcctcttctccaagtcctagtagggtgacgtcgagaacaactccacggcgaagcagatcagtatctccctgctccaatgtggaatccagattgttgccaagatacagtcattctgggtcctcctcaccagataccaaagtgaaacctgaaacaccgccaagacaaagtcactcagggtctatttcaccataccccaaagtaaaggcccaaactccaccggggccaagtctttctggatcaaagtcaccatgtccccaagagaagtctaaagactcactagttcaaagttgccctggatccctctctctctgtgcaggagtaaaatctagcacaccaccaggcgagagctattttggtgtctcatctctgcaactgaaaggacaatctcaaacttcaccagaccacagatctgatacttcaagtccagaagtgagacagagtcattcagaatcaccatctctgcagagcaaatctcaaacatcacctaagggaggtcggtccaggtcttcatctccagtcactgagctggcatccagatctccaataagacaagatagaggtgagttctcagcgagtcctatgttgaaatctggaatgtctcctgagcagagcaggttccagtctgactcttcttcatatcctacagtggactcgaattctctcttggggcagagtagattggagactgctgaatcaaaagagaaaatggccttaccccctcaggaggatgctactgcatcacctcctagacagaaagacaaatttagtccctttccagtacaggataggcctgagtcttcactggtattcaaagacacacttagaaccccgccaagagaaagaagtggtgctgggtcatctccagaaacaaaagagcaaaatagtgcattgcctacgtcaagccaagatgaagagttaatggaggtggtagagaagtctgaagaacccgcaggccaaatcctgtctcatttgtcttcagaacttaaagaaatgtccacaagtaactttgaatcatctcctgaagtagaagaaaggcctgctgtgtctttgactcttgatcagagccagtcacaggcttctttggaagcagtagaagtcccttcaatggcctcatcttggggtgggccacatttttctccagaacataaagaactgtctaactccccactcagggagaacagctttggatcacctttagaatttagaaactcaggcccacttggtacagaaatgaatactggattttcttctgaggttaaagaagatttgaatggaccgtttcttaatcagctggaaacagatccatctctagacatgaaagaacaatcgacaagatcctctggacacagcagttctgagttatccccagatgcagtggaaaaggcagggatgtcttcaaatcagagcatctcttcacctgtgcttgatgctgtacccagaacaccctcgagagaaagaagtagttctgcatcttctcctgaaatgaaagatggtttacccagaactccatcaaggagaagcaggtctgggtcttctccaggacttagagatgggtctgggactccctcgaggcacagcctgtctgggtcctctcctggaatgaaagatatacctagaacgccatttagagggagaagcgaatgtgattcttccccagaaccgaaagctttgcctcagactcctaggccgaggagtcgttctccatcatccccagagctcaacaacaagtgtcttaccccccagagagaaagaagcgggtcagaatcatcagttgatcagaaaactgtggctcggactcccctggggcagagaagtcgttcgggatcctctcaagaacttgatgtgaaacccagtgcatcccctcaggaaagaagtgagtcagactcttctccagattctaaagccaagacacgaaccccacttcggcagaggagtcggtctggatcatctccagaggttgacagcaaatctcgactatcccctcggcgcagtaggtctggttcctcccctgaagtgaaagataagccaagagcagcacccagggcacagagtggttctgattcctctcctgaacctaaagctccagcccctcgggcccttcccagacgaagcagatcaggttcatcaagcaaaggcagaggcccttctcctgaaggaagcagcagtaccgagtcctctcctgaacatccgcccaaatccagaactgctcgcagaggttccaggtcatcaccagagcccaagaccaagtctcgtacaccacctcgacgtcgcagctctcgatcatctccggagctaacaaggaaggccagactgtcccgtagaagccgctctgcctcatcctcaccagaaactcgctctagaactcccccaaggcaccggagaagtccctcagtgtcttccccggagccagccgaaaaatcgaggtcttcacgccgacggcgctcagcttcatctccacgcactaagacaacctcaaggagaggccgctctccttcgccaaagcctcgtggactccagaggtcccgttcccgctcaaggagagagaaaacaagaacaacccgacgtcgagataggtctggatcttctcagtcaacctctcggcgaagacagcggagccggtcaaggtcgcgggttactcggcggcggaggggaggctctggttatcactcaaggtcacctgcccggcaggaaagttcccggacctcctctcgacgccgaagaggccgctctcggacacccccaaccagtcggaagcgttctcgctcacgcacatcaccagccccgtggaaacgctctagatctcgagcctctccagccactcaccggcgatccaggtccagaacccccctgataagccgacgtaggtccagatctcgaacttcaccagtcagccggagacggtcaaggtccaggacttcagtgactcgacgaagatcccggtcaagagcatccccagtgagcagaaggcgatccagatccagaacgccaccagtaacccgccgtcgttcaaggtctagaacgccaacaacacgccgccgctcccgttctagaactccaccagtgactcgcagaaggtccagatccaggactccaccagtaaccaggaggcgatctcgaagcagaacttcgcctatcactcgcagaagatcaagatccagaacatctccggtcacccgaaggagatctcgatctcgcacatctccagtaactcgaagaaggtcccgctctcgaacctcaccagtgacacgccgccgctctaggtcccggacacctccagctattcggcgccgctctagatctcgaacgccactgttaccacgcaaacgttctcgaagtcgctcaccacttgctatccgccgccgctccagatcccgtactccacgaacagctcggggtaaacggtccttaacaagatctcctccagccatccgcaggcgttctgcatctggaagtagttctgatcgttcacgatctgctactcctccagcaacaagaaatcattctggttcacggacacctccagtagcactcaacagttccagaatgagctgcttcagtcgtcctagcatgtccccaacacctcttgatcgctgcagatcacctggaatgcttgaaccccttggcagctctagaacacccatgtctgtcctgcagcaagccggcggctccatgatggatggtccaggtccccgaatacctgaccaccagagaacatctgtgccagaaaatcatgctcagtccaggattgcacttgccctgacagctatcagtcttggcaccgctcggcctcctccgtccatgtctgctgctggccttgctgcaagaatgtcccaggttccagccccggtgcctctcatgagtctcagaaccgcaccagcagccaaccttgccagcaggattcctgcagcctctgcggcagccatgaacctagccagcgccaggacacctgccattccaacagcagtgaacctggctgactctcgaacgccagctgcagcagcggccatgaacttggccagccccagaacagcggtggcaccttcggctgtgaacctggctgaccctcgcactcccacagccccagctgtgaacctagcaggggccagaaccccagctgccttggcagctctgagtctcacaggctctggcacaccaccaactgctgcaaactatccctccagctccagaacaccacaggctccagcctctgcaaacctggtgggtcctcggtctgcacatgccacagctcctgtgaatattgccggctccagaaccgccgcagccttggcccccgcgagcctcaccagtgctaggatggctccagcattgtctggtgcaaacctcaccagccccagggtgcccctttctgcctacgagcgtgtcagtggcagaacctcaccaccgctccttgaccgagctaggtccagaacaccaccgtctgccccaagccaatctaggatgacctctgaacgggctccctccccttcctctagaatgggccaggctccttcacagtctcttctccctccagcacaggatcagccgaggtctcctgtgccttctgctttttcagaccaatcccgttgtttgattgcccagaccacccctgtagcagggtctcagtccctttcctctggggcagtggcaacgaccacgtcctctgctggtgatcacaatggcatgctctctgtccctgcccctggggtgccccactctgatgtgggggagccacctgcctctactggggcccagcagccttctgcattagccgccctgcagccagcaaaggagcggcggagttcctcctcgtcgtcgtcgtcctctagctcctcctcctcttcatcatcgtcgtcgtcgtcctcctcctcctctggctccagttctagtgactcagagggctctagccttcctgtgcaacctgaggtggcactgaagagggtccccagccccaccccagccccaaaggaggctgttcgagagggacgtcctccggagccaaccccagccaaacggaagaggcgctctagcagttccagttccagctcctcctcttcatcttcctcctcctcctcctcctcctcttcttcctcctcctcttcctcttcttcttcttcctcctcatcttcctcctcctcgtcgtcttcctccccttcccctgctaagcctggccctcaggccttgcccaaacctgcaagccccaagaagccaccccctggcgagcggaggtcccgcagcccccggaagccaatagactccctcagggactctcggtccctcagctactcgcctgtggagcgtcgccgtccctcgccccagccctcaccacgggaccagcagagcagcagcagtgagcggggttcccggagaggccagcgtggggacagccgctcccccagccacaagcgcaggagggagacacctagccctcggcccatgagacaccgctcctccaggtctccataaattgtctttgggggattccaccacacccaatgctctggagccacaaggagtgtcccttcttccccagcagagccgtgggagggtccttgtctgctctcctttgaaccttggcagcccttggatggagggctccctttccctccccttttttttttctttgttcctgtgaaatgttaatctccgtgagttcttcctggttcatgtgttctggggggtttggggtgggagggaatgcagatgggagttgggggaggggaggatacagttcaggataccccagcctggagtcagggccagggaggcatggccccacttgtatccagaagttcccaggggtgattgtgatggtggttgggactggaggttgtataaggtgttcttggaaggaaggggcaggagttggaattagttggtccctactgtcccccatgaggttgtgaacccctccccccaacttttcatgtttcttaaaggcattttggttttttaaaatctgtacagcaagagcaactttttctgtcaaataaaaatgagaaatgcagg

SEQ ID NO: 1427 - DNA, 13493 bp, Homo sapiens
gcggcggcggcagcggcgtcggctcggggttctccgggagagggggagtgcgcggcggccgcagctgccacaaaccaggtgaagctttgttctaagaatatttgtttcatctagtttatgagtccaaatgatatagactgtaaatgtcacagcagtggtgaaagactgctcggtcatgagcaccgacagtaactcactggcacgtgaatttctgaccgatgtcaaccggctttgcaatgcagtggtccagagggtggaggccagggaggaagaagaggaggagacgcacatggcaacccttggacagtaccttgtccatggtcgaggatttctattacttaccaagctaaattctataattgatcaggcattgacatgtagagaagaactcctgactcttcttctgtctctccttccactggtatggaagatacctgtccaagaagaaaaggcaacagattttaacctaccgctctcagcagatataatcctgaccaaagaaaagaactcaagttcacaaagatccactcaggaaaaattacatttagaaggaagtgccctgtctagtcaggtttctgcaaaagtaaatgtttttcgaaaaagcagacgacagcgtaaaattacccatcgctattctgtaagagatgcaagaaagacacagctctccacctcagattcagaagccaattcagatgaaaaaggcatagcaatgaataagcatagaaggccccatctgctgcatcattttttaacatcgtttcctaaacaagaccaccccaaagctaaacttgaccgcttagcaaccaaagaacagactcctccagatgctatggctttggaaaattccagagagattattccaagacaggggtcaaacactgacattttaagtgagccagctgccttgtctgttatcagtaacatgaacaattctccatttgacttatgtcatgttttgttatctttattagaaaaagtttgtaagtttgacgttaccttgaatcataattctcctttagcagccagtgtagtgcccacactaactgaattcctagcaggctttggggactgctgcagtctgagcgacaacttggagagtcgagtagtttctgcaggttggaccgaagaaccggtggctttgattcaaaggatgctctttcgaacagtgttgcatcttctgtcagtagatgttagtactgcagagatgatgccagaaaatcttaggaaaaatttaactgaattgcttagagcagctttaaaaattagaatatgcctagaaaagcagcctgacccttttgcaccaagacaaaagaaaacactgcaggaggttcaggaagattttgtgttttcaaagtatcgtcatagagcccttcttttacctgagcttttggaaggagttcttcagattctgatctgttgtcttcaaagtgcagcttcaaatcccttctacttcagtcaagccatggatttggttcaagaattcattcagcatcatggatttaatttatttgaaacagcagttcttcaaatggaatggctggttttaagagatggagttcctcccgaggcctcagagcatttgaaagccctaataaatagtgtgatgaaaataatgagcactgtcaaaaaagtgaaatcagagcaacttcatcattcgatgtgtacaagaaaaaggcacagacgatgtgaatattctcattttatgcatcatcaccgagatctctcaggtcttctggtttcggcttttaaaaaccaggtttccaaaaacccatttgaagagactgcagatggagatgtttattatcctgagcggtgctgttgcattgcagtgtgtgcccatcagtgcttgcgcttactacagcaggcttccttgagcagcacttgtgtccagatcctatcgggtgttcataacattggaatatgctgttgtatggatcccaaatctgtaatcattcctttgctccatgcttttaaattgccagcactgaaaaattttcagcagcatatattgaatatccttaacaaacttattttggatcagttaggaggagcagagatatcaccaaaaattaaaaaagcagcttgtaatatttgtactgttgactctgaccaactagcccaattagaagagacactgcagggaaacttatgtgatgctgaactctcctcaagtttatccagtccttcttacagatttcaagggatcctgcccagcagtggatctgaagatttgttgtggaaatgggatgctttaaaggcttatcagaactttgtttttgaagaagacagattacatagtatacagattgcaaatcacatttgcaatttaatccagaaaggcaatatagttgttcagtggaaattatataattacatatttaatcctgtgctccaaagaggagttgaattagcacatcattgtcaacacctaagcgttacttcagctcaaagtcatgtatgtagccatcataaccagtgcttgcctcaggacgtgcttcagatttatgtaaaaactctgcctatcctgcttaaatccagggtaataagagatttgtttttgagttgtaatggagtaagtcaaataatcgaattaaattgcttaaatggtattcgaagtcattctctaaaagcatttgaaactctgataatcagcctaggggagcaacagaaagatgcctcagttccagatattgatgggatagacattgaacagaaggagttgtcctctgtacatgtgggtacttcttttcatcatcagcaagcttattcagattctcctcagagtctcagcaaattttatgctggcctcaaagaagcttatccaaagagacggaagactgttaaccaagatgttcatatcaacacaataaacctattcctctgtgtggcttttttatgcgtaagtaaagaagcagagtctgacagggagtcggccaatgactcagaagatacttctggctatgacagcacagccagcgagcctttaagtcatatgctgccatgtatatctctcgagagccttgtcttgccttctcctgaacatatgcaccaagcagcagacatttggtctatgtgtcgttggatctacatgttgagttcagtgttccagaaacagttttataggcttggtggtttccgagtatgccataagttaatatttatgataatacagaaactgttcagaagtcacaaagaggagcaaggaaaaaaggagggagatacaagtgtaaatgaaaaccaggatttaaacagaatttctcaacctaagagaactatgaaggaagatttattatctttggctataaaaagtgaccccataccatcagaactaggtagtctaaaaaagagtgctgacagtttaggtaaattagagttacagcatatttcttccataaatgtggaagaagtttcagctactgaagccgctcccgaggaagcaaagctatttacaagtcaagaaagtgagacctcacttcaaagtatacgacttttggaagcccttctggccatttgtcttcatggtgccagaactagtcaacagaagatggaattggagttacctaatcagaacttgtctgtggaaagtatattatttgaaatgagggaccatctttcccagtcaaaggtgattgaaacacaactagcaaagcctttatttgatgccctgcttcgagttgccctcgggaattattcagcagattttgaacataatgatgctatgactgagaagagtcatcaatctgcagaagaattgtcatcccagcctggtgatttttcagaagaagctgaggattctcagtgttgtagttttaaacttttagttgaagaagaaggttacgaagcagatagtgaaagcaatcctgaagatggcgaaacccaggatgatggggtagacttaaagtctgaaacagaaggtttcagtgcatcaagcagtccaaatgacttactcgaaaacctcactcaaggggaaataatttatcctgagatttgtatgctggaattaaatttgctttctgctagtaaagccaaacttgatgtgcttgcccatgtatttgagagttttttgaaaattattaggcagaaagaaaagaatgtttttctgctcatgcaacagggaactgtgaaaaatcttttaggagggttcttgagtattttaacacaggatgattctgattttcaagcatgccagagagtattggtggatcttttggtatctttgatgagttcaagaacatgttcagaagagctaacccttcttttgagaatatttctggagaaatctccttgtacaaaaattcttcttctgggtattctgaaaattattgaaagtgatactactatgagcccttcacagtatctaaccttccctttactgcacgctccaaatttaagcaacggtgtttcatcacaaaagtatcctgggattttaaacagtaaggccatgggtttattgagaagagcacgagtttcacggagcaagaaagaggctgatagagagagttttccccatcggctgctttcatcttggcacatagccccagtccacctgccgttgctggggcaaaactgctggccacacctatcagaaggtttcagtgtttccctgtggtttaatgtggagtgtatccatgaagctgagagtactacagaaaaaggaaagaagataaagaaaagaaacaaatcattaattttaccagatagcagttttgatggtacagagagcgacagaccagaaggtgcagagtacataaatcctggtgaaagactcatagaagaaggatgtattcatataatttcactgggatccaaagcgttgatgatccaagtgtgggctgatccccacaatgccactcttatctttcgtgtgtgcatggattcaaatgatgacatgaaagctgttttactagcacaggttgaatcacaggagaatattttcctcccaagcaaatggcaacatttagtactcacctacttacagcagccccaagggaaaaggaggattcatgggaaaatctccatatgggtctctggacagaggaagcctgatgttactttggattttatgcttccaagaaaaacaagtttgtcatctgatagcaataaaacattttgcatgattggccattgtttatcatcccaagaagagtttttgcagttggctggaaaatgggacctgggaaatttgcttctcttcaacggagctaaggttggttcacaagaggccttttatctgtatgcttgtggacccaaccatacatctgtaatgccatgtaagtatggcaagccagtcaatgactactccaaatatattaataaagaaattttgcgatgtgaacaaatcagagaactttttatgaccaagaaagatgtggatattggtctcttaattgaaagtctttcagttgtttatacaacttactgtcctgctcagtataccatctatgaaccagtgattagacttaaaggtcaaatgaaaacccaactctctcaaagacccttcagctcaaaagaagttcagagcatcttattagaacctcatcatctaaagaatctccaacctactgaatataaaactattcaaggcattctgcacgaaattggtggaactggcatatttgtttttctctttgccagggttgttgaactcagtagctgtgaagaaactcaagcattagcactgcgagttatactctcattaattaaatacaaccaacaaagagtacatgaattagaaaattgtaatggactttctatgattcatcaggtgttgatcaaacaaaaatgcattgttgggttttacattttgaagacccttcttgaaggatgctgtggtgaagatattatttatatgaatgagaatggagagtttaagttggatgtagactctaatgctataatccaagatgttaagctgttagaggaactattgcttgactggaagatatggagtaaagcagagcaaggtgtttgggaaactttgctagcagctctagaagtcctcatcagagcagatcaccaccagcagatgtttaatattaagcagttattgaaagctcaagtggttcatcactttctactgacttgtcaggttttgcaggaatacaaagaggggcaactcacacccatgccccgagaggtttgtagatcatttgtgaaaattatagcagaagtccttggatctcctccagatttggaattattgacaattatcttcaatttccttttagcagttcaccctcctactaatacttacgtttgtcacaatcccacgaacttctacttttctttgcacatagatggcaagatctttcaggagaaagtgcggtcaatcatgtacctgaggcattccagcagtggaggaaggtcccttatgagccctggatttatggtaataagcccatctggttttactgcttcaccatatgaaggagagaattcctctaatattattccacaacagatggccgcccatatgctgcgttctagaagcctaccagcattccctacttcttcactactaacgcaatcacaaaaactgactggaagtttgggttgtagtatcgacaggttacaaaatattgcagatacttatgttgccacccaatcaaagaaacaaaattctttggggagttccgacacactgaaaaaaggcaaagaggacgcattcatcagtagctgtgagtctgcaaaaactgtttgtgaaatggaagctgtcctctcagcccaggtctctgtcagtgatgtcccaaagggagtgctgggatttccagtggtcaaagcagatcataaacagttgggagcagaacccaggtcagaagatgacagtcctggggatgagtcctgcccacgccgacctgattacctaaagggattggcctccttccagcgaagccacagcactattgcaagccttgggctagcttttccttcacagaacggatctgcagctgttggccgttggccaagtcttgttgatagaaacactgatgattgggaaaactttgcctattctcttggttatgagccaaattacaaccgaactgcaagtgctcacagtgtaactgaagactgtttggtacctatatgctgtggattatatgaactcctaagtggggttcttcttatcctgcctgatgttttgcttgaagatgtgatggacaagcttattcaagcagatacacttttggtcctcgttaaccacccatcaccagctatacaacaaggtgttattaaactattagatgcatattttgctagagcatctaaggaacaaaaagataaatttctgaagaatcgtggattttccttgctagccaaccagttgtatcttcatcgaggaactcaagaattgttagaatgcttcatcgaaatgttctttggtcgacatattggccttgatgaagaatttgatctggaagatgtgagaaacatgggattgtttcagaagtggtctgtcattcctattctgggactaatagagacctctctatatgacaacatactcttgcataatgctcttttacttcttctccaaattttaaattcttgttctaaggtagcagatatgttgctggataatggtctactctatgtgttatgtaatacagtagcagccctgaatggattagaaaagaacattcccatgagtgaatataaattgcttgcttgtgatatacagcaacttttcatagcagttacaattcatgcttgcagttcctcaggctcacaatattttagggttattgaagaccttattgtaatgcttggatatcttcaaaatagcaaaaacaagaggacacaaaatatggctgttgcactacagcttagagttctccaggctgctatggaatttataaggaccaccgcaaatcatgactctgaaaacctcacagattcactccagtcaccttctgctccccatcatgcagtagttcaaaagcggaaaagcattgctggtcctcgaaaatttccccttgctcaaactgaatcgcttctgatgaaaatgcgttcagtggcaaatgatgagcttcatgtgatgatgcaacggagaatgagccaagagaaccctagccaagcaactgaaacggaacttgcgcagagactacagaggctcactgttttagcagtcaacaggattatttatcaagaatttaattcagacattattgacattttgagaactccagaaaatgtaactcaaagcaagacctcagttttccagaccgaaatttctgaggaaaatattcatcatgaacagtcttctgttttcaatccatttcagaaagaaatttttacatatctggtagaaggattcaaagtatctattggttcaagtaaagccagtggttccaagcagcaatggactaaaattctgtggtcttgtaaggagaccttccgaatgcagcttgggagactactagtgcatattttgtcgccagcccacgctgcacaagagagaaagcaaatttttgaaatagttcatgaaccaaatcatcaggaaatactacgagactgtctcagcccatccctacaacatggagccaagttagttttgtatttgtcagagttgatacataatcaccaaggtgaattgactgaagaagagctaggcacagcagaactgcttatgaatgctttgaagttatgtggtcacaagtgcatccctcccagtgcatcaacaaaagcagaccttattaaaatgatcaaagaggaacaaaagaaatatgaaactgaagaaggagtgaataaagctgcttggcagaaaacagttaacaataatcaacaaagtctctttcagcgtctggattcaaaatcaaaggatatatctaaaatagctgcagatatcacccaggcagtgtctctctcccaaggaaatgagagaaaaaaggtgatccagcatattagaggaatgtataaagtagatttgagtgccagcagacattggcaggaacttattcagcagctgacacatgatagagcagtatggtatgaccccatctactatccaacctcatggcagttggatccaacagaagggccaaatcgagagaggagacgtttacagagatgttatttaactattccaaataagtatctccttagggatagacagaaatcagaagatgttgtcaaaccaccactctcttacctgtttgaagacaaaactcattcttctttctcttctactgtcaaagacaaagctgcaagtgaatctataagagtgaatcgaagatgcatcagtgttgcaccatctagagagacagctggtgaattgttactaggtaaatgtggaatgtattttgtggaagataatgcttctgatacagttgaaagttcgagccttcagggagagttggaaccagcatcattttcctggacatatgaagaaattaaagaagttcacaagcgttggtggcaattgagagataatgctgtagaaatctttctaacaaatggcagaacactcctgttggcatttgataacaccaaggttcgtgatgatgtataccacaatatactcacaaataacctccctaatcttctggaatatggtaacatcaccgctctgacaaatttatggtatactgggcaaattactaattttgaatatttgactcacttaaacaaacatgctggccgatccttcaatgatctcatgcagtatcctgtgttcccatttatacttgctgactacgttagtgagacacttgacctcaatgatctgttgatatacagaaatctctctaaacctatagctgttcagtataaagaaaaagaagatcgttatgtggacacatacaagtacttggaggaagagtaccgcaaaggagccagagaagatgaccccatgcctcccgtgcagccctatcactatggctcccactattccaatagcggcactgtgcttcacttcctggtcaggatgcctcctttcactaaaatgtttttagcctatcaagatcaaagttttgacattccagacagaacttttcattctacaaatacaacttggcgactctcatcttttgaatctatgactgatgtgaaagaacttatcccagagtttttctatcttccagagttcctagttaaccgtgaaggttttgattttggtgtgcgtcagaatggtgaacgggttaatcacgtcaaccttcccccttgggcgcgtaatgatcctcgtctttttatcctcatccatcggcaggctctagagtctgactacgtgtcgcagaacatctgtcagtggattgacttggtgtttgggtataagcaaaaggggaaggcttctgttcaagcgatcaatgtttttcatcctgctacatattttggaatggatgtctctgcagttgaagatccagttcagagacgagcgctagaaaccatgataaaaacctacgggcagactccccgtcagctgttccacatggcccatgtgagcagacctggagccaagctcaatattgaaggagagcttccagctgctgtggggttgctagtgcagtttgctttcagggagacccgagaacaggtcaaagaaatcacctatccgagtcctttgtcatggataaaaggcttgaaatggggggaatacgtgggttcccccagtgctccagtacctgtggtctgcttcagccagccccacggagaaagatttggctctctccaggctctgcccaccagagcaatctgtggtttgtcacggaatttctgtcttctgatgacatatagcaaggaacaaggtgtgagaagcatgaacagtacggacattcagtggtcagccatcctgagctggggatatgctgataatattttaaggttgaagagtaaacaaagtgagcctccagtaaactttattcaaagttcacaacagtaccaggtgactagttgtgcttgggtgcctgacagttgccagctgtttactggaagcaaatgcggtgtcatcacagcctacacaaacagatttacaagcagcacgccatcagaaatagaaatggagactcaaatacatctctatggtcacacagaagagataaccagcttatttgtttgcaaaccatacagtatactgataagtgtgagcagagacggaacctgcatcatatgggatttaaacaggttatgctatgtacaaagtctggcgggacacaaaagccctgtcacagctgtctctgccagtgaaacctcaggtgatattgctactgtgtgtgattcagctggcggaggcagtgacctcagactctggacggtgaacggggatctcgttggacatgtccactgcagggagatcatctgttccgtggctttctccaaccagcctgagggagtatctatcaatgtaatcgctgggggattagaaaatggaattgtaaggttatggagcacatgggacttaaagcctgtgagagaaattacatttcccaaatcaaataagcccatcatcagccttacattttcttgtgatggccaccatttgtacacagcaaacagtgatgggaccgtgattgcctggtgtcggaaggaccagcagcgcttgaaacagccaatgttctattccttccttagcagctatgcagccgggtgaatgcgaatgaacttcacgttctccaaagcactttaactccaaactagatttgttgacttcaccagttttaggaggttgaacctaaagaaatggatgactggacaaaccatccaaataatgataaagtctattcatctgcacaaaattctgaagagtcacatgatcctaagaggaaagttctgttctattttagtgataatctggaagattgtgtcaatatgcactagccaacaagttttaagcctcgcatggtacattaaaatgatattcttaaaattttttcccaccaaggtattccaaagaaaatattaaggtctcccctttttctatgattccaaaaggaccagtagaatttaaattggttggttgattgtttatataaaacacactaaaattatattttaaaagtttactgccatgaaatactcctcccaccacacacacatgctccaaaagaggaaagaaaaaaagataatttttaggacttgataattgctttctttgagaagcaaattattcagtaggtgcctctgtaccaaatattttatggaatatctaaatactaaaataaactatgaatgaatctcaaaattaggcagtttttgccagttgctttcttagctcaaaggagaaccagaatttttttgacagccacaaacaagaatacaggtatcttggatttcagacacattctgtttcttcataaaaattttacttaaaatctgtaacgctagatattgactatccttagttgagtcactgaggtttaaacacaatggtaagtcttaaagtctgctatttacagagcattgaatctgtaccaatttgcaatagaaagccttcagtatgcaagaagtttgcatgggtattaagaacacagcctaaataaggcatttgatctaatctgcaggaagaattttcttccccaaaacagaattataaaagcttactttaaacaggaggcagaataattcttttaggaaaccatttcattctgtttctactaacctataccatctgagaattctaggaagaataataaaatctcgtgtattccacagcaaacttacataccataaagacagaattcctaaacatcttggagccgtctgtctctcccatatgatggctgtctgtatatttttacttggggtgctgctttattggctttgaaaacactgtcagataagctcagtaatatgttaccatgggataaaaatatgtatccctgcctaagaataacttgtgcatttgttatggaaatttaattcatatggtgtttacagtactacttttgtaacttccagactttctaaaacattctgcttaaaaaccatataaaatataattccaaagtctctgctgtcaagatagattcgagagaaagcacgtggccatgtatgctttaaccttaaactgcatacacatgtagtgatacctaggctgcatttagatcaccgtgtgctcaggccaggtgtgaatcctgaggtccatggaggtgcagagatgagattactcctattcacgttgaagtgatttgctttgttaacaaaaaattgcagctattgtctagctttcatttttttactgagaactttaaattagtcccctattagaatagggttgctactcatctttttttaaaaaccgaatttcatcatttatctaaagagaaaatatgcagaataactggtcttgttaagagtgcaatattatatttttatgtaaaaataaaaattaatttggggggattatttattcagcatgaaacctaatatgtatatgtttgaaatacttcataatgtgcatgttgtagcaaacatttctgtaaattatcacaagctctgttacctttatatacactgcctcttcaatttggaaataaatttcataaaaaaaaaaaaaaaaaaaa

SEQ ID NO: 1428 - DNA, 7069 bp, Homo sapiens
cgcaagggcttctaagaagccatcccaatgaccttttggctttgagaagagcagtcctcataccagagtgtttggggttttggcctctttcagtgtttattcattcttacgtgggaaagttgtattccgaggtttctgtggtgcatgaagcttttgccttcaccatctgttcccgtgtcttcctcgggtgacatcagagtacagcagtattttcccttgccatctaatggggtttgggctgtttgactcaaccgtgtgtgttcctcaatgccaggggaataatcctaccctaagtcagctgaacagaagccaggatctaactgcaaacaagagacccagcttgcttaacagcatggaagagaccagtttcgttgcagctacctgggaagacggttgctaattagcctgcaacaaagagttccttgctcatctaaaagaggcaatcaccgttcaggtgaagctttgttctaagaatatttgtttcatctagtttatgagtccaaatgatatagactgtaaatgtcacagcagtggtgaaagactgctcggtcatgagcaccgacagtaactcactggcacgtgaatttctgaccgatgtcaaccggctttgcaatgcagtggtccagagggtggaggccagggaggaagaagaggaggagacgcacatggcaacccttggacagtaccttgtccatggtcgaggatttctattacttaccaagctaaattctataattgatcaggcattgacatgtagagaagaactcctgactcttcttctgtctctccttccactggtatggaagatacctgtccaagaagaaaaggcaacagattttaacctaccgctctcagcagatataatcctgaccaaagaaaagaactcaagttcacaaagatccactcaggaaaaattacatttagaaggaagtgccctgtctagtcaggtttctgcaaaagtaaatgtttttcgaaaaagcagacgacagcgtaaaattacccatcgctattctgtaagagatgcaagaaagacacagctctccacctcagattcagaagccaattcagatgaaaaaggcatagcaatgaataagcatagaaggccccatctgctgcatcattttttaacatcgtttcctaaacaagaccaccccaaagctaaacttgaccgcttagcaaccaaagaacagactcctccagatgctatggctttggaaaattccagagagattattccaagacaggggtcaaacactgacattttaagtgagccagctgccttgtctgttatcagtaacatgaacaattctccatttgacttatgtcatgttttgttatctttattagaaaaagtttgtaagtttgacgttaccttgaatcataattctcctttagcagccagtgtagtgcccacactaactgaattcctagcaggctttggggactgctgcagtctgagcgacaacttggagagtcgagtagtttctgcaggttggaccgaagaaccggtggctttgattcaaaggatgctctttcgaacagtgttgcatcttctgtcagtagatgttagtactgcagagatgatgccagaaaatcttaggaaaaatttaactgaattgcttagagcagctttaaaaattagaatatgcctagaaaagcagcctgacccttttgcaccaagacaaaagaaaacactgcaggaggttcaggaagattttgtgttttcaaagtatcgtcatagagcccttcttttacctgagcttttggaaggagttcttcagattctgatctgttgtcttcaaagtgcagcttcaaatcccttctacttcagtcaagccatggatttggttcaagaattcattcagcatcatggatttaatttatttgaaacagcagttcttcaaatggaatggctggttttaagagatggagttcctcccgaggcctcagagcatttgaaagccctaataaatagtgtgatgaaaataatgagcactgtcaaaaaagtgaaatcagagcaacttcatcattcgatgtgtacaagaaaaaggcacagacgatgtgaatattctcattttatgcatcatcaccgagatctctcaggtcttctggtttcggcttttaaaaaccaggtttccaaaaacccatttgaagagactgcagatggagatgtttattatcctgagcggtgctgttgcattgcagtgtgtgcccatcagtgcttgcgcttactacagcaggcttccttgagcagcacttgtgtccagatcctatcgggtgttcataacattggaatatgctgttgtatggatcccaaatctgtaatcattcctttgctccatgcttttaaattgccagcactgaaaaattttcagcagcatatattgaatatccttaacaaacttattttggatcagttaggaggagcagagatatcaccaaaaattaaaaaagcagcttgtaatatttgtactgttgactctgaccaactagcccaattagaagagacactgcagggaaacttatgtgatgctgaactctcctcaagtttatccagtccttcttacagatttcaagggatcctgcccagcagtggatctgaagatttgttgtggaaatgggatgctttaaaggcttatcagaactttgtttttgaagaagacagattacatagtatacagattgcaaatcacatttgcaatttaatccagaaaggcaatatagttgttcagtggaaattatataattacatatttaatcctgtgctccaaagaggagttgaattagcacatcattgtcaacacctaagcgttacttcagctcaaagtcatgtatgtagccatcataaccagtgcttgcctcaggacgtgcttcagatttatgtaaaaactctgcctatcctgcttaaatccagggtaataagagatttgtttttgagttgtaatggagtaagtcaaataatcgaattaaattgcttaaatggtattcgaagtcattctctaaaagcatttgaaactctgataatcagcctaggggagcaacagaaagatgcctcagttccagatattgatgggatagacattgaacagaaggagttgtcctctgtacatgtgggtacttcttttcatcatcagcaagcttattcagattctcctcagagtctcagcaaattttatgctggcctcaaagaagcttatccaaagagacggaagactgttaaccaagatgttcatatcaacacaataaacctattcctctgtgtggcttttttatgcgtaagtaaagaagcagagtctgacagggagtcggccaatgactcagaagatacttctggctatgacagcacagccagcgagcctttaagtcatatgctgccatgtatatctctcgagagccttgtcttgccttctcctgaacatatgcaccaagcagcagacatttggtctatgtgtcgttggatctacatgttgagttcagtgttccagaaacagttttataggcttggtggtttccgagtatgccataagttaatatttatgataatacagaaactgttcagaagtcacaaagaggagcaaggaaaaaaggagggagatacaagtgtaaatgaaaaccaggatttaaacagaatttctcaacctaagagaactatgaaggaagatttattatctttggctataaaaagtgaccccataccatcagaactaggtagtctaaaaaagagtgctgacagtttaggtaaattagagttacagcatatttcttccataaatgtggaagaagtttcagctactgaagccgctcccgaggaagcaaagctatttacaagtcaagaaagtgagacctcacttcaaagtatacgacttttggaagcccttctggccatttgtcttcatggtgccagaactagtcaacagaagatggaattggagttacctaatcagaacttgtctgtggaaagtatattatttgaaatgagggaccatctttcccagtcaaaggtgattgaaacacaactagcaaagccgttatttgatgccctgcttcgagttgccctcgggaattattcagcagattttgaacataatgatgctatgactgagaagagtcatcaatctgcagaagaattgtcatcccagcctggtgatttttcagaagaagctgaggattctcagtgttgtagttttaaacttttagttgaagaagaaggttacgaagcagatagtgaaagcaatcctgaagatggcgaaacccaggatgatggggtagacttaaagtctgaaacagaaggtttcagtgcatcaagcagtccaaatgacttactcgaaaacctcactcaaggggaaataatttatcctgagatttgtatgctggaattaaatttgctttctgctagtaaagccaaacttgatgtgcttgcccatgtatttgagagttttttgaaaattattaggcagaaagaaaagaatgtttttctgctcatgcaacagggaactgtgaaaaatcttttaggagggttcttgagtattttaacacaggatgattctgattttcaagcatgccagagagtattggtggatcttttggtatctttgatgagttcaagaacatgttcagaagagctaacccttcttttgagaatatttctggagaaatctccttgtacaaaaattcttcttctgggtattctgaaaattattgaaagtgatactactatgagcccttcacagtatctaaccttccctttactgcacgctccaaatttaagcaacggtgtttcatcacaaaagtatcctgggattttaaacagtaaggccatgggtttattgagaagagcacgagtttcacggagcaagaaagaggctgatagagagagttttccccatcggctgctttcatcttggcacatagccccagtccacctgccgttgctggggcaaaactgctggccacacctatcagaaggtttcagtgtttccctgtggtttaatgtggagtgtatccatgaagctgagagtactacagaaaaaggaaagaagataaagaaaagaaacaaatcattaattttaccagatagcagttttgatggtacagagagcgacagaccagaaggtgcagagtacataaatcctggtgaaagactcatagaagaaggatgtattcatataatttcactgggatccaaagcgttgatgatccaagtgtgggctgatccccacaatgccactcttatctttcgtgtgtgcatggattcaaatgatgacatgaaagctgttttactagcacaggttgaatcacaggagaatattttcctcccaagcaaatggcaacatttagtactcacctacttacagcagccccaagggaaaaggaggattcatgggaaaatctccatatgggtctctggacagaggaagcctgatgttactttggattttatgcttccaagaaaaacaagtttgtcatctgatagcaataaaacattttgcatgattggccattgtttatcatcccaagaagagtttttgcagttggctggaaaatgggacctgggaaatttgcttctcttcaacggagctaaggttggttcacaagaggccttttatctgtatgcttgtggacccaaccatacatctgtaatgccatgtaagtatggcaagccagtcaatgactactccaaatatattaataaagaaattttgcgatgtgaacaaatcagagaactttttatgaccaagaaagatgtggatattggtctcttaattgaaagtctttcagttgtttatacaacttactgtcctgctcagtataccatctatgaaccagtgattagacttaaaggtcaaatgaaaacccaactctctcaaagacccttcagctcaaaagaagttcagagcatcttattagaacctcatcatctaaagaatctccaacctactgaatataaaactattcaaggcattctgcacgaaattggtggaactggcatatttgtttttctctttgccagggttgttgaactcagtagctgtgaagaaactcaagcattagcactgcgagttatactctcattaattaaatacaaccaacaaagagtacatgaattagaaaattgtaatggactttctatgattcatcaggtgttgatcaaacaaaaatgcattgttgggttttacattttgaagacccttcttgaaggatgctgtggtgaagatattatttatatgaatgagaatggagagtttaagttggatgtagactctaatgctataatccaagatgttaagctgttagaggaactattgcttgactggaagatatggagtaaagcagagcaaggtgtttgggaaactttgctagcagctctagaagtcctcatcagagcagatcaccaccagcagatgtttaatattaagcagttattgaaagctcaagtggttcatcactttctactgacttgtcaggttttgcaggaatacaaagaggggcaactcacacccatgccccgagagatggcaagatctttcaggagaaagtgcggtcaatcatgtacctgaggcattccagcagtggaggaaggtcccttatgagccctggatttatggtaataagcccatctggttttactgcttcaccatatgaaggagagaattcctctaatattattccacaacagatggccgcccatatgctgcgttctagaagcctaccagcattccctacttcttcactactaacgcaatcacaaaaactgactggaagtttgggttgtagtatcgacaggttacaaaatattgcagatacttatgttgccacccaatcaaagaaacaaaattctttggggagttccgacacactgaaaaaaggcaaagaggacgcattcatcagtagctgtgagtctgcaaaaactgtttgtgaaatggaagctgtcctctcagcccaggtctctgtcagtgatgtcccaaagggagtgctgggatttccagtggtcaaagcagatcataaacagttgggagcagaacccaggtcagaagatgacagtcctggggatgagtcctgcccacgccga

SEQ ID NO: 1429 - DNA, 2919 bp, Homo sapiens
gtcattggcggctcccaagatggcgtccatcatggaagggccgctgagcaaatggactaacgtgatgaagggctggcagtaccgttggttcgtgctggactacaatgcaggactgctctcctactacacgtccaaggacaaaatgatgagaggctctcgcagaggatgtgttagactcagaggagctgtgattggtatagacgatgaggacgacagcaccttcacaataactgttgatcagaaaaccttccatttccaggcccgtgatgctgatgagcgagagaagtggatccatgccttagaagaaacaattcttcgacatactctccagcttcaaggtttggattcaggatttgttcctagtgtccaagattttgataagaaacttacagaagctgatgcttacctacaaatcttgattgaacaattaaagctttttgatgacaagcttcaaaactgcaaagaagatgaacagagaaagaaaattgaaactctcaaagagacaacaaatagcatggtagaatcaattaaacactgcattgtgttgctgcagattgccaaagaccagagtaatgcggagaagcacgcagatggaatgataagtactattaatcccgtagatgcaatatatcaacctagtcctttggaacctgtgatcagcacaatgccttcccagactgtgttacctccagaacctgttcagttgtgtaagtcagagcagcgtccatcttccctaccagttggacctgtgttggctaccttgggacatcatcagactcctacaccaaatagtacaggcagtggccattcaccaccgagtagcagtctcacttctccaagccacgtgaacttgtctccaaatacagtcccagagttctcttactccagcagtgaagatgaattttatgatgctgatgaattccatcaaagtggctcatccccaaagcgcttaatagattcttctggatctgcctcagtcctgacacacagcagctcgggaaatagtctaaaacgcccagataccacagaatcacttaattcttccttgtccaatggaacaagtgatgctgacctgtttgattcacatgatgacagagatgatgatgcggaggcagggtctgtggaggagcacaagagcgttatcatgcatctcttgtcgcaggttagacttggaatggatcttactaaggtagttcttccaacgtttattcttgaaagaagatctcttttagaaatgtatgcagacttttttgcacatccggacctgtttgtgagcattagtgaccagaaggatcccaaggatcgaatggttcaggttgtgaaatggtacctctcagcctttcatgcgggaaggaaaggatcagttgccaaaaagccatacaatcccattttgggcgagatttttcagtgtcattggacattaccaaatgatactgaagagaacacagaactagtttcagaaggaccagttccctgggtttccaaaaacagtgtaacatttgtggctgagcaggtttcccatcatccacccatttcagccttttatgctgagtgttttaacaagaagatacaattcaatgctcatatctggaccaaatcaaaattccttgggatgtcaattggggtgcacaacatagggcagggctgtgtctcatgtctagactatgatgaacattacattctcacattccccaatggctatggaaggtctatcctcacagtgccctgggtggaattaggaggagaatgcaatattaattgttccaaaacaggctatagtgcaaatatcatcttccacactaaacccttctatgggggcaagaagcacagaattactgccgagattttttctccaaatgacaagaagtctttttgctcaattgaaggggaatggaatggtgtgatgtatgcaaaatatgcaacaggggaaaatacagtctttgtagataccaagaagttgcctataatcaagaagaaagtgaggaagttggaagatcagaacgagtatgaatcccgcagcctttggaaggatgtcactttcaacttaaaaatcagagacattgatgcagcaactgaagcaaagcacaggcttgaagaaagacaaagagcagaagcccgagaaaggaaggagaaggaaattcagtgggagacaaggttatttcatgaagatggagaatgctgggtttatgatgaaccattactgaaacgtcttggtgctgccaagcattaggttggaagatgcaaagtttatacctgatgatcagggcagtaggcataattcagcaacaaacaatcttcctttgggagaaacctgttcattccaatcttctaattacagtggttcctatctcagggatactggactttctgacgcagatgaacaattaaggggaaaagcttcccttttccctctgtggcagttacgattttgacttcagtcctgagaaaaacttcaggttttgaaaatcagatgatgtcttctccttttccaaacaccacacgttgaaagcatttataaatccaagtctgaaactctgcgctctagtactgctgttaagatacacaacttgtttcttagttcatataatctcgggatacacacacacacacacatatatatacacacacatacgtatacacacacatacatatatataaatatacctgatgccagatttttttcataaatattctgcctactgtaaatatgggttcctctgagttgttttagaaaattagcgcaatgtattaaaatcaagtgttaggaaatttcatggtcttacctacaataacttttattttggaattgaactattattaaattgtatctaatcctggattacagtttaattaattattcttagtgcttaaggcttcataaagtaatttttccaaccttttttttaaaaaaaaaaaaaa

SEQ ID NO: 1430 - DNA, 2847 bp, Homo sapiens
ggtgaagggggtgtcccgggggacgggctgaacctcagtcaggaccgcctgcaccgcagtccggggatcgggtcgaggggagaagaaaaaggggtgctcgggagcagcccccggctacctcccctggaggcacagagggcgggggccttggcgaatggctttcttgctggccacttgcggagtgagtagaccccgagggtctgggagaggggccggcccctacccctgagtccccggggtcccggccgccaggccggagcgcgaatgtcgtgctcaccctgcctccttcccgccgccccctgggggtttggattcaggatttgttcctagtgtccaagattttgataagaaacttacagaagctgatgcttacctacaaatcttgattgaacaattaaagctttttgatgacaagcttcaaaactgcaaagaagatgaacagagaaagaaaattgaaactctcaaagagacaacaaatagcatggtagaatcaattaaacactgcattgtgttgctgcagattgccaaaagtactattaatcccgtagatgcaatatatcaacctagtcctttggaacctgtgatcagcacaatgccttcccagactgtgttacctccagaacctgttcagttgtgtaagtcagagcagcgtccatcttccctaccagttggacctgtgttggctaccttgggacatcatcagactcctacaccaaatagtacaggcagtggccattcaccaccgagtagcagtctcacttctccaagccacgtgaacttgtctccaaatacagtcccagagttctcttactccagcagtgaagatgaattttatgatgctgatgaattccatcaaagtggctcatccccaaagcgcttaatagattcttctggatctgcctcagtcctgacacacagcagctcgggaaatagtctaaaacgcccagataccacagaatcacttaattcttccttgtccaatggaacaagtgatgctgacctgtttgattcacatgatgacagagatgatgatgcggaggcagggtctgtggaggagcacaagagcgttatcatgcatctcttgtcgcaggttagacttggaatggatcttactaaggtagttcttccaacgtttattcttgaaagaagatctcttttagaaatgtatgcagacttttttgcacatccggacctgtttgtgagcattagtgaccagaaggatcccaaggatcgaatggttcaggttgtgaaatggtacctctcagcctttcatgcgggaaggaaaggatcagttgccaaaaagccatacaatcccattttgggcgagatttttcagtgtcattggacattaccaaatgatactgaagagaacacagaactagtttcagaaggaccagttccctgggtttccaaaaacagtgtaacatttgtggctgagcaggtttcccatcatccacccatttcagccttttatgctgagtgttttaacaagaagatacaattcaatgctcatatctggaccaaatcaaaattccttgggatgtcaattggggtgcacaacatagggcagggctgtgtctcatgtctagactatgatgaacattacattctcacattccccaatggctatggaaggtctatcctcacagtgccctgggtggaattaggaggagaatgcaatattaattgttccaaaacaggctatagtgcaaatatcatcttccacactaaacccttctatgggggcaagaagcacagaattactgccgagattttttctccaaatgacaagaagtctttttgctcaattgaaggggaatggaatggtgtgatgtatgcaaaatatgcaacaggggaaaatacagtctttgtagataccaagaagttgcctataatcaagaagaaagtgaggaagttggaagatcagaacgagtatgaatcccgcagcctttggaaggatgtcactttcaacttaaaaatcagagacattgatgcagcaactgaagcaaagcacaggcttgaagaaagacaaagagcagaagcccgagaaaggaaggagaaggaaattcagtgggagacaaggttatttcatgaagatggagaatgctgggtttatgatgaaccattactgaaacgtcttggtgctgccaagcattaggttggaagatgcaaagtttatacctgatgatcagggcagtaggcataattcagcaacaaacaatcttcctttgggagaaacctgttcattccaatcttctaattacagtggttcctatctcagggatactggactttctgacgcagatgaacaattaaggggaaaagcttcccttttccctctgtggcagttacgattttgacttcagtcctgagaaaaacttcaggttttgaaaatcagatgatgtcttctccttttccaaacaccacacgttgaaagcatttataaatccaagtctgaaactctgcgctctagtactgctgttaagatacacaacttgtttcttagttcatataatctcgggatacacacacacacacacatatatatacacacacatacgtatacacacacatacatatatataaatatacctgatgccagatttttttcataaatattctgcctactgtaaatatgggttcctctgagttgttttagaaaattagcgcaatgtattaaaatcaagtgttaggaaatttcatggtcttacctacaataacttttattttggaattgaactattattaaattgtatctaatcctggattacagtttaattaattattcttagtgcttaaggcttcataaagtaatttttccaaccttttttttaaaaaaaaaaaaaa

SEQ ID NO: 1431 - DNA, 2751 bp, Homo sapiens
ggtgaagggggtgtcccgggggacgggctgaacctcagtcaggaccgcctgcaccgcagtccggggatcgggtcgaggggagaagaaaaaggggtgctcgggagcagcccccggctacctcccctggaggcacagagggcgggggccttggcgaatggctttcttgctggccacttgcggagtgagtagaccccgagggtctgggagaggggccggcccctacccctgagtccccggggtcccggccgccaggccggagcgcgaatgtcgtgctcaccctgcctccttcccgccgccccctgggctttttgatgacaagcttcaaaactgcaaagaagatgaacagagaaagaaaattgaaactctcaaagagacaacaaatagcatggtagaatcaattaaacactgcattgtgttgctgcagattgccaaaagtactattaatcccgtagatgcaatatatcaacctagtcctttggaacctgtgatcagcacaatgccttcccagactgtgttacctccagaacctgttcagttgtgtaagtcagagcagcgtccatcttccctaccagttggacctgtgttggctaccttgggacatcatcagactcctacaccaaatagtacaggcagtggccattcaccaccgagtagcagtctcacttctccaagccacgtgaacttgtctccaaatacagtcccagagttctcttactccagcagtgaagatgaattttatgatgctgatgaattccatcaaagtggctcatccccaaagcgcttaatagattcttctggatctgcctcagtcctgacacacagcagctcgggaaatagtctaaaacgcccagataccacagaatcacttaattcttccttgtccaatggaacaagtgatgctgacctgtttgattcacatgatgacagagatgatgatgcggaggcagggtctgtggaggagcacaagagcgttatcatgcatctcttgtcgcaggttagacttggaatggatcttactaaggtagttcttccaacgtttattcttgaaagaagatctcttttagaaatgtatgcagacttttttgcacatccggacctgtttgtgagcattagtgaccagaaggatcccaaggatcgaatggttcaggttgtgaaatggtacctctcagcctttcatgcgggaaggaaaggatcagttgccaaaaagccatacaatcccattttgggcgagatttttcagtgtcattggacattaccaaatgatactgaagagaacacagaactagtttcagaaggaccagttccctgggtttccaaaaacagtgtaacatttgtggctgagcaggtttcccatcatccacccatttcagccttttatgctgagtgttttaacaagaagatacaattcaatgctcatatctggaccaaatcaaaattccttgggatgtcaattggggtgcacaacatagggcagggctgtgtctcatgtctagactatgatgaacattacattctcacattccccaatggctatggaaggtctatcctcacagtgccctgggtggaattaggaggagaatgcaatattaattgttccaaaacaggctatagtgcaaatatcatcttccacactaaacccttctatgggggcaagaagcacagaattactgccgagattttttctccaaatgacaagaagtctttttgctcaattgaaggggaatggaatggtgtgatgtatgcaaaatatgcaacaggggaaaatacagtctttgtagataccaagaagttgcctataatcaagaagaaagtgaggaagttggaagatcagaacgagtatgaatcccgcagcctttggaaggatgtcactttcaacttaaaaatcagagacattgatgcagcaactgaagcaaagcacaggcttgaagaaagacaaagagcagaagcccgagaaaggaaggagaaggaaattcagtgggagacaaggttatttcatgaagatggagaatgctgggtttatgatgaaccattactgaaacgtcttggtgctgccaagcattaggttggaagatgcaaagtttatacctgatgatcagggcagtaggcataattcagcaacaaacaatcttcctttgggagaaacctgttcattccaatcttctaattacagtggttcctatctcagggatactggactttctgacgcagatgaacaattaaggggaaaagcttcccttttccctctgtggcagttacgattttgacttcagtcctgagaaaaacttcaggttttgaaaatcagatgatgtcttctccttttccaaacaccacacgttgaaagcatttataaatccaagtctgaaactctgcgctctagtactgctgttaagatacacaacttgtttcttagttcatataatctcgggatacacacacacacacacatatatatacacacacatacgtatacacacacatacatatatataaatatacctgatgccagatttttttcataaatattctgcctactgtaaatatgggttcctctgagttgttttagaaaattagcgcaatgtattaaaatcaagtgttaggaaatttcatggtcttacctacaataacttttattttggaattgaactattattaaattgtatctaatcctggattacagtttaattaattattcttagtgcttaaggcttcataaagtaatttttccaaccttttttttaaaaaaaaaaaaaa

SEQ ID NO: 1432 - DNA, 2840 bp, Homo sapiens
gtcattggcggctcccaagatggcgtccatcatggaagggccgctgagcaaatggactaacgtgatgaagggctggcagtaccgttggttcgtgctggactacaatgcaggactgctctcctactacacgtccaaggacaaaatgatgagaggctctcgcagaggatgtgttagactcagacccgtgatgctgatgagcgagagaagtggatccatgccttagaagaaacaattcttcgacatactctccagcttcaaggtttggattcaggatttgttcctagtgtccaagattttgataagaaacttacagaagctgatgcttacctacaaatcttgattgaacaattaaagctttttgatgacaagcttcaaaactgcaaagaagatgaacagagaaagaaaattgaaactctcaaagagacaacaaatagcatggtagaatcaattaaacactgcattgtgttgctgcagattgccaaagaccagagtaatgcggagaagcacgcagatggaatgataagtactattaatcccgtagatgcaatatatcaacctagtcctttggaacctgtgatcagcacaatgccttcccagactgtgttacctccagaacctgttcagttgtgtaagtcagagcagcgtccatcttccctaccagttggacctgtgttggctaccttgggacatcatcagactcctacaccaaatagtacaggcagtggccattcaccaccgagtagcagtctcacttctccaagccacgtgaacttgtctccaaatacagtcccagagttctcttactccagcagtgaagatgaattttatgatgctgatgaattccatcaaagtggctcatccccaaagcgcttaatagattcttctggatctgcctcagtcctgacacacagcagctcgggaaatagtctaaaacgcccagataccacagaatcacttaattcttccttgtccaatggaacaagtgatgctgacctgtttgattcacatgatgacagagatgatgatgcggaggcagggtctgtggaggagcacaagagcgttatcatgcatctcttgtcgcaggttagacttggaatggatcttactaaggtagttcttccaacgtttattcttgaaagaagatctcttttagaaatgtatgcagacttttttgcacatccggacctgtttgtgagcattagtgaccagaaggatcccaaggatcgaatggttcaggttgtgaaatggtacctctcagcctttcatgcgggaaggaaaggatcagttgccaaaaagccatacaatcccattttgggcgagatttttcagtgtcattggacattaccaaatgatactgaagagaacacagaactagtttcagaaggaccagttccctgggtttccaaaaacagtgtaacatttgtggctgagcaggtttcccatcatccacccatttcagccttttatgctgagtgttttaacaagaagatacaattcaatgctcatatctggaccaaatcaaaattccttgggatgtcaattggggtgcacaacatagggcagggctgtgtctcatgtctagactatgatgaacattacattctcacattccccaatggctatggaaggtctatcctcacagtgccctgggtggaattaggaggagaatgcaatattaattgttccaaaacaggctatagtgcaaatatcatcttccacactaaacccttctatgggggcaagaagcacagaattactgccgagattttttctccaaatgacaagaagtctttttgctcaattgaaggggaatggaatggtgtgatgtatgcaaaatatgcaacaggggaaaatacagtctttgtagataccaagaagttgcctataatcaagaagaaagtgaggaagttggaagatcagaacgagtatgaatcccgcagcctttggaaggatgtcactttcaacttaaaaatcagagacattgatgcagcaactgaagcaaagcacaggcttgaagaaagacaaagagcagaagcccgagaaaggaaggagaaggaaattcagtgggagacaaggttatttcatgaagatggagaatgctgggtttatgatgaaccattactgaaacgtcttggtgctgccaagcattaggttggaagatgcaaagtttatacctgatgatcagggcagtaggcataattcagcaacaaacaatcttcctttgggagaaacctgttcattccaatcttctaattacagtggttcctatctcagggatactggactttctgacgcagatgaacaattaaggggaaaagcttcccttttccctctgtggcagttacgattttgacttcagtcctgagaaaaacttcaggttttgaaaatcagatgatgtcttctccttttccaaacaccacacgttgaaagcatttataaatccaagtctgaaactctgcgctctagtactgctgttaagatacacaacttgtttcttagttcatataatctcgggatacacacacacacacacatatatatacacacacatacgtatacacacacatacatatatataaatatacctgatgccagatttttttcataaatattctgcctactgtaaatatgggttcctctgagttgttttagaaaattagcgcaatgtattaaaatcaagtgttaggaaatttcatggtcttacctacaataacttttattttggaattgaactattattaaattgtatctaatcctggattacagtttaattaattattcttagtgcttaaggcttcataaagtaatttttccaaccttttttttaaaaaaaaaaaaaa

SEQ ID NO: 1433 - DNA, 2694 bp, Homo sapiens
aacctcagtcaggaccgcctgcaccgcagtccggggatcgggtcgaggggagaagaaaaaggggtgctcgggagcagcccccggctacctcccctggaggcacagagggcgggggccttggcgaatggctttcttgctggccacttgcggaggtttggattcaggatttgttcctagtgtccaagattttgataagaaacttacagaagctgatgcttacctacaaatcttgattgaacaattaaagctttttgatgacaagcttcaaaactgcaaagaagatgaacagagaaagaaaattgaaactctcaaagagacaacaaatagcatggtagaatcaattaaacactgcattgtgttgctgcagattgccaaaagtactattaatcccgtagatgcaatatatcaacctagtcctttggaacctgtgatcagcacaatgccttcccagactgtgttacctccagaacctgttcagttgtgtaagtcagagcagcgtccatcttccctaccagttggacctgtgttggctaccttgggacatcatcagactcctacaccaaatagtacaggcagtggccattcaccaccgagtagcagtctcacttctccaagccacgtgaacttgtctccaaatacagtcccagagttctcttactccagcagtgaagatgaattttatgatgctgatgaattccatcaaagtggctcatccccaaagcgcttaatagattcttctggatctgcctcagtcctgacacacagcagctcgggaaatagtctaaaacgcccagataccacagaatcacttaattcttccttgtccaatggaacaagtgatgctgacctgtttgattcacatgatgacagagatgatgatgcggaggcagggtctgtggaggagcacaagagcgttatcatgcatctcttgtcgcaggttagacttggaatggatcttactaaggtagttcttccaacgtttattcttgaaagaagatctcttttagaaatgtatgcagacttttttgcacatccggacctgtttgtgagcattagtgaccagaaggatcccaaggatcgaatggttcaggttgtgaaatggtacctctcagcctttcatgcgggaaggaaaggatcagttgccaaaaagccatacaatcccattttgggcgagatttttcagtgtcattggacattaccaaatgatactgaagagaacacagaactagtttcagaaggaccagttccctgggtttccaaaaacagtgtaacatttgtggctgagcaggtttcccatcatccacccatttcagccttttatgctgagtgttttaacaagaagatacaattcaatgctcatatctggaccaaatcaaaattccttgggatgtcaattggggtgcacaacatagggcagggctgtgtctcatgtctagactatgatgaacattacattctcacattccccaatggctatggaaggtctatcctcacagtgccctgggtggaattaggaggagaatgcaatattaattgttccaaaacaggctatagtgcaaatatcatcttccacactaaacccttctatgggggcaagaagcacagaattactgccgagattttttctccaaatgacaagaagtctttttgctcaattgaaggggaatggaatggtgtgatgtatgcaaaatatgcaacaggggaaaatacagtctttgtagataccaagaagttgcctataatcaagaagaaagtgaggaagttggaagatcagaacgagtatgaatcccgcagcctttggaaggatgtcactttcaacttaaaaatcagagacattgatgcagcaactgaagcaaagcacaggcttgaagaaagacaaagagcagaagcccgagaaaggaaggagaaggaaattcagtgggagacaaggttatttcatgaagatggagaatgctgggtttatgatgaaccattactgaaacgtcttggtgctgccaagcattaggttggaagatgcaaagtttatacctgatgatcagggcagtaggcataattcagcaacaaacaatcttcctttgggagaaacctgttcattccaatcttctaattacagtggttcctatctcagggatactggactttctgacgcagatgaacaattaaggggaaaagcttcccttttccctctgtggcagttacgattttgacttcagtcctgagaaaaacttcaggttttgaaaatcagatgatgtcttctccttttccaaacaccacacgttgaaagcatttataaatccaagtctgaaactctgcgctctagtactgctgttaagatacacaacttgtttcttagttcatataatctcgggatacacacacacacacacatatatatacacacacatacgtatacacacacatacatatatataaatatacctgatgccagatttttttcataaatattctgcctactgtaaatatgggttcctctgagttgttttagaaaattagcgcaatgtattaaaatcaagtgttaggaaatttcatggtcttacctacaataacttttattttggaattgaactattattaaattgtatctaatcctggattacagtttaattaattattcttagtgcttaaggcttcataaagtaatttttccaaccttttttttaaaaaaaaaaaaaa

SEQ ID NO: 1434 - DNA, 2880 bp, Homo sapiens
gtcattggcggctcccaagatggcgtccatcatggaagggccgctgagcaaatggactaacgtgatgaagggctggcagtaccgttggttcgtgctggactacaatgcaggactgctctcctactacacgtccaaggacaaaatgatgagaggctctcgcagaggatgtgttagactcagaggagctgtgattggtatagacgatgaggacgacagcaccttcacaataactgttgatcagaaaaccttccatttccaggcccgtgatgctgatgagcgagagaagtggatccatgccttagaagaaacaattcttcgacatactctccagcttcaaggtttggattcaggatttgttcctagtgtccaagattttgataagaaacttacagaagctgatgcttacctacaaatcttgattgaacaattaaagctttttgatgacaagcttcaaaactgcaaagaagatgaacagagaaagaaaattgaaactctcaaagagacaacaaatagcatggtagaatcaattaaacactgcattgtgttgctgcagattgccaaaagtactattaatcccgtagatgcaatatatcaacctagtcctttggaacctgtgatcagcacaatgccttcccagactgtgttacctccagaacctgttcagttgtgtaagtcagagcagcgtccatcttccctaccagttggacctgtgttggctaccttgggacatcatcagactcctacaccaaatagtacaggcagtggccattcaccaccgagtagcagtctcacttctccaagccacgtgaacttgtctccaaatacagtcccagagttctcttactccagcagtgaagatgaattttatgatgctgatgaattccatcaaagtggctcatccccaaagcgcttaatagattcttctggatctgcctcagtcctgacacacagcagctcgggaaatagtctaaaacgcccagataccacagaatcacttaattcttccttgtccaatggaacaagtgatgctgacctgtttgattcacatgatgacagagatgatgatgcggaggcagggtctgtggaggagcacaagagcgttatcatgcatctcttgtcgcaggttagacttggaatggatcttactaaggtagttcttccaacgtttattcttgaaagaagatctcttttagaaatgtatgcagacttttttgcacatccggacctgtttgtgagcattagtgaccagaaggatcccaaggatcgaatggttcaggttgtgaaatggtacctctcagcctttcatgcgggaaggaaaggatcagttgccaaaaagccatacaatcccattttgggcgagatttttcagtgtcattggacattaccaaatgatactgaagagaacacagaactagtttcagaaggaccagttccctgggtttccaaaaacagtgtaacatttgtggctgagcaggtttcccatcatccacccatttcagccttttatgctgagtgttttaacaagaagatacaattcaatgctcatatctggaccaaatcaaaattccttgggatgtcaattggggtgcacaacatagggcagggctgtgtctcatgtctagactatgatgaacattacattctcacattccccaatggctatggaaggtctatcctcacagtgccctgggtggaattaggaggagaatgcaatattaattgttccaaaacaggctatagtgcaaatatcatcttccacactaaacccttctatgggggcaagaagcacagaattactgccgagattttttctccaaatgacaagaagtctttttgctcaattgaaggggaatggaatggtgtgatgtatgcaaaatatgcaacaggggaaaatacagtctttgtagataccaagaagttgcctataatcaagaagaaagtgaggaagttggaagatcagaacgagtatgaatcccgcagcctttggaaggatgtcactttcaacttaaaaatcagagacattgatgcagcaactgaagcaaagcacaggcttgaagaaagacaaagagcagaagcccgagaaaggaaggagaaggaaattcagtgggagacaaggttatttcatgaagatggagaatgctgggtttatgatgaaccattactgaaacgtcttggtgctgccaagcattaggttggaagatgcaaagtttatacctgatgatcagggcagtaggcataattcagcaacaaacaatcttcctttgggagaaacctgttcattccaatcttctaattacagtggttcctatctcagggatactggactttctgacgcagatgaacaattaaggggaaaagcttcccttttccctctgtggcagttacgattttgacttcagtcctgagaaaaacttcaggttttgaaaatcagatgatgtcttctccttttccaaacaccacacgttgaaagcatttataaatccaagtctgaaactctgcgctctagtactgctgttaagatacacaacttgtttcttagttcatataatctcgggatacacacacacacacacatatatatacacacacatacgtatacacacacatacatatatataaatatacctgatgccagatttttttcataaatattctgcctactgtaaatatgggttcctctgagttgttttagaaaattagcgcaatgtattaaaatcaagtgttaggaaatttcatggtcttacctacaataacttttattttggaattgaactattattaaattgtatctaatcctggattacagtttaattaattattcttagtgcttaaggcttcataaagtaatttttccaaccttttttttaaaaaaaaaaaaaa

SEQ ID NO: 1435 - DNA, 2949 bp, Homo sapiens
gtcattggcggctcccaagatggcgtccatcatggaagggccgctgagcaaatggactaacgtgatgaagggctggcagtaccgttggttcgtgctggactacaatgcaggactgctctcctactacacgtccaaggacaaaatgatgagaggctctcgcagaggatgtgttagactcagaggagctgtgattggtatagacgatgaggacgacagcaccttcacaataactgttgatcagaaaaccttccatttccaggcccgtgatgctgatgagcgagagaagtggatccatgccttagaagaaacaattcttcgacatactctccagcttcaaatcagtaccacacttgcttttttccagtcttctggtatctctccagttcttgaattttcaaaaataattggtttggattcaggatttgttcctagtgtccaagattttgataagaaacttacagaagctgatgcttacctacaaatcttgattgaacaattaaagctttttgatgacaagcttcaaaactgcaaagaagatgaacagagaaagaaaattgaaactctcaaagagacaacaaatagcatggtagaatcaattaaacactgcattgtgttgctgcagattgccaaaagtactattaatcccgtagatgcaatatatcaacctagtcctttggaacctgtgatcagcacaatgccttcccagactgtgttacctccagaacctgttcagttgtgtaagtcagagcagcgtccatcttccctaccagttggacctgtgttggctaccttgggacatcatcagactcctacaccaaatagtacaggcagtggccattcaccaccgagtagcagtctcacttctccaagccacgtgaacttgtctccaaatacagtcccagagttctcttactccagcagtgaagatgaattttatgatgctgatgaattccatcaaagtggctcatccccaaagcgcttaatagattcttctggatctgcctcagtcctgacacacagcagctcgggaaatagtctaaaacgcccagataccacagaatcacttaattcttccttgtccaatggaacaagtgatgctgacctgtttgattcacatgatgacagagatgatgatgcggaggcagggtctgtggaggagcacaagagcgttatcatgcatctcttgtcgcaggttagacttggaatggatcttactaaggtagttcttccaacgtttattcttgaaagaagatctcttttagaaatgtatgcagacttttttgcacatccggacctgtttgtgagcattagtgaccagaaggatcccaaggatcgaatggttcaggttgtgaaatggtacctctcagcctttcatgcgggaaggaaaggatcagttgccaaaaagccatacaatcccattttgggcgagatttttcagtgtcattggacattaccaaatgatactgaagagaacacagaactagtttcagaaggaccagttccctgggtttccaaaaacagtgtaacatttgtggctgagcaggtttcccatcatccacccatttcagccttttatgctgagtgttttaacaagaagatacaattcaatgctcatatctggaccaaatcaaaattccttgggatgtcaattggggtgcacaacatagggcagggctgtgtctcatgtctagactatgatgaacattacattctcacattccccaatggctatggaaggtctatcctcacagtgccctgggtggaattaggaggagaatgcaatattaattgttccaaaacaggctatagtgcaaatatcatcttccacactaaacccttctatgggggcaagaagcacagaattactgccgagattttttctccaaatgacaagaagtctttttgctcaattgaaggggaatggaatggtgtgatgtatgcaaaatatgcaacaggggaaaatacagtctttgtagataccaagaagttgcctataatcaagaagaaagtgaggaagttggaagatcagaacgagtatgaatcccgcagcctttggaaggatgtcactttcaacttaaaaatcagagacattgatgcagcaactgaagcaaagcacaggcttgaagaaagacaaagagcagaagcccgagaaaggaaggagaaggaaattcagtgggagacaaggttatttcatgaagatggagaatgctgggtttatgatgaaccattactgaaacgtcttggtgctgccaagcattaggttggaagatgcaaagtttatacctgatgatcagggcagtaggcataattcagcaacaaacaatcttcctttgggagaaacctgttcattccaatcttctaattacagtggttcctatctcagggatactggactttctgacgcagatgaacaattaaggggaaaagcttcccttttccctctgtggcagttacgattttgacttcagtcctgagaaaaacttcaggttttgaaaatcagatgatgtcttctccttttccaaacaccacacgttgaaagcatttataaatccaagtctgaaactctgcgctctagtactgctgttaagatacacaacttgtttcttagttcatataatctcgggatacacacacacacacacatatatatacacacacatacgtatacacacacatacatatatataaatatacctgatgccagatttttttcataaatattctgcctactgtaaatatgggttcctctgagttgttttagaaaattagcgcaatgtattaaaatcaagtgttaggaaatttcatggtcttacctacaataacttttattttggaattgaactattattaaattgtatctaatcctggattacagtttaattaattattcttagtgcttaaggcttcataaagtaatttttccaaccttttttttaaaaaaaaaaaaaa

SEQ ID NO: 1436 - DNA, 1325 bp, Homo sapiens
atgtggtcgagtgtaggctcccacgttggaccgggaccggtaggggtagctgttgccatcatggctgaccccgacccccggtaccctcgctcctcgatcgaggacgacttcaactatggcagcagcgtggcctccgccaccgtgcacatccgaatggcctttctgagaaaagtctacagcattctttctctgcaggttctcttaactacagtgacttcaacagtttttttatactttgagtctgtacggacatttgtacatgagagtcctgccttaattttgctgtttgccctcggatctctgggtttgatttttgcgttgactttaaacagacataagtatccccttaacctgtacctactttttggatttacgctgttggaagctctgactgtggcagttgttgttactttctatgatgtatatattattctgcaagctttcatactgactactacagtattttttggtttgactgtgtatactctacaatctaagaaggatttcagcaaatttggagcagggctgtttgctcttttgtggatattgtgcctgtcaggattcttgaagttttttttttatagtgagataatggagttggtcttagccgctgcaggagcccttcttttctgtggattcatcatctatgacacacactcactgatgcataaactgtcacctgaagagtacgtattagctgccatcagcctctacttggatatcatcaatctattcctgcacctgttacggtttctggaagcagttaataaaaagtaattaaaagtatctcagctcaactgaagaacaacaaaaaaaatttaacgagaaaaaaggattaaagtaattggaagcagtatatagaaactgtttcattaagtaataaagtttgaaacaatgattaaatactgttacaatctttatttgtatcatatgtaattttgagagctttaaaatcttactattctttatgatacctcatttctaaatccttgatttaggatctcagttaagagctatcaaaattctattaaaaatgcttttctggctgggcacagtggctcacgcctgtaatcccaccactttgggagaccgaggcaggtggatcacgaggtcaagaggttgagaccatcctggccaacatggtgaaaccccgtctctactaaaaatacaaaaattagctggatgtggtggcacacacctgtagtcccagctagtcaagaggctgaggccagagaatcgcttgaacctgggaggtggaggttgcattgagccaagatcacgccactgcattccagcctggtgacagagcgagactcagtctcaaa

SEQ ID NO: 1437 - DNA, 2487 bp, Homo sapiens
gcgggagagacggaggtagagggaggacacagagccgcgccgcccgcaccacagaccttcgcctcgccccgccggttcctcaccctcggggagcaacatggcagataatctcagtgataccttgaagaagctgaagataacagctgttgacaagactgaggatagtttagaaggatgcttggattgtctgcttcaagccctggctcaaaataatacggaaacaagtgaaaaaatccaagcaagtggaatacttcagctgtttgcaactctgttgactccacagtcttcctgcaaagccaaagtagctaacatcatagcagaagtagccaaaaatgagtttatgcgaattccatgtgtggatgctggattgatttcaccactggtgcagctgctaaatagcaaagaccaggaagtgctgcttcaaacgggcagggctctaggaaacatatgttacgatagccatgagggcagaagtgcagttgaccaagcaggtggtgcacagattgtaattgaccatttaaggtcactgtgcagtataacagatcccgccaatgagaagctcttgactgtcttttgtggcatgctgatgaactatagcaatgagaatgattcgcttcaagctcagcttatcaatatgggtgttattcctaccttagtgaaattactgggcatccactgccaaaatgcagctcttacagaaatgtgtcttgttgcatttggtaatttagcagaacttgagtcaagtaaagaacagtttgccagtacaaacattgctgaagagctagtaaaactcttcaagaaacaaatagaacatgataagagagaaatgatttttgaagttcttgctccattggcagaaaatgatgctattaaactacagctggttgaagcaggcctagtagagtgtctactagagattgttcagcaaaaagtggatagtgacaaagaagatgatattactgagctcaaaactggttcagatctcatggttttattacttcttggagatgaatccatgcagaagttatttgaaggaggaaaaggtagtgtatttcaaagggtactctcttggatcccatcaaataaccaccagctacagcttgctggagcattggcaattgcaaattttgccagaaatgatgcaaattgtattcatatggtagacaatgggattgtagaaaaacttatggatttactggacagacatgtagaagatggaaatgtaacagtacagcatgcagcactaagtgccctcagaaacctggccattccagttataaataaagcaaagatgttatcagctggggtcacagaggcagttttgaaatttcttaaatctgaaatgcctcctgttcagttcaaacttctgggaacattaagaatgttaatagatgcacaagaagctgctgaacaattgggaaagaatgttaagttagtggagcgtttggtggaatggtgtgaagccaaagatcatgctggtgtgatgggggagtcaaacagactgctgtctgcccttatacgacacagtaaatcaaaagatgtaattaaaaccattgtgcagagtggtggcatcaagcatctagttaccatggcaactagtgaacatgtaataatgcagaatgaagctcttgttgctttggcattaatagcagctttagaattgggcactgctgagaaagatctagaaagtgctaaacttgtacagattttacatagactgctagcagatgagagaagtgctcctgaaatcaaatataattccatggtcctgatatgtgctcttatgggatctgaatgtctacacaaggaagtacaggatttggcttttctagatgtcgtatccaaacttcgcagtcatgagaacaaaagtgttgcccagcaggcctctctcacagagcagagacttactgtggaaagctgagaactgcccgatacacggcatcatcccatctctaatttcccctctgtcctccatccagcggcttcttccgcttcattctctaccataccacttgtgcatgcatgtgatgttctaataccaattgaagaaccgctgtaggtacctccctaataagatttctaaacctatagttagtgtgatcatgactttgtcaaaggcaagtctccacccataaccgttctcttgtattcctgttgcttgagctacattaagtagaatgtgcatgttgtagtcctatgatgatgtaaacttggtactacataatgacttgctccacacatgcagtaaactacataatgatgtactggtaaactagaaacaaagaatgcagcaggatctgtctagcttattaaagatgaaactgaattggaaaaatagctccattttttggtgcttgggaagcacagtgaccaaaaaagttgtatggctgcttattcattagtctttcctactgatgtcaaatccatggtacctagagttaaataaaattccaatgctcttactctttaaaaaaaaaaaaaaaaaaa

SEQ ID NO: 1438 - DNA, 2423 bp, Homo sapiens
ttccgcctccagcgcgagccccgccgccgccgagcatggacgaccccgactgcgactccacctgggaggaggacgaggaggatgcggaggacgcggaggacgaggactgcgaggacggcgaggccgccggcgcgagggacgcggacgcaggggacgaggacgaggagtcggaggagccgcgggcggcgcggcccagctcgttccagtccagaatgacagggtccagaaactggcgagccacgagggacatgtgtaggtatcggcacaactatccggatctggtggaacgagactgcaatggggacacgccaaacctgagtttctacagaaatgagatccgcttcctgcccaacggctgtttcattgaggacattcttcagaactggacggacaactatgacctccttgaggacaatcactcctacatccagtggctgtttcctctgcgagaaccaggagtgaactggcatgccaagcccctcacgctcagggaggtcgaggtgtttaaaagctcccaggagatccaggagcggcttgtccgggcctacgagctcatgctgggcttctacgggatccggctggaggaccgaggcacgggcacggtgggccgagcacagaactaccagaagcgcttccagaacctgaactggcgcagccacaacaacctccgcatcacacgcatcctcaagtcgctgggtgagctgggcctcgagcacttccaggcgccgctggtccgcttcttcctggaggagacgctggtgcggcgggagctgccgggggtgcggcagagtgccctggactacttcatgttcgccgtgcgctgccgacaccagcgccgccagctggtgcacttcgcctgggagcacttccggccccgctgcaagttcgtctgggggccccaagacaagctgcggaggttcaagcccagctctctgccccatccgctcgagggctccaggaaggtggaggaggaaggaagccccggggaccccgaccacgaggccagcacccagggtcggacctgtgggccagagcatagcaagggtgggggcagggtggacgaggggccccagccacggagcgtggagccccaggatgcgggacccctggagaggagccagggggatgaggcagggggccacggggaagataggccggagcccttaagccccaaagagagcaagaagaggaagctggagctgagccggcgggagcagccgcccacagagccaggccctcagagtgcctcagaggtggagaagatcgctctgaatttggaggggtgtgccctcagccagggcagcctcaggacggggacccaggaagtgggcggtcaggaccctggggaggcagtgcagccctgccgccaacccctgggagccagggtggccgacaaggtgaggaagcggaggaaggtggatgagggtgctggggacagtgctgcggtggccagtggtggtgcccagaccttggcccttgccgggtcccctgccccatcggggcaccccaaggctggacacagtgagaacggggttgaggaggacacagaaggtcgaacggggcccaaagaaggtacccctgggagcccatcggagaccccaggccccagcccagcaggacctgcaggggacgagccagccgagagcccatcggagaccccaggcccccgcccagcaggacctgcaggggacgagccagccgagagcccatcggagaccccaggcccccgcccggcaggacctgcaggggacgagccagccgagagcccatcggagaccccaggccccagcccggcaggacctacaagggatgagccagccgagagcccatcggagaccccaggcccccgcccggcaggacctgcaggggacgagccagccgagagcccatcggagaccccaggcccccgcccggcaggacctgcaggggacgagccagccgagagcccatcggagaccccaggccccagcccggcaggacctacaagggatgagccagccaaggcgggggaggcagcagagttgcaggacgcagaggtggagtcttctgccaagtctgggaagccttaaggaaaggagtgcccgtcggcgtcttggtcctcctgtccctgctgcaggggctggggcctccggagctgctgcgggctcccctcaggctctgcttcgtgacccgtgacccatgacccacagtgctggcctcctgtggggccactatagcagccaccagaagccgcgaggccctcagggaagcccaaggcctgcagaagcctcctggcctggctgtgtcttccccacccagctctcccctgcgcccctgtctttgtaaattgacccttctggagtggggggcggcgggcagggctgcttttcttagtctgataccaagcaaggccttttctgaataaattcatttgactttgaaaa

SEQ ID NO: 1439 - DNA, 4596 bp, Homo sapiens
aagcgggggactgtgccgtgtggaacgtgtagctgttgagaggtggactctgttaccattgaggatgtttggaggatgagtatgtgtggcagaggcacacataaacaggcagagaccctttgcccctgcctttctcccccaacccaaggctgacctgtgttctcccaggtctgggattctaagtgacctgctctgtgtttggtctctctcaggatgagcacaagcctgggagatggcagtgatggaaatggcctgcccaggtgcccctggctcagcagtggggcagcagaaggaactccccaagccaaaggagaagacgccgccactggggaagaaacagagctccgtctacaagcttgaggccgtggagaagagccctgtgttctgcggaaagtgggagatcctgaatgacgtgattaccaagggcacagccaaggaaggctccgaggcagggccagctgccatctctatcatcgcccaggctgagtgtgagaatagccaagagttcagccccaccttttcagaacgcattttcatcgctgggtccaaacagtacagccagtccgagagtcttgatcagatccccaacaatgtggcccatgctacagagggcaaaatggcccgtgtgtgttggaagggaaagcgtcgcagcaaagcccggaagaaacggaagaagaagagctcaaagtccctggctcatgcaggagtggccttggccaaacccctccccaggacccctgagcaggagagctgcaccatcccagtgcaggaggatgagtctccactcggcgccccatatgttagaaacaccccgcagttcaccaagcctctgaaggaaccaggccttgggcaactctgttttaagcagcttggcgagggcctacggccggctctgcctcgatcagaactccacaaactgatcagccccttgcaatgtctgaaccacgtgtggaaactgcaccacccccaggacggaggccccctgcccctgcccacgcaccccttcccctatagcagactgcctcatcccttcccattccaccctctccagccctggaaacctcaccctctggagtccttcctgggcaaactggcctgtgtagacagccagaaacccttgcctgacccacacctgagcaaactggcctgtgtagacagtccaaagcccctgcctggcccacacctggagcccagctgcctgtctcgtggtgcccatgagaagttttctgtggaggaatacctagtgcatgctctgcaaggcagcgtgagctcaagccaggcccacagcctgaccagcctggccaagacctgggcagcacggggctccagatcccgggagcccagccccaaaactgaggacaacgagggtgtcctgctcactgagaaactcaagccagtggattatgagtaccgagaagaagtccactgggccacgcaccagctccgcctgggcagaggctccttcggagaggtgcacaggatggaggacaagcagactggcttccagtgcgctgtcaaaaaggtgcggctggaagtatttcgggcagaggagctgatggcatgtgcaggattgacctcacccagaattgtccctttgtatggagctgtgagagaagggccttgggtcaacatcttcatggagctgctggaaggtggctccctgggccagctggtcaaggagcagggctgtctcccagaggaccgggccctgtactacctgggccaggccctggagggtctggaatacctccactcacgaaggattctgcatggggacgtcaaagctgacaacgtgctcctgtccagcgatgggagccacgcagccctctgtgactttggccatgctgtgtgtcttcaacctgatggcctgggaaagtccttgctcacaggggactacatccctggcacagagacccacatggctccggaggtggtgctgggcaggagctgcgacgccaaggtggatgtctggagcagctgctgtatgatgctgcacatgctcaacggctgccacccctggactcagttcttccgagggccgctctgcctcaagattgccagcgagcctccgcctgtgagggagatcccaccctcctgcgcccctctcacagcccaggccatccaagaggggctgaggaaagagcccatccaccgcgtgtctgcagcggagctgggagggaaggtgaaccgggcactacagcaagtgggaggtctgaagagcccttggaggggagaatataaagaaccaagacatccaccgccaaatcaagccaattaccaccagaccctccatgcccagccgagagagctttcgccaagggccccagggccccggccagctgaggagacaacaggcagagcccctaagctccagcctcctctcccaccagagcccccagagccaaacaagtctcctcccttgactttgagcaaggaggagtctgggatgtgggaacccttacctctgtcctccctggagccagcccctgccagaaaccccagctcaccagagcggaaagcaaccgtcccggagcaggaactgcagcagctggaaatagaattattcctcaacagcctgtcccagccattttctctggaggagcaggagcaaattctctcgtgcctcagcatcgacagcctctccctgtcggatgacagtgagaagaacccatcaaaggcctctcaaagctcgcgggacaccctgagctcaggcgtacactcctggagcagccaggccgaggctcgaagctccagctggaacatggtgctggcccgggggcggcccaccgacaccccaagctatttcaatggtgtgaaagtccaaatacagtctcttaatggtgaacacctgcacatccgggagttccaccgggtcaaagtgggagacatcgccactggcatcagcagccagatcccagctgcagccttcagcttggtcaccaaagacgggcagcctgttcgctacgacatggaggtgccagactcgggcatcgacctgcagtgcacactggcccctgatggcagcttcgcctggagctggagggtcaagcatggccagctggagaacaggccctaaccctgccctccaccgccggctccacactgccggaaagcagccttcctgctcggtgcacgatgctgccctgaaaacacaggctcagccgttcccaggggattgccagccccccggctcacagtgggaaccagggcctcgcagcagcaaggtgggggcaagcagaatgcctcccaggatttcacacctgagccctgccccaccctgctgaaaaaacatccgccacgtgaagagacagaaggaggatggcaggagttacctggggaaacaaaacagggatctttttctgcccctgctccagtcgagttggcctgacccgcttggatcagtgaccatttgttggcagacaggggagagcagcttccagcctgggtcagaaggggtgggcgagcccttcggcccctcaccctccaggctgctgtgagagtgtcaagtgtgtaagggcccaaactcaggttcagtgcagaaccaggtcagcaggtatgcccgcccgtaggttaagggggccctctaaaccccttgcctggcctcacctggccagctcaccccttttgggtgtaggggaaaagaatgcctgaccctgggaaggctccctggtagaatacaccacacttttcaggttgttgcaacacaggtcctgagttgacctctggttcagccaaggaccaaagaaggtgtgtaagtgaagtggttctcagtccccagacatgtgcccctttgctgctggctaccactcttccccagagcagcaggccccgagccccttcaggcccagcactgccccagactcgctggcactcagttccctcatctgtaaaggtgaagggtgatgcaggatatgcctgacaggaacagtctgtggatggacatgatcagtgctaaggaaagcagcagagagagacgtccggcgccccagccccactatcagtgtccagcgtgctggttccccagagcacagctcagcatcacactgacactcaccctgccctgcccctggccagagggtactgccgacggcactttgcactctgatgacctcaaagcactttcatggctgccctctggcagggcagggcagggcagtgacactgtaggagcatagcaagccaggagatggggtgaagggacacagtcttgagctgtccacatgcatgtgactcctcaaacctcttccagatttctctaagaatagcacccccttccccattgccccagcttagcctcttctcccaggggagctactcaggactcacgtagcattaaatcagctgtgaatcgtcagggggtgtctgctagcctcaacctcctggggcaggggacgccgagactccgtgggagaagctcattcccacatcttgccaagacagcctttgtccagctgtccacattgagtcagactgctcccggggagagagccccggcccccagcacataaagaactgcagccttggtactgcagagtctgggttgtagagaactctttgtaagcaataaagtttggggtgatgacaaatgttaaaaaa

SEQ ID NO: 1440 - DNA, 3407 bp, Homo sapiens
gaagaactggaactggtctggccatagggggaagcggcgcgttaaatccgccccctctccataccctactttcaaggggtgggcggtagaggggaggttggggttggagcagcggcgagggggcccctcccttgcacctccccccaccggacttggtcgcgcccgaagtgtaacactttctctttgtcggaggagctcctctgtttcctgtgcagtagctcccgttgcggcggcacccgtggcagccctggcggacgcaggagcgatggcagcgaccgatatagctcgccaggtgggtgaaggttgccgaactgtccccctggctggacatgtggggtttgacagcttgcctgaccagctggtgaataagtccgtcagccagggcttctgcttcaacatcctgtgcgtgggagagacaggtttgggcaagtccaccctcatggacaccctgttcaacaccaaattcgaaggggagccagccacccacacacagccgggtgtccagctccagtctaatacctatgacctccaagagagcaacgtgaggctaaagctcacgatcgttagcacagttggctttggggaccagatcaacaaagaggacagctacaagcctatcgtggaattcatcgatgcacaattcgaggcctacctgcaggaagagctaaagatccgaagagtgctacacacctaccatgactcccgaatccatgtctgcttgtatttcattgcccccacgggtcattccctgaagtctctggacctagtgactatgaagaagctggacagtaaggtgaacatcatccccatcattgccaaagcagatgccatttcgaagagtgagctaacaaagttcaaaatcaaaatcaccagcgagcttgtcagcaacggagtccagatctatcagtttcctacagatgatgagtcggtggcagagatcaatggaaccatgaacgcccacctgccgtttgctgtcattggcagcacagaagaactgaagataggcaacaagatgatgagggcgcggcagtatccttggggcactgtgcaggttgaaaacgaggcccactgcgactttgtgaagctgcgggagatgctgattcgggtcaacatggaggatctgcgggagcagacccacacccggcactatgagctgtatcgccgctgtaagctggaggagatgggcttcaaggacaccgaccctgacagcaaacccttcagtttacaggagacatatgaggccaaaaggaacgagttcctaggggaactccagaaaaaagaagaggagatgagacagatgttcgtccagcgagtcaaagagaaagaagcggagctcaaagaggcagagaaagagctgcacgagaagtttgaccgtctgaagaaactgcaccaggacgagaagaagaaactggaggataagaagaaatccctggatgatgaagtgaatgctttcaagcaaagaaagacggcggctgagctgctccagtcccagggctcccaggctggaggctcacagactctgaagagagacaaagagaagaaaaataatccatggctgtgtactgaatagtattccccgctacagctggactggactccatttagccttttaagccgaggttcctattttaactgacagctttcctttggggtgccaggcagcgaggccccccacccctatcctgccatgtacttcaagctcacttcttctttttgagttccgcaacttgctcctgcctcccagccccactggcactgaccatgaccacctacttctattttttttttagagtttctttttttgatcacttactttcaaagcacacagtcaaacaaggttatgccaaatttccaggcctttttgaagtattgagaaggggaaggggatttctcacttcaattatagatcataataggaagcaaaaagaaaaaaatgaaaagcaaacatatgcacgcacttttcttgttgacaaagcaagaatataggtttgctgtgtaggtttggtgctctattgattggtgagtgaccagagcaagtatgaaggtgatgctgccaaagcacaagccagtttcttgggaaaattcaagttacagtggagtatttttttgaagaccatatgcttggaggtagaaacaaaccaacgaccaaaaaaaaaaaaaaaaaaatctgctcagatactcagccagtagctcagagagatgctgagttaggcctgtcaggtctccttgggaaaggcttcatatttgcaactttgatgattctatgtccagcttcagagctgctttcccagaaattcacgcttaaacaaccaaccggtaaccaccacttccccacaccgccgccctggtaattatttgcattacaaaccggaggcgccctcatttgcatttgtgtacagattaactagttaaggcttgagaagctctgaataattcaaaagtattagacccacacagccttggagagaccttcagaaactaaggaggagttttatattaagggagacattttagtcagtaagacgatataacctacttactccgtaaggggaaatgaaggcccagagaagggaagggacttgaccgaggtcccacttctgtttcgaggcagaagccagactaattttcatgcctcctgactcccaatcagtttcacaaagggattcaatctgtttatatacgttacattcctggatacgaggtcttttgatgttcagagtaactgactagttagtattagaagaccctcgaggtttttttccacagaaaaacatctgaagatggattgggtgagggctggcaaaacgaaggcatgccgggccagctccttaacccaatgacccagtgatgctgcaaggctggaacggggtccaggagactgtgtgtaacaggtgccctaggtgacccttataatcagggaagtttggtgaacaaaaatcgaacccatgagtgaacataaattaaaaagttgatcaacctattaaaatgtgtatttcattgggtagcttttctcactgtagacagattttttccttcttcaatgaaaaggcttttaaattagtacaactgttactatttaaaaaaaaaataccctaagtactctgtttacttctggtgaaacaaaaccagtcattagaaatggtctgtgcttttattttcccagactggagtggcttttctgaaacacacacacacacacacacacacacacacacacacacacacacacacacgtacacacatccctcacttctcttaagccaagaagtttgctttccctagctgcagtgtagatggctcttgtttttgtttttttgttttaatcatttggcattcacatgtggctgttaatatgtgcttgtttttaattaaaacaagaagctttaaaaaaaaaaaaaaaaaaaaaa

SEQ ID NO: 1441 - DNA, 4716 bp, Homo sapiens
gaagaactggaactggtctggccatagggggaagcggcgcgttaaatccgccccctctccataccctactttcaaggggtgggcggtagaggggaggttggggttggagcagcggcgagggggcccctcccttgcacctccccccaccggacttggtcgcgcccgaagtgtaacactttctctttgtcggaggagctcctctgtttcctgtgcagtagctcccgttgcggcggcacccgtggcagccctggcggacgcaggagcgatggcagcgaccgatatagctcgccaggtgggtgaaggttgccgaactgtccccctggctggacatgtggggtttgacagcttgcctgaccagctggtgaataagtccgtcagccagggcttctgcttcaacatcctgtgcgtgggagagacaggtttgggcaagtccaccctcatggacaccctgttcaacaccaaattcgaaggggagccagccacccacacacagccgggtgtccagctccagtctaatacctatgacctccaagagagcaacgtgaggctaaagctcacgatcgttagcacagttggctttggggaccagatcaacaaagaggacagctacaagcctatcgtggaattcatcgatgcacaattcgaggcctacctgcaggaagagctaaagatccgaagagtgctacacacctaccatgactcccgaatccatgtctgcttgtatttcattgcccccacgggtcattccctgaagtctctggacctagtgactatgaagaagctggacagtaaggtgaacatcatccccatcattgccaaagcagatgccatttcgaagagtgagctaacaaagttcaaaatcaaaatcaccagcgagcttgtcagcaacggagtccagatctatcagtttcctacagatgatgagtcggtggcagagatcaatggaaccatgaacgcccacctgccgtttgctgtcattggcagcacagaagaactgaagataggcaacaagatgatgagggcgcggcagtatccttggggcactgtgcaggttgaaaacgaggcccactgcgactttgtgaagctgcgggagatgctgattcgggtcaacatggaggatctgcgggagcagacccacacccggcactatgagctgtatcgccgctgtaagctggaggagatgggcttcaaggacaccgaccctgacagcaaacccttcagtttacaggagacatatgaggccaaaaggaacgagttcctaggggaactccagaaaaaagaagaggagatgagacagatgttcgtccagcgagtcaaagagaaagaagcggagctcaaagaggcagagaaagagctgcacgagaagtttgaccgtctgaagaaactgcaccaggacgagaagaagaaactggaggataagaagaaatccctggatgatgaagtgaatgctttcaagcaaagaaagacggcggctgagctgctccagtcccagggctcccaggctggaggctcacagactctgaagagagacaaagagaagaaaaattaactctgctgtttgctgcatgctgcatgagacccagggtcctgtttgggcttcctgtagacacccttttcctgcgcaacagagctgggcctccctttctctaatttcccccttaacatgcctggggggcatacaatccaacccgcgccctctcctctcttcctgccaaggtttatagaaacctgagaatctgagggtgatgtctggccgctggtcaagaagccaacagtcatgtggctcgcagatgcatcctgcatcccagtccccctcccagcacccccagccatcccccctgtcttcccccacatctttgccagaggtgtgacatggtcagggggcccatctgctactctttcccaccagctcccctgttccagttctggttgctgttagtttccctgaggtatttgcaaccaccatggctgggtaaccaccgatcagcacagctgtccccttggtctcctgtatcccagtcactagtcctccctggtccaccccaccctcatcctcaggagccacagccatttcttagagggtttcaaaaggacagcctttggcgccttttccttctaacctttgagtccagccctttccagttttcattcactcgaagtaactgcactcaagctgtgctcaaaatcggcaacgcatttatttacaccaagcccttcccataaaacacaactgctgaagaaaatagcagacgtttcccctctctctaactctgggtatcccacagatgcaaaagggagaataaacctgaatattattaccagcctagagtcttgaatgatagccttaccgaattcttcttgtgaggtatttcagcatctcggggggtaatttccggaagggctccatactgtcccaataaggtgaggccagtagcaggaataataaatcccactttgtaggctggaaaactgagctgtcaaaagaatcaagtgtttgggggtttgctctgatgagtcttctagttcatttggtgaatgtcatgatgatttttaacatgcattttgcatgcatcccccaataagaagagatgagactcggctggagagaagaaaaggcccttaactttctttccaatttaaggagttgagagtttaaaaatattccagccctaagtttttatcatgggtcccatctgatagtggctttgggaacctctgtgaagtagagagccctcccttgtcagggttatgaggcacagtggcctttggtgtttggccagtgacagtgtgagagatggagttgacctggcaatgatctgtggctaacatgccgtctctctgcccttcctttgcagtaatccatggctgtgtactgaatagtattccccgctacagctggactggactccatttagccttttaagccgaggttcctattttaactgacagctttcctttggggtgccaggcagcgaggccccccacccctatcctgccatgtacttcaagctcacttcttctttttgagttccgcaacttgctcctgcctcccagccccactggcactgaccatgaccacctacttctattttttttttagagtttctttttttgatcacttactttcaaagcacacagtcaaacaaggttatgccaaatttccaggcctttttgaagtattgagaaggggaaggggatttctcacttcaattatagatcataataggaagcaaaaagaaaaaaatgaaaagcaaacatatgcacgcacttttcttgttgacaaagcaagaatataggtttgctgtgtaggtttggtgctctattgattggtgagtgaccagagcaagtatgaaggtgatgctgccaaagcacaagccagtttcttgggaaaattcaagttacagtggagtatttttttgaagaccatatgcttggaggtagaaacaaaccaacgaccaaaaaaaaaaaaaaaaaaatctgctcagatactcagccagtagctcagagagatgctgagttaggcctgtcaggtctccttgggaaaggcttcatatttgcaactttgatgattctatgtccagcttcagagctgctttcccagaaattcacgcttaaacaaccaaccggtaaccaccacttccccacaccgccgcccggtaattatttgcattacaaaccggaggcgccctcatttgcatttgtgtacagattaactagttaaggcttgagaagctctgaataattcaaaagtattagacccacacagccttggagagaccttcagaaactaaggaggagttttatattaagggagacattttagtcagtaagacgatataacctacttactccgtaaggggaaatgaaggcccagagaagggaagggacttgaccgaggtcccacttctgtttcgaggcagaagccagactaattttcatgcctcctgactcccaatcagtttcacaaagggattcaatctgtttatatacgttacattcctggatacgaggtcttttgatgttcagagtaactgactagttagtattagaagaccctcgaggtttttttccacagaaaaacatctgaagatggattgggtgagggctggcaaaacgaaggcatgccgggccagctccttaacccaatgacccagtgatgctgcaaggctggaacggggtccaggagactgtgtgtaacaggtgccctaggtgacccttataatcagggaagtttggtgaacaaaaatcgaacccatgagtgaacataaattaaaaagttgatcaacctattaaaatgtgtatttcattgggtagcttttctcactgtagacagattttttccttcttcaatgaaaaggcttttaaattagtacaactgttactatttaaaaaaaaaataccctaagtactctgtttacttctggtgaaacaaaaccagtcattagaaatggtctgtgcttttattttcccagactggagtggcttttctgaaacacacacacacacacacacacacacacacacacacacacacacacacacgtacacacatccctcacttctcttaagccaagaagtttgctttccctagctgcagtgtagatggctcttgtttttgtttttttgttttaatcatttggcattcacatgtggctgttaatatgtgcttgtttttaattaaaacaagaagctttaaaaaaaaaaaaaaaaaaaaaa

SEQ ID NO: 1442 - DNA, 2620 bp, Homo sapiens
gaagaactggaactggtctggccatagggggaagcggcgcgttaaatccgccccctctccataccctactttcaaggggtgggcggtagaggggaggttggggttggagcagcggcgagggggcccctcccttgcacctccccccaccggacttggtcgcgcccgaagtgtaacactttctctttgtcggaggagctcctctgtttcctgtgcagtagctcccgttgcggcggcacccgtggcagccctggcggacgcaggagcgatggcagcgaccgatatagctcgccaggtgggtgaaggttgccgaactgtccccctggctggacatgtggggtttgacagcttgcctgaccagctggtgaataagtccgtcagccagggcttctgcttcaacatcctgtgcgtgggagagacaggtttgggcaagtccaccctcatggacaccctgttcaacaccaaattcgaaggggagccagccacccacacacagccgggtgtccagctccagtctaatacctatgacctccaagagagcaacgtgaggctaaagctcacgatcgttagcacagttggctttggggaccagatcaacaaagaggacagctacaagcctatcgtggaattcatcgatgcacaattcgaggcctacctgcaggaagagctaaagatccgaagagtgctacacacctaccatgactcccgaatccatgtctgcttgtatttcattgcccccacgggtcattccctgaagtctctggacctagtgactatgaagaagctggacagtaaggtgaacatcatccccatcattgccaaagcagatgccatttcgaagagtgagctaacaaagttcaaaatcaaaatcaccagcgagcttgtcagcaacggagtccagatctatcagtttcctacagatgatgagtcggtggcagagatcaatggaaccatgaacgcccacctgccgtttgctgtcattggcagcacagaagaactgaagataggcaacaagatgatgagggcgcggcagtatccttggggcactgtgcaggttgaaaacgaggcccactgcgactttgtgaagctgcgggagatgctgattcgggtcaacatggaggatctgcgggagcagacccacacccggcactatgagctgtatcgccgctgtaagctggaggagatgggcttcaaggacaccgaccctgacagcaaacccttcagtttacaggagacatatgaggccaaaaggaacgagttcctaggggaactccagaaaaaagaagaggagatgagacagatgttcgtccagcgagtcaaagagaaagaagcggagctcaaagaggcagagaaagagctgcacgagaagtttgaccgtctgaagaaactgcaccaggacgagaagaagaaactggaggataagaagaaatccctggatgatgaagtgaatgctttcaagcaaagaaagacggcggctgagctgctccagtcccagggctcccaggctggaggctcacagactctgaagagagacaaagagaagaaaaattaactctgctgtttgctgcatgctgcatgagacccagggtcctgctttttttaatcttgtcttcagcagctgcactaagtctaaaggagaagactgccattatagaagagttagggttccatattgtctcaaatcagaaatcaaccaatttcctctcccctcaaactgcaagcacacacacatacaccacaccactcaacaagtgttcatgtgtccctgtgtccaggcaagaagctctcttcctgactcacatggtattttaaatggaagtgtcttgtcctaactaacaaggcaggaaaagaaccatcagagctggaaaatggacgaaatgtaacctcagagaaacaactacaggaccactcacccaagtgtaagtgactggggcaggacacctcagctgtgggtatgaaagtactgttctgttcacaaggttttgtttgagttttatgtttttcttttaaacatttctctggttcgatgggttgactgtctacagccactgttaaacatttctgaatatgcaagagaaagtcaagtgacatttgtatcttcttcagcattcgcagaccttctatagattccagcaaagggggaaaatgtatccactatctaacacttaggtagagaagggagggggtttaagcttagtgagggcaaaattactccattccaccttccgagaccagttagggttttgagagaggtttctgctcaacctgggatctggagggagagctttgatgttggtaaatctgccttgaattcattggtttaacttgcatcaaaataccatgtgagtgtgctcattctcatatatcccctaccaccatcaccaccattctgctgttcagtgtctcttgagagagcctctttgcatgttttccagaatctgtgtgtgtttttcctttcttctcctttgttctttttgctcaaaggtgtgaccagtcattgcccctctggggctttcattctccaggagaaacatcccagaaccagcactgtttagcctgatacctttctaatgtccatgtcaattttcaataaaattcaaagaaatgctaaaaaaaaaaaaaa

SEQ ID NO: 1443 - DNA, 2575 bp, Homo sapiens
gaagaactggaactggtctggccatagggggaagcggcgcgttaaatccgccccctctccataccctactttcaaggggtgggcggtagaggggaggttggggttggagcagcggcgagggggcccctcccttgcacctccccccaccggacttggtcgcgcccgaagtgtaacactttctctttgtcggaggagctcctctgtttcctgtgcagtagctcccgttgcggcggcacccgtggcagccctggcggacgcaggagcgatggcagcgaccgatatagctcgccaggtgggtgaaggttgccgaactgtccccctggctggacatgtggggtttgacagcttgcctgaccagctggtgaataagtccgtcagccagggcttctgcttcaacatcctgtgcgtgggagagacaggtttgggcaagtccaccctcatggacaccctgttcaacaccaaattcgaaggggagccagccacccacacacagccgggtgtccagctccagtctaatacctatgacctccaagagagcaacgtgaggctaaagctcacgatcgttagcacagttggctttggggaccagatcaacaaagaggacagctacaagcctatcgtggaattcatcgatgcacaattcgaggcctacctgcaggaagagctaaagatccgaagagtgctacacacctaccatgactcccgaatccatgtctgcttgtatttcattgcccccacgggtcattccctgaagtctctggacctagtgactatgaagaagctggacagtaaggtgaacatcatccccatcattgccaaagcagatgccatttcgaagagtgagctaacaaagttcaaaatcaaaatcaccagcgagcttgtcagcaacggagtccagatctatcagtttcctacagatgatgagtcggtggcagagatcaatggaaccatgaacgcccacctgccgtttgctgtcattggcagcacagaagaactgaagataggcaacaagatgatgagggcgcggcagtatccttggggcactgtgcaggttgaaaacgaggcccactgcgactttgtgaagctgcgggagatgctgattcgggtcaacatggaggatctgcgggagcagacccacacccggcactatgagctgtatcgccgctgtaagctggaggagatgggcttcaaggacaccgaccctgacagcaaacccttcagtttacaggagacatatgaggccaaaaggaacgagttcctaggggaactccagaaaaaagaagaggagatgagacagatgttcgtccagcgagtcaaagagaaagaagcggagctcaaagaggcagagaaagagctgcacgagaagtttgaccgtctgaagaaactgcaccaggacgagaagaagaaactggaggataagaagaaatccctggatgatgaagtgaatgctttcaagcaaagaaagacggcggctgagctgctccagtcccagggctcccaggctggaggctcacagactctgaagagagacaaagagaagaaaaactttttttaatcttgtcttcagcagctgcactaagtctaaaggagaagactgccattatagaagagttagggttccatattgtctcaaatcagaaatcaaccaatttcctctcccctcaaactgcaagcacacacacatacaccacaccactcaacaagtgttcatgtgtccctgtgtccaggcaagaagctctcttcctgactcacatggtattttaaatggaagtgtcttgtcctaactaacaaggcaggaaaagaaccatcagagctggaaaatggacgaaatgtaacctcagagaaacaactacaggaccactcacccaagtgtaagtgactggggcaggacacctcagctgtgggtatgaaagtactgttctgttcacaaggttttgtttgagttttatgtttttcttttaaacatttctctggttcgatgggttgactgtctacagccactgttaaacatttctgaatatgcaagagaaagtcaagtgacatttgtatcttcttcagcattcgcagaccttctatagattccagcaaagggggaaaatgtatccactatctaacacttaggtagagaagggagggggtttaagcttagtgagggcaaaattactccattccaccttccgagaccagttagggttttgagagaggtttctgctcaacctgggatctggagggagagctttgatgttggtaaatctgccttgaattcattggtttaacttgcatcaaaataccatgtgagtgtgctcattctcatatatcccctaccaccatcaccaccattctgctgttcagtgtctcttgagagagcctctttgcatgttttccagaatctgtgtgtgtttttcctttcttctcctttgttctttttgctcaaaggtgtgaccagtcattgcccctctggggctttcattctccaggagaaacatcccagaaccagcactgtttagcctgatacctttctaatgtccatgtcaattttcaataaaattcaaagaaatgctaaaaaaaaaaaaaa

SEQ ID NO: 1444 - DNA, 2487 bp, Homo sapiens
ggagtcgagcgagagcctgtggaggagtccgcctgctgtagcgtgcgtaagcaaggcagctacgccgggcggctacgctgcggaatcggcgtaggcgcctttggagaatcggcgggctgcgctccgctggggctggtcgcggagggggggaggggatgtcggtcagtgcgagatccgctgctgctgaggagaggagcgtcaacagcagcaccatggctcaacagaagaaccttgaaggctatgtgggatttgccaatctcccaaatcaagtatacagaaaatcggtgaagagaggttttgaattcacgcttatggtagtgggtgaatctggattgggaaagtcgacattaatcaactcattattcctcacagatttgtattctccagagtatccaggtccttctcatagaattaaaaagactgtacaggtggaacaatccaaagttttaatcaaagaaggtggtgttcagttgctgctcacaatagttgataccccaggatttggagatgcagtggataatagtaattgctggcagcctgttatcgactacattgatagtaaatttgaggactacctaaatgcagaatcacgagtgaacagacgtcagatgcctgataacagggtgcagtgttgtttatacttcattgctccttcaggacatggacttaaaccattggatattgagtttatgaagcgtttgcatgaaaaagtgaatatcatcccacttattgccaaagcagacacactcacaccagaggaatgccaacagtttaaaaaacagataatgaaagaaatccaagaacataaaattaaaatatacgaatttccagaaacagatgatgaagaagaaaataaacttgttaaaaagataaaggaccgtttacctcttgctgtggtaggtagtaatactatcattgaagttaatggcaaaagggtcagaggaaggcagtatccttggggtgttgctgaagttgaaaatggtgaacattgtgattttacaatcctaagaaatatgttgataagaacacacatgcaggacttgaaagatgttactaataatgtccactatgagaactacagaagcagaaaacttgcagctgtgacttataatggagttgataacaacaagaataaagggcagctgactaagagccctctggcacaaatggaagaagaaagaagggagcatgtagctaaaatgaagaagatggagatggagatggagcaggtgtttgagatgaaggtcaaagaaaaagttcaaaaactgaaggactctgaagctgagctccagcggcgccatgagcaaatgaaaaagaatttggaagcacagcacaaagaattggaggaaaaacgtcgtcagttcgaggatgagaaagcaaactgggaagctcaacaacgtattttagaacaacagaactcttcaagaaccttggaaaagaacaagaagaaagggaagatcttttaaactctctattgaccaccagttaacgtattagttgccaatatgccagcttggacatcagtgtttgttggatccgtttgaccaatttgcaccagttttatccataatgatggatttaacagcatgacaaaaattatttttttttttgttcttgatggagattaagatgccttgaattgtctagggtgttctgtacttagaaagtaagagctctaagtacctttcctacattttctttttttattaaacagatatcttcagtttaatgcaagagaacattttactgttgtacaatcatgttctggtggtttgattgtttacaggatattccaaaataaaaggactctggaagattttcattgaggataaattgccataatatgatgcaaactgtgcttctctatgataattacaatacaaaggttccattcagtgcagcatatacaataatgtaatttagtctaacacagttgaccctattttttgacacttccattgtttaaaaatacacatggaaaaaaaaaaaaccctatatgcttactgtgcacctagagcttttttataacaacgtctttttgtttgtttgttttggattctttaaatatatattattctcatttagtgccctctttagccagaatctcattactgcttcatttttgtaataacatttaatttagatattttccatatattggcactgctaaaatagaatatagcatctttcatatggtaggaaccaacaaggaaactttcctttaactccctttttacactttatggtaagtagcagggggggaaatgcatttatagatcatttctaggcaaaattgtgaagctaatgaccaacctgtttctacctatatgcagtctctttattttactagaaatgggaatcatggcctcttgaagagaaaaaagtcaccattctgcatttagctgtattcatatattgcatttctgtattttttgtttgtattgtaaaaaattcacataataaacgatgttgtgatgtaaaaaaaaa

SEQ ID NO: 1445 - DNA, 2496 bp, Homo sapiens
ggagtcgagcgagagcctgtggaggagtccgcctgctgtagcgtgcgtaagcaaggcagctacgccgggcggctacgctgcggaatcggcgtaggcgcctttggagaatcggcgggctgcgctccgctggggctggtcgcggagggggggaggggatgtcggtcagtgcgagatccgctgctgctgaggagaggagcgtcaacagcagcaccatggtagctcaacagaagaaccttgaaggctatgtgggatttgccaatctcccaaatcaagtatacagaaaatcggtgaagagaggttttgaattcacgcttatggtagtgggtgaatctggattgggaaagtcgacattaatcaactcattattcctcacagatttgtattctccagagtatccaggtccttctcatagaattaaaaagactgtacaggtggaacaatccaaagttttaatcaaagaaggtggtgttcagttgctgctcacaatagttgataccccaggatttggagatgcagtggataatagtaattgctggcagcctgttatcgactacattgatagtaaatttgaggactacctaaatgcagaatcacgagtgaacagacgtcagatgcctgataacagggtgcagtgttgtttatacttcattgctccttcaggacatggacttaaaccattggatattgagtttatgaagcgtttgcatgaaaaagtgaatatcatcccacttattgccaaagcagacacactcacaccagaggaatgccaacagtttaaaaaacagataatgaaagaaatccaagaacataaaattaaaatatacgaatttccagaaacagatgatgaagaagaaaataaacttgttaaaaagataaaggaccgtttacctcttgctgtggtaggtagtaatactatcattgaagttaatggcaaaagggtcagaggaaggcagtatccttggggtgttgctgaagttgaaaatggtgaacattgtgattttacaatcctaagaaatatgttgataagaacacacatgcaggacttgaaagatgttactaataatgtccactatgagaactacagaagcagaaaacttgcagctgtgacttataatggagttgataacaacaagaataaagggcagctgactaagagccctctggcacaaatggaagaagaaagaagggagcatgtagctaaaatgaagaagatggagatggagatggagcaggtgtttgagatgaaggtcaaagaaaaagttcaaaaactgaaggactctgaagctgagctccagcggcgccatgagcaaatgaaaaagaatttggaagcacagcacaaagaattggaggaaaaacgtcgtcagttcgaggatgagaaagcaaactgggaagctcaacaacgtattttagaacaacagaactcttcaagaaccttggaaaagaacaagaagaaagggaagatcttttaaactctctattgaccaccagttaacgtattagttgccaatatgccagcttggacatcagtgtttgttggatccgtttgaccaatttgcaccagttttatccataatgatggatttaacagcatgacaaaaattatttttttttttgttcttgatggagattaagatgccttgaattgtctagggtgttctgtacttagaaagtaagagctctaagtacctttcctacattttctttttttattaaacagatatcttcagtttaatgcaagagaacattttactgttgtacaatcatgttctggtggtttgattgtttacaggatattccaaaataaaaggactctggaagattttcattgaggataaattgccataatatgatgcaaactgtgcttctctatgataattacaatacaaaggttccattcagtgcagcatatacaataatgtaatttagtctaacacagttgaccctattttttgacacttccattgtttaaaaatacacatggaaaaaaaaaaaaccctatatgcttactgtgcacctagagcttttttataacaacgtctttttgtttgtttgttttggattctttaaatatatattattctcatttagtgccctctttagccagaatctcattactgcttcatttttgtaataacatttaatttagatattttccatatattggcactgctaaaatagaatatagcatctttcatatggtaggaaccaacaaggaaactttcctttaactccctttttacactttatggtaagtagcagggggggaaatgcatttatagatcatttctaggcaaaattgtgaagctaatgaccaacctgtttctacctatatgcagtctctttattttactagaaatgggaatcatggcctcttgaagagaaaaaagtcaccattctgcatttagctgtattcatatattgcatttctgtattttttgtttgtattgtaaaaaattcacataataaacgatgttgtgatgtaaaaaaaaaaaaaaa

SEQ ID NO: 1446 - DNA, 2901 bp, Homo sapiens
gccgggagtcggtgaggcggctgcaggtccctccctgcggagccgctggtccggctggcggagatgtgaccgcgggcccggccggcctgcctcaggcgtcgcgtcagctcccgtgtccgtgcccttaacccacaccgatggcgggatccggctgcgcctggggcgcggagccgccgcgttttctggaggccttcgggcggctgtggcaggtacagagccgtctgggtagcggctcctccgcctcggtgtatcgggttcgctgctgcggcaaccctggctcgccccccggcgccctcaagcagttcttgccgccaggaaccaccggggctgcggcctctgccgccgagtatggtttccgcaaagagagggcggcgctggaacagttgcagggtcacagaaacatcgtgactttgtatggagtgtttacaatccacttttctccaaatgtgccatcacgctgtctgttgcttgaactcctggatgtcagtgtttcggaattgctcttatattccagtcaccagggttgttccatgtggatgatacagcattgtgcccgagatgttttggaggcccttgcttttcttcatcatgagggctatgtccatgcggacctcaaaccacgtaacatattgtggagtgcagagaatgaatgttttaaactcattgactttggacttagcttcaaagaaggcaatcaggatgtaaagtatattcagacagacgggtatcgggctccagaagcagaattgcaaaattgcttggcccaggctggcctgcagagtgatacagaatgtacctcagctgttgatctgtggagcctaggaatcattttactggaaatgttctcaggaatgaaactgaaacatacagtcagatctcaggaatggaaggcaaacagttctgctattattgatcacatatttgccagtaaagcagtggtgaatgccgcaattccagcctatcacctaagagaccttatcaaaagcatgcttcatgatgatccaagcagaagaattcctgctgaaatggcattgtgcagcccattctttagcattccttttgcccctcatattgaagatctggtcatgcttcccactccagtgctaagactgctgaatgtgctggatgatgattatcttgagaatgaagaggaatatgaagatgttgtagaagatgtaaaagaggagtgtcaaaaatatggaccagtggtatctctacttgttccaaaggaaaatcctggcagaggacaagtctttgttgagtatgcaaatgctggtgattccaaagctgcgcagaaattactgactggaaggatgtttgatgggaagtttgttgtggctacattctacccgctgagtgcctacaagaggggatatctgtatcaaaccttgctttaatcagtaacctaaggactgtttcctttttctcctcttccatttcttgggttattccacatatgaatgcaggactacccccttaccattttaagaaggtactttatacatttatttaatcctactaatgtgcagccattgcccaagcagtgactgcgttgcatacatttggcactgagtaggacaagacctctcagctatacattgaggggttttagagcatccatgtgggcaacccttttttgtgcgggagagcaggtgttgctcttcagtatgtagcctaaaaaaatcttaattatttcatggatcatgaagcaaggatgaataatatcatgtcttggtaaatactaacaaatttgttaggtttggtgacatcatttacagattatttctttatgttgtccagtggttcttccttattgttgatatccataagctggcactggatgctctcagtaatgttaagtaattgtcaagcagcagttacctactgtgttcttaacactgagttgtgaattttttcttaaagcagtactgtagtactgaatattcctttaaaggaactgcagtgagcctatctaagtttttttaaattaaggcttttaaaatagaaagctgatgcttgatcttgcacaatttttatgtctagtatgtatgcttgagtgaatgtgtgagtatgaatgattagagaaaatttgagtcagtgtactttatagtgtgaatcctgtgagctaatacagtctatacttatttcttccctacctgtttcacatccgtaagatttaggatatacattttttgagaggtagtctgtctgatacaatgtaaatgacaaaacataattcctgagaggcccagaacaaactggagtctagcctggagttaaattgagacttctaaaatgattggaacaaagactaagttgtgccagatgtaaatcaacccctcttttagtttactttagactttgtattagctcatcttttttgtagtaaatctatagttttaaggtttctcaagatgtggctctacctactatgatgaaaattgaagtgggtcaaaagaattagatgtacagtgaagggaaaagaaaaaaaatgggcgaagagagggtggaaaataaaaggattcttttttcttcctttctgtttctcgtatccctgctccctttttcctccccttccctcattctttgcctctatccttagctgaagacaaactagaggagcagcatcccaggtagtttggcttttgactgcaaggtagttaagaaaggtgtagatataatgaggtagaagtagaaaggaagaaaaactcaaagaattctgaaaaggattcatagcaacataatgtgtccctgagtagaggatgctgctatgcgtgagttcatggacacaagttgattacatggtttttagaattataattatggattcttcttatttcatggtaggttgtctttaaagatataaaaattaggatgcctttatgaagcactgattatacc

SEQ ID NO: 1447 - DNA, 3070 bp, Homo sapiens
aggcagagagcacgaggcccagtgcagaatcattttctgaaccagccaggaaataccggaacccaccaaactttaaacaccagcctaaattattcctgttcttttaagcaggcagcagaaatgacagaaacccgttaacagaaaaaaaaaaaataatgcttttcatttgaactcctgtgcattttctttttaacttatatgtgttcctaattttccttactctttttgtttgtttgtttcttagtgtggtttattgacaatcatttacaatgccgaagagtgctgtagtgagccagcacagtgggtaacacagcaacggagaacagatgcaggtttgaggaatttaacttgctaaaaccttgaactgaagtcttagagattggaacatacgggtttgtataaataggcttttaagccctgtttgcaatgggttactgataggagaaacttgcttgtggaatgtcagctgcgtgagctcactgtcagacaagatggaagaagaagggctggagtgtccaaactcttcctctgaaaaacgctattttcctgaatccctggattccagcgatggggatgaggaagaggttttggcctgtgaggatttggaacttaacccctttgatggattgccatattcatcacgttattataaacttctgaaagaaagagaagatcttcctatatggaaagaaaaatactcctttatggagaacctgcttcaaaatcaaatcgtgattgtttcaggagatgctaaatgtggtaagagcgctcaggttcctcagtggtgtgctgaatattgtctttccatccactaccagcacgggggcgtgatatgcacacaggtccacaagcagactgtggtccagctcgccctgcgggtggcggatgaaatggatgttaacattggtcatgaggttggctacgtgatccctttcgagaactgctgtaccaacgaaacaatcctgaggtattgtactgatgatatgctgcaaagagaaatgatgtccaatccttttttgggtagctatggggtcatcatcttagatgatattcatgaaagaagcattgcaactgatgtgttacttggacttcttaaagatgttttactagcaagaccagaactgaagctcataattaactcctcacctcacctgatcagcaaactcaattcttattatggaaacgtgcctgtcatagaagtgaaaaataaacaccctgtggaggttgtgtaccttagtgaggctcaaaaggattcttttgagtctattttacgccttatctttgaaattcaccactcgggtgagaaaggtgacattgtagtctttctggcctgtgaacaagatattgagaaagtctgtgaaactgtctatcaaggatctaacctaaacccagatcttggagaactggtggttgttcctttgtatccaaaagagaaatgttcattgttcaagccactcgatgaaacagaaaaaagatgccaagtttatcaaagaagagtggtgttaactactagctctggagagtttttgatctggagcaactcagtcagatttgttatcgatgtgggtgtggaaagaagaaaggtgtacaacccgagaataagagcaaactcgctcgtcatgcagcccatcagccagagccaggcagagatacgcaagcagattcttggctcatcttcttcaggaaaatttttctgcctgtacactgaagaatttgcctccaaagacatgacgccactgaagccagcagaaatgcaggaagccaacctaacaagcatggtgctttttatgaagaggatagacattgcgggcctaggccactgtgacttcatgaacagaccagcaccagaaagtttgatgcaggcattggaagacttagattatctggcagcactggataatgatggaaatctttctgaatttggaatcatcatgtcagagtttcctcttgatccacaactctcgaagtctatcttagcgtcctgtgaatttgactgtgtagatgaagtgctaacaatcgcagccatggtaacagctccaaattgcttttcacatgtgccacatggagctgaagaggctgccttgacttgttggaagacatttttacatcccgaaggagatcactttaccctcatcagcatttacaaggcttaccaagacacaactctgaattctagcagtgagtactgtgtggaaaagtggtgtcgtgattacttcctcaactgttcagcactcagaatggcagatgttattcgagctgaactcttagaaattatcaagcgaatcgagcttccctatgcagaacctgcttttggctccaaggaaaacactctaaacataaagaaagctcttctgtccggttactttatgcagattgctcgggatgttgatggatcaggtaactacttaatgctgacacataagcaggttgctcagctgcatcccctgtctggttactcaatcaccaagaagatgccagagtgggtcctcttccataaattcagcatttctgagaacaactacatcaggattacctcagaaatctctcctgaactatttatgcagctggtaccacaatactatttcagtaatctgcctcctagtgaaagtaaggacattctacagcaagtagtggatcacctatcccctgtgtcaacaatgaataaggaacagcaaatgtgtgagacgtgccctgaaactgaacagagatgcactctccagtgactccccagcaaacacaaggtgcagcagggtcccaaaggtagctggatggctgaactgctggatatgggagatacatgacgcgaagacggatttcacatccacaggacggtcttgaagaaaataacactgtgtatattattttaaaataaaaaatagaagtttttattgagttctttaaattactactccatgcttttcttcttcttggaaaagtttttaaatcaaccactcataatttgaccaaaattttaaaaaactggtattttgtaaatgtgtcagagacacatgggacagaaccctactttttgtagaggaacttaatctgaataaagtctgagtttttcagt

SEQ ID NO: 1448 - DNA, 2040 bp, Homo sapiens
ccatggctcagcctctgggtccagagcctcagctcctacctcttccctccttgccagcccctgatgcctgccagacttttgcctctgctggagcccctgcctgaccagcttcccctccctgtctggttgggatttgggggctgagctgtctggggtcccagggccaaccaatgcagtgccggctcccgcggggcctggctggagccctcctcaccctcctgtgcatggggctcctgtgtctgcggtaccacttgaacctgtccccgcagcgggtacaagggacccccgagctgagccagccgaacccggggccccctaagctacagctacacgatgtcttcattgcagtgaagacgacccgggctttccaccgcttgcgcctggagctgctgcttgacacgtgggtttccaggaccagggaacagacatttgtcttcaccgacagcccagacaaaggcctccaggagagactggggtcccaccttgtggtcaccaactgctccgcggaacacagccacccagctctgtcctgcaagatggctgctgagttcgacaccttcttggccagtgggcttaggtggttctgccatgtggacgatgacaactatgtgaacccaagggcgctgctgcagcttctgagagccttcccgctggcccgcgacgtctatgtgggaaggcccagcctgaaccggcccatccatgcctcagagccacagccccacaaccgcacgaggctggtacagttctggtttgccactgggggtgctggcttctgcatcaatcgcaaactggctttgaagatggctccgtgggccagtggctcccgtttcatggacacatctgctctcatccggctgcctgatgactgcaccatgggctatatcattgagtgcaagctgggcggccgcctgcagcccagccccctctttcactcccacctggagaccctgcagctgctgaggactgcacagctcccagaacaggtcaccctcagctacggtgtctttgaggggaaactcaacgtcattaagctacagggccccttctccccggaggaggacccctccagatttcgctccctccattgtctgctctatccagatacaccctggtgtccccagctgggtgcccgatgaatcctgaactgctgggcaaaggttgggcagagacttctgggtgtgccttggctcccaaggtggcactgtgggtccctggcaagtgtcttgtgataggcagtccctggcagggccttcgggtggttggcaagcccaggatctgagtggcaattggcactgaaggcaccccaggcccctgggaggtgagttagacagcccaggggaccaggtggaccaggtggtggccagagaggctccaggggctagactccctcaggaggctgaattgaaaaagggcagggggcacttgagctgggctggggctcaggggtcctaaccctttaggcagtgacatggcctctgggtggggtctggccgttggccctggctaatgtctctcagtcattcccctggggctcaagcgctgggccgcccactcctgcctccctcatctgtgtcccgagttcctgaagggacatgggtggaatgatggcagaatccagggtctgcagcacctgctgttgttgccaaccagtctcccaaagctccttgctccccaccccttgcgaacaggaccagattttgtttggagcctcagcatgccggggcccagatgatggagcataacgggtcccagccaattgtgatgatcctttttgctcatttcccagcctttcttgctgttaggggctaccatgggaccagctctggccagagggaactaagcaaatccaatagagatgtttctggggaaggttttgcagcccactccccatcttcctgctataaatgtgggtgtgatggctggatctggggcagccaccttgctaccatgaaggaaaggccaagacaatcatccacagctattccctccagcatctggttctgtacaaaaattaaatgcttatttgtttaagtcaaaaaa

SEQ ID NO: 1449 - DNA, 7717 bp, Homo sapiens
gccgcgcaagcgcccttggcgcacagttcacctgctgccgttgtcgtcgccgccgcggctcccggggctggatggggggccgaggccagccagtggcacccggaagaaagagacgcggcggcggcgacgccgacaccctcaggacgagtgtccggacttgcccacagcctcaaggaggagacggcgaggcccggcccccgctgtccctggtgtaaagaagtcgccgtagccgtcgcggccgggactccccgggctctcgcccttcaggtttcgttgacactcaggaccgtacgtacgctgcgccatgttcaagaaactgaagcaaaagatcagcgaggagcagcagcagctccagcaggcgctggctcctgctcaggcgtcctccaattcttcaacaccaacaagaatgaggagcaggacatcttcatttacagagcaacttgatgaaggtacacccaatagagagtcaggtgacacacagtcttttgcacagaagctccagctccgggtgccctccgtggagtctttgtttcgaagtccgataaaggaatctctattccggtcttcttctaaagagtctttggtacgaacatcttccagagaatccctgaatcgacttgacctggacagttctactgccagttttgatccaccctctgatatggatagcgaggctgaagacttggtagggaattcagacagtctcaacaaagaacagttgattcagcggttgcgaagaatggaacgaagcttaagtagctacaggggaaaatattctgagcttgttacagcttatcagatgcttcagagagagaagaaaaagctacaaggtatattaagtcagagtcaggataaatcacttcggagaatagcagaattaagagaggagctccaaatggaccagcaggcaaagaaacatctgcaagaggagtttgatgcatctttagaggagaaagatcagtatatcagtgttctccaaactcaggtttctctactgaaacaacgattacgaaatggcccgatgaatgttgatgtactgaaaccacttcctcagctggaaccacaggctgaagtcttcactaaagaagagaatccagaaagtgatggagagccagtagtggaagatggaacttctgtaaaaacactggaaacactccagcaaagagtgaagcgtcaagagaacctacttaagcgttgtaaggaaacaattcagtcacataaggaacaatgtacactattaactagtgaaaaagaagctctgcaagaacaactggatgaaagacttcaagaactagaaaagataaaggaccttcatatggccgagaagactaaacttatcactcagttgcgtgatgcaaagaacttaattgaacagcttgaacaagataagggaatggtaatcgcagagacaaaacgtcagatgcatgaaaccctggaaatgaaagaagaagaaattgctcaactccgtagtcgcatcaaacagatgactacccagggagaggaattacgggaacagaaagaaaagtccgaaagagctgcttttgaggaacttgaaaaagctttgagtacagcccaaaaaacagaggaagcacggagaaaactgaaggcagaaatggatgaacaaataaaaactatcgaaaaaacaagtgaggaggaacgcatcagtcttcaacaggaattaagtcgggtgaaacaggaggttgttgatgtaatgaaaaaatcctcagaagaacaaattgctaagctacagaagcttcatgaaaaggagctggccagaaaagagcaggaactgaccaagaagcttcagacccgagaaagggaatttcaggaacaaatgaaagtagctcttgaaaagagtcaatcagaatatttgaagatcagccaagaaaaagaacagcaagaatctttggccctagaagagttagagttgcagaaaaaagcaatcctcacagaaagtgaaaataaacttcgggaccttcagcaagaagcagagacttacagaactagaattcttgaattggaaagttctttggaaaaaagcttacaagaaaacaaaaatcagtcaaaagatttggctgttcatctggaagctgaaaaaaataagcacaataaggagattacagtcatggttgaaaaacacaagacagaattggaaagccttaagcatcagcaggatgccctttggactgaaaaactccaagtcttaaagcaacaatatcagactgaaatggaaaaacttagggaaaagtgtgaacaagaaaaagaaacattgttgaaagacaaagagattatcttccaggcccacatagaagaaatgaatgaaaagactttagaaaagcttgatgtgaagcaaacagaactagaatcattatcttctgaactgtcagaagtattaaaagcccgtcacaaactagaagaggaactttctgttctgaaagatcaaacagataaaatgaagcaggaattagaggccaagatggatgaacagaaaaatcatcaccagcagcaagttgacagtatcattaaagaacacgaggtatctatccagaggactgagaaggcattaaaagatcaaattaatcaacttgagcttctcttgaaggaaagggacaagcatttgaaagagcatcaggctcatgtagaaaatttagaggcagatattaaaaggtctgaaggggaactccagcaggcatctgctaagctggacgtttttcagtcttaccagagtgccacacatgagcagacaaaagcatatgaggaacagttggcccaattgcagcagaagttgttggatttggaaacagaaagaattcttcttaccaaacaggttgctgaagttgaagcacaaaagaaagatgtttgtactgagttagatgctcacaaaatccaggtgcaggacttaatgcagcaacttgaaaaacaaaatagtgaaatggagcaaaaagtaaaatctttaacccaagtctatgagtccaaacttgaagatggtaacaaagaacaggaacagacaaagcaaatcttggtggaaaaggaaaatatgattttacaaatgagagaaggacagaagaaagaaattgagatactcacacagaaattgtcagccaaggaggacagtattcatattttgaatgaggaatatgaaaccaaatttaaaaaccaagaaaaaaagatggaaaaagttaagcagaaagcaaaggagatgcaagaaacgttaaagaaaaaattactggatcaggaagccaaacttaagaaagagcttgaaaatactgctctagagcttagtcagaaagaaaaacagtttaatgccaaaatgctggaaatggcacaggctaactcagctggaatcagtgatgcagtgtcaagactggaaacaaaccaaaaagaacaaatagaaagtcttactgaggttcatcgacgagaactcaatgatgtcatatcaatctgggaaaagaaacttaatcagcaagctgaagaacttcaggaaatacatgaaatccaattacaggaaaaagaacaagaggtagcagaactgaaacaaaagatcctcctatttgggtgtgaaaaagaagagatgaacaaggaaataacatggctgaaggaagaaggtgttaagcaggatacaacattaaatgaattacaggaacagttaaagcagaagtctgcccatgtgaattctcttgcacaagatgaaactaaactgaaagctcatcttgaaaagctagaggttgacttgaataagtctctgaaggaaaatacttttcttcaagagcagctagttgaactgaagatgctggcagaagaagataagcggaaggtttctgagttgactagcaagttgaaaaccacagatgaagaattccagagtttgaaatcttcacatgaaaaaagtaacaaaagcctagaggacaagagcttggaatttaaaaaactgtctgaggaactagcgattcagctagatatttgctgtaagaaaaccgaagccttattagaagctaaaacaaatgagctaatcaacattagtagtagtaaaactaatgccattctttctaggatttctcattgtcagcaccgtacaactaaagttaaggaggcactgttaattaaaacttgcacagtttctgaattagaagcacaacttagacagttgacagaggagcaaaatacactaaatatttcttttcaacaggctactcatcagttagaagaaaaagaaaatcaaattaagagcatgaaggctgatattgaaagtcttgtaacagaaaaagaagccttacagaaggaaggaggcaatcagcaacaggctgcttctgaaaaggagtcttgtataacacagttgaagaaagagttatctgaaaacatcaatgctgtcacattgatgaaagaagagcttaaagaaaaaaaagttgagattagcagtcttagtaaacaactaactgatttgaatgttcagcttcaaaatagcatcagcctatccgaaaaagaagcagccatttcatcactaagaaagcagtatgatgaagaaaaatgtgaattgctggatcaggtgcaagatttatcttttaaagttgacactctgagtaaagagaaaatttctgctcttgagcaggtagatgactggtccaataaattctcagaatggaagaagaaagcacagtcaagatttacacagcatcaaaacactgttaaagaattgcagatccagcttgagttaaaatcaaaggaagcttatgaaaaggatgagcagataaatttattgaaggaagagcttgatcagcaaaataaaagatttgattgtttaaagggtgaaatggaagacgacaagagcaagatggagaaaaaggagtctaatttagaaacagagttaaagtctcaaacagcaagaattatggaattagaggaccatattacccagaaaactattgaaatagagtccttaaatgaagttcttaaaaattacaatcaacaaaaggatattgaacacaaagaattggttcagaaacttcaacattttcaagagttaggagaagaaaaggacaacagggttaaagaagctgaagaaaaaatcttaacacttgaaaaccaagtttattccatgaaagctgaacttgaaactaagaagaaagaattagaacatgtgaatttaagtgtgaaaagcaaagaggaggagttaaaggcattggaagataggcttgagtcagaaagtgctgcaaaattagcagagttgaagagaaaagctgaacaaaaaattgctgccattaagaagcagttgttatctcaaatggaagagaaagaagaacagtataaaaaaggtacagaaagccatttgagtgagctaaatacaaaattgcaggaaagagaaagggaagttcacatcttggaagaaaaacttaagtcagtggaaagttcacagtcagaaacattaattgtacccagatcagcaaaaaatgtggcagcatatactgaacaagaagaagcagattcccaaggctgtgtgcagaagacatatgaagaaaaaatcagtgttttacaaagaaacttaactgaaaaagaaaagctattgcagagggtagggcaggaaaaagaagagacagtttcttctcattttgaaatgcgatgccaataccaggagcgcttaataaagctagaacatgctgaggcaaagcaacatgaagatcaaagtatgataggtcatcttcaagaggagcttgaagaaaaaaacaagaaatattccttgatagtagcccagcatgtggaaaaagaaggaggtaaaaataacatacaggcaaagcaaaacttggaaaatgtgtttgacgacgtccagaaaaccctccaggagaaggaactaacctgtcagattttggagcaaaagataaaagagctggattcctgcttagtaagacagaaagaagtacatagagttgaaatggaagagttgacctcaaaatatgaaaaattacaggctttacaacagatggatggaagaaataaacccacagaacttttggaagaaaacactgaagaaaagtccaaatcacatttggtccaacccaaattgcttagtaacatggaagcccagcacaatgatctggagtttaaattagccggggcagaacgggagaaacagaaactgggcaaggagattgttagattgcagaaagaccttcgaatgttgagaaaggagcatcagcaagaattggaaatactaaagaaagaatatgatcaagaaagggaagagaaaatcaaacaggagcaggaagatcttgaactgaagcacaattccacattaaaacagctgatgagggagtttaatacacagctggcacaaaaggaacaagagctggaaatgaccataaaagaaactatcaataaggcccaggaggtggaggctgaacttttagaaagccatcaagaagagacaaatcagttacttaaaaaaattgctgagaaagatgatgatctaaaacgaacagccaaaagatatgaagaaatccttgatgctcgtgaagaagaaatgactgcaaaagtaagggacctgcagactcaacttgaggagctgcagaagaaataccagcaaaagctagagcaggaggagaaccctggcaatgataatgtaacaattatggagctacagacacagctagcacagaagacgactttaatcagtgattcgaaattgaaagagcaagagttcagagaacagattcacaatttagaagaccgtttgaagaaatatgaaaagaatgtatatgcaacaactgtggggacaccttacaaaggtggcaatttgtaccatacggatgtctcactctttggagaacctaccgaatttgagtatttgcgaaaagtgctttttgagtatatgatgggtcgtgagactaagaccatggcaaaagttataaccaccgtactgaagttccctgatgatcagactcagaaaattttggaaagagaagatgctcggctgatgtttacttcacctcgcagtggtatcttctgagtaaaccatcagtctgtgcttagttaacatgtgtcatggctccgatcttcatcttgaagaagagtgacattgggtgactgctgcttggaaaactgtccacacttgctactctttgagaatgaagttgtcattcagggcccctcatgtagccaaaagaccaagaaaaatctggcccacagataagttgcagactgcctttaaaatagattttatcagtggagaaatggtgatagttttttcttcagttttctcttgggaagagttttatgttgtttaaaagatattttgataacttaacctgctttatgggcttacataatattcctttcatccattctttttaaagaacggcttacctttcctatttatttttagggtgattttttaaaaagacttgtgcaatacattttgaggtgaaacttagtggattttttctgataaattagagcatttaattgactattttattcaggttgatctgttgaatatttgctaaagaccagttctttaagctaagacatgtaaaaaatcccaaatggcagtacctcattgtttacttagcttttgtacttatatttttcagaggaaaaaacactactgtaaattgtgaatagccaatacataactgtattgtatgcaaatctgtgattgttggcagtgtcatctctgagaaacagataaataaagtttatttactatataacaaaaaaaaaaaaaaaa

SEQ ID NO: 1450 - DNA, 549 bp, Homo sapiens
cctttcctgttaggcgagagctgcgaaaggcgagagctgcgaagggccaggtgtcgggcgctgtttctcgttttcatcatatagacaaaacagccctgctgcaaagatggtcaacgtacctaaaacccgaagaaccttctgtaagaagtgtggcaagcatcagcctcacaaagtgacacagtataagaagggcaaggattctttgtatgcccagggaaggaggcgctatgatcggaagcagagtggctatggtgggcagacaaagccaattttccggaagaaggctaagaccacaaagaagattgtgctaaggctggaatgtgttgagcctaactgcagatccaagaggatgctggccattaagagatgcaagcattttgaactgggaggagataagaagagaaagggccaagtgatccagttctaaactttgggatatttttcttcaattttgaagagaaaatggtgaagccatagaaaagttacccgagggaaaataaatacagtgatattcttacgcaaaaaaaaaaaaaaaaaaaaaaaaaaaaa

SEQ ID NO: 1451 - DNA, 4702 bp, Homo sapiens
acccccgagaaagcaacccagcgcgccgcccgctcctcacgtgtccctcccggccccggggccacctcacgttctgcttccgtctgacccctccgacttccggtaaagagtccctatccgcacctccgctcccacccggcgcctcggcgcgcccgccctccgatgcgctcagcggccgcagctcctcggagtcccgcggtggccaccgagtctcgccgcttcgccgcagccaggtggcccgggtggcgctcgctccagcggccggcgcggcggagcgggcggggcggcggtggcgcggccccgggaccgtatccctccgccgcccctcccccgcccggccccggcccccctccctcccggcagagctcgcctccctccgcctcagactgttttggtagcaacggcaacggcggcggcgcgtttcggcccggctcccggcggctccttggtctcggcgggcctccccgccccttcgtcgtcgtccttctccccctcgccagcccgggcgcccctccggccgcgccaacccgcgcctccccgctcggcgcccgtgcgtccccgccgcgttccggcgtctccttggcgcgcccggctcccggctgtccccgcccggcgtgcgagccggtgtatgggcccctcaccatgtcgctgaagccccagcagcagcagcagcagcagcagcagcagcagcagcagcaacagcagcagcagcagcagcagcagcagccgccgcccgcggctgccaatgtccgcaagcccggcggcagcggccttctagcgtcgcccgccgccgcgccttcgccgtcctcgtcctcggtctcctcgtcctcggccacggctccctcctcggtggtcgcggcgacctccggcggcgggaggcccggcctgggcagaggtcgaaacagtaacaaaggactgcctcagtctacgatttcttttgatggaatctatgcaaatatgaggatggttcatatacttacatcagttgttggctccaaatgtgaagtacaagtgaaaaatggaggtatatatgaaggagtttttaaaacttacagtccgaagtgtgatttggtacttgatgccgcacatgagaaaagtacagaatccagttcggggccgaaacgtgaagaaataatggagagtattttgttcaaatgttcagactttgttgtggtacagtttaaagatatggactccagttatgcaaaaagagatgcttttactgactctgctatcagtgctaaagtgaatggcgaacacaaagagaaggacctggagccctgggatgcaggtgaactcacagccaatgaggaacttgaggctttggaaaatgacgtatctaatggatgggatcccaatgatatgtttcgatataatgaagaaaattatggtgtagtgtctacgtatgatagcagtttatcttcgtatacagtgcccttagaaagagataactcagaagaatttttaaaacgggaagcaagggcaaaccagttagcagaagaaattgagtcaagtgcccagtacaaagctcgagtggccctggaaaatgatgataggagtgaggaagaaaaatacacagcagttcagagaaattccagtgaacgtgaggggcacagcataaacactagggaaaataaatatattcctcctggacaaagaaatagagaagtcatatcctggggaagtgggagacagaattcaccgcgtatgggccagcctggatcgggctccatgccatcaagatccacttctcacacttcagatttcaacccgaattctggttcagaccaaagagtagttaatggaggtgttccctggccatcgccttgcccatctccttcctctcgcccaccttctcgctaccagtcaggtcccaactctcttccacctcgggcagccacccctacacggccgccctccaggcccccctcgcggccatccagacccccgtctcacccctctgctcatggttctccagctcctgtctctactatgcctaaacgcatgtcttcagaagggcctccaaggatgtccccaaaggcccagcgacatcctcgaaatcacagagtttctgctgggaggggttccatatccagtggcctagaatttgtatcccacaacccacccagtgaagcagctactcctccagtagcaaggaccagtccctcggggggaacgtggtcatcagtggtcagtggggttccaagattatcccctaaaactcatagacccaggtctcccagacagaacagtattggaaatacccccagtgggccagttcttgcttctccccaagctggtattattccaactgaagctgttgccatgcctattccagctgcatctcctacgcctgctagtcctgcatcgaacagagctgttaccccttctagtgaggctaaagattccaggcttcaagatcagaggcagaactctcctgcagggaataaagaaaatattaaacccaatgaaacatcacctagcttctcaaaagctgaaaacaaaggtatatcaccagttgtttctgaacatagaaaacagattgatgatttaaagaaatttaagaatgattttaggttacagccaagttctacttctgaatctatggatcaactactaaacaaaaatagagagggagaaaaatcaagagatttgatcaaagacaaaattgaaccaagtgctaaggattctttcattgaaaatagcagcagcaactgtaccagtggcagcagcaagccgaatagccccagcatttccccttcaatacttagtaacacggagcacaagaggggacctgaggtcacttcccaaggggttcagacttccagcccagcatgtaaacaagagaaagacgataaggaagagaagaaagacgcagctgagcaagttaggaaatcaacattgaatcccaatgcaaaggagttcaacccacgttccttctctcagccaaagccttctactaccccaacttcacctcggcctcaagcacaacctagcccatctatggtgggtcatcaacagccaactccagtttatactcagcctgtttgttttgcaccaaatatgatgtatccagtcccagtgagcccaggcgtgcaacctttatacccaatacctatgacgcccatgccagtgaatcaagccaagacatatagagcagtaccaaatatgccccaacagcggcaagaccagcatcatcagagtgccatgatgcacccagcgtcagcagcgggcccaccgattgcagccaccccaccagcttactccacgcaatatgttgcctacagtcctcagcagttcccaaatcagccccttgttcagcatgtgccacattatcagtctcagcatcctcatgtctatagtcctgtaatacagggtaatgctagaatgatggcaccaccaacacacgcccagcctggtttagtatcttcttcagcaactcagtacggggctcatgagcagacgcatgcgatgtatgcatgtcccaaattaccatacaacaaggagacaagcccttctttctactttgccatttccacgggctcccttgctcagcagtatgcgcaccctaacgctaccctgcacccacatactccacaccctcagccttcagctacccccactggacagcagcaaagccaacatggtggaagtcatcctgcacccagtcctgttcagcaccatcagcaccaggccgcccaggctctccatctggccagtccacagcagcagtcagccatttaccacgcggggcttgcgccaactccaccctccatgacacctgcctccaacacgcagtcgccacagaatagtttcccagcagcacaacagactgtctttacgatccatccttctcacgttcagccggcgtataccaacccaccccacatggcccacgtacctcaggctcatgtacagtcaggaatggttccttctcatccaactgcccatgcgccaatgatgctaatgacgacacagccacccggcggtccccaggccgccctcgctcaaagtgcactacagcccattccagtctcgacaacagcgcatttcccctatatgacgcacccttcagtacaagcccaccaccaacagcagttgtaaggctgccctggaggaaccgaaaggccaaattccctcctcccttctactgcttctaccaactggaagcacagaaaactagaatttcatttattttgtttttaaaatatatatgttgatttcttgtaacatccaataggaatgctaacagttcacttgcagtggaagatacttggaccgagtagaggcatttaggaacttgggggctattccataattccatatgctgtttcagagtcccgcaggtaccccagctctgcttgccgaaactggaagttatttattttttaataacccttgaaagtcatgaacacatcagctagcaaaagaagtaacaagagtgattcttgctgctattactgctaaaaaaaaaaaaaaaaaaaaatcaagacttggaacgcccttttactaaacttgacaaagtttcagtaaattcttaccgtcaaactgacggattattatttataaatcaagtttgatgaggtgatcactgtctacagtggttcaacttttaagttaagggaaaaacttttactttgtagataatataaaataaaaacttaaaaaaaatttaaaaaataaaaaaagttttaaaaactga

SEQ ID NO: 1452 - DNA, 971 bp, Homo sapiens
gcactgtgcgtcatgtaccagcgccggaagttggtctcgacacctggactagccgggttgtatttggaaacgcggagtgagtttttccgtgctgtgtaggggctaacaatggacacccagaaggacgttcaacctccaaagcagcaaccaatgatatatatctgtggagagtgtcacacagaaaatgaaataaaatctagggatccaatcagatgcagagaatgtggatacagaataatgtacaagaaaaggactaaaagattggtcgtttttgatgctcgatgaatgctgggaattcagaggaatgtcttcacttatacttggatttgctctcttcccatttctgattgttgtatagctttcgattttgcttacagtagttcccccttatcttcgggagatacattccaaggcccccagtgaactcctgaaacctcaaacagtaccaaacctttatacactgttttttccatatatatatacctatgataaagtataatgtataaattaagcatagcaagagattaataataatgtaatagaacaatgataacatactataataaaagttatgtgaatgtggttggtctctcttgctttcaaaatatcttcttgtacagtactcacctattttagaatgtggttgactacaggtaaccaaaaccacagaaagggaaactttggatgaggggggcactactgtacttaggaatacaactatatacatatgattttatttttaagaccatattatatttgggtatctactaatattttgtataaagcaattttttgttccattacgtgactttttgttttattgtatatgtaatttaacacacaataaagggtaaagttgcttccccaaaccacacttttaatcaaaacctagaatcatctgcagtccttgttaaaaatgcaggtttctagaaccctctgaagttctgattaaataaatttattgcaaacca

SEQ ID NO: 1453 - DNA, 4689 bp, Homo sapiens
gagcgcgcacgtcccggagcccatgccgaccgcaggcgccgtatccgcgctcgtctagcagccccggttacgcggttgcacgtcggccccagccctgaggagccggaccgatgtggaaactgctgcccgccgcgggcccggcaggaggagaaccatacagacttttgactggcgttgagtacgttgttggaaggaaaaactgtgccattctgattgaaaatgatcagtcgatcagccgaaatcatgctgtgttaactgctaacttttctgtaaccaacctggtatagaaaaacattttggaaatttctacagaaaaagtaaaattgttactagtcaaacagatgaaatccctgtattgacattaaaagataattctaagtatggtacctttgttaatgaggaaaaaatgcagaatggcttttcccgaactttgaagtcgggggatggtattacttttggagtgtttggaagtaaattcagaatagagtatgagcctttggttgcatgctcttcttgtttagatgtctctgggaaaactgctttaaatcaagctatattgcaacttggaggatttactgtaaacaattggacagaagaatgcactcaccttgtcatggtatcagtgaaagttaccattaaaacaatatgtgcactcatttgtggacgtccaattgtaaagccagaatattttactgaattcctgaaagcagttgagtccaagaagcagcctccacaaattgaaagtttttacccacctcttgatgaaccatctattggaagtaaaaatgttgatctgtcaggacggcaggaaagaaaacaaatcttcaaagggaaaacatttatatttttgaatgccaaacagcataagaaattgagttccgcagttgtctttggaggtggggaagctaggttgataacagaagagaatgaagaagaacataatttctttttggctccgggaacgtgtgttgttgatacaggaataacaaactcacagaccttaattcctgactgtcagaagaaatggattcagtcaataatggatatgctccaaaggcaaggtcttagacctattcctgaagcagaaattggattggcggtgattttcatgactacaaagaattactgtgatcctcagggccatcccagtacaggattaaagacaacaactccaggaccaagcctttcacaaggcgtgtcagttgatgaaaaactaatgccaagcgccccagtgaacactacaacatacgtagctgacacagaatcagagcaagcagatacatgggatttgagtgaaaggccaaaagaaatcaaagtctccaaaatggaacaaaaattcagaatgctttcacaagatgcacccactgtaaaggagtcctgcaaaacaagctctaataataatagtatggtatcaaatactttggctaagatgagaatcccaaactatcagctttcaccaactaaattgccaagtataaataaaagtaaagatagggcttctcagcagcagcagaccaactccatcagaaactactttcagccgtctaccaaaaaaagggaaagggatgaagaaaatcaagaaatgtcttcatgcaaatcagcaagaatagaaacgtcttgttctcttttagaacaaacacaacctgctacaccctcattgtggaaaaataaggagcagcatctatctgagaatgagcctgtggacacaaactcagacaataacttatttacagatacagatttaaaatctattgtgaaaaattctgccagtaaatctcatgctgcagaaaagctaagatcaaataaaaaaagggaaatggatgatgtggccatagaagatgaagtattggaacagttattcaaggacacaaaaccagagttagaaattgatgtgaaagttcaaaaacaggaggaagatgtcaatgttagaaaaaggccaaggatggatatagaaacaaatgacactttcagtgatgaagcagtaccagaaagtagcaaaatatctcaagaaaatgaaattgggaagaaacgtgaactcaaggaagactcactatggtcagctaaagaaatatctaacaatgacaaacttcaggatgatagtgagatgcttccaaaaaagctgttattgactgaatttagatcactggtgattaaaaactctacttccagaaatccatctggcataaatgatgattatggtcaactaaaaaatttcaagaaattcaaaaaggtcacatatcctggagcaggaaaacttccacacatcattggaggatcagatctaatagctcatcatgctcgaaagaatacagaactagaagagtggctaaggcaggaaatggaggtacaaaatcaacatgcaaaagaagagtctcttgctgatgatctttttagatacaatccttatttaaaaaggagaagataactgaggattttaaaaagaagccatggaaaaacttcctagtaagcatctacttcaggccaacaaggttatatgaatatatagtgtatagaagcgatttaagttacaatgttttatggcctaaatttattaaataaaatgcacaaaactttgattcttttgtatgtaacaattgtttgttctgttttcaggctttgtcattgcatctttttttcatttttaaatgtgttttgtttattaaatagttaatatagtcacagttcaaaattctaaatgtacgtaaggtaaagactaaagtcacccttccaccattgtcctagctacttggttcccctcagaaaaaaattcatgatactcatttcttatgaatctttccagggatttttgagtcctattcaaattcctatttttaaataatttcctacacaaatgatagcataacatatgcagtgttctacaccttgcttttttacttagtagattaaaaattataggaatatcaatataatgtttttaatattttttcttttccattatgctgtagtcttacctaaactctggtgatccaaacaaaatggcttcagtggtgcagatgtcacctacatgttattctagtactagaaactgaagaccatgtggagacttcatcaaacatgggtttagttttcaccagaatggaaagacctgtacccctttttggtggtcttactgagctgggtgggtgtctgttttgagcttatttagagtcctagttttcctacttataaagtagaaatggtgagattgttttctttttctaccttaaagggagatggtaagaaacaatgaatgtcttttttcaaactttattgacaagtgattttcaagtctgtgttcaaaaatatattcatgtacctgtgatccagcaagaagggagttccagtcaagagtcactacaactgattagttgtttagagaatgagaaatggaacagtgaggaatggaggccatatttccatgacttcccttgtaaacagaagcaacagaagggacaagaggctggcctctacatcactctcaccttccaaatcttgtggaagtgcatctacttgccagaaccaaattaacttacttccaagttctggctgcttgcaggtggaactccagctgcaagggagttagggaaatgaaggtctttttttaaaagcttctcagccttcctagggaacagaaattgggtgagccaatctgcaatttctactacaggcattgagaccagttagattattgaaatattatagagagttatgaacacttaaattatgatagtggtatgacattggatagaacatgggatactttagaagtagaattgacagggcatattagttgatgaaatggagtcatttgagtctcttaatagccatgtatcataattaccaagtgaagctggtggaacatatggtctccattttacagttaaggaatataatggacagattaatattgttctctgtcatgcccacaatccctttctaaggaagactgccctactatagcagtttttatatttgtcaatttatgaatataatgaatgagagttctggtacctcctgtctttacaaatattggtgttgtcagtatttttcctttttaaccattccaatcggtgtgtagtgatgtttcattttggttttaatttgtatatccctgatagctataattgggtcatagaaattctttatacattctagatgcaagtctcttgtcggatatatgtattgagatattacacctagtctgtggcttgactgttttctttatgtcttttgatgaatagaagttttaaattttgacaaggtcaaatttatttttttcttttgtttgatattttttctctccaatttaaccccaagatttcagatattctgctctattatataaactttatatttttatatttgtgatctaccttgaattgatatgtatgttgtgaattatggatcagggttctttttttcccccatacaagtatccagtcattgtaacactgtttattgaaagaattatcctttcctcattaaattaccttgccaattagtaaaaaatcaattaaccataatggtggatctgtttctggactttctgtttggttacactgaaatgtttgtccatccttgcactcactcataccatactgccttgaattactgtagctgcatagatgctccttaagttgggattacattgtaataaacgcaatgtaagttaaaaaaaaaaaaaaaaaa

SEQ ID NO: 1454 - DNA, 4639 bp, Homo sapiens
gagcgcgcacgtcccggagcccatgccgaccgcaggcgccgtatccgcgctcgtctagcagccccggttacgcggttgcacgtcggccccagccctgaggagccggaccgatgtggaaactgctgcccgccgcgggcccggcaggaggagaaccatacagacttttgactggcgttgagtacgttgttggaaggaaaaactgtgccattctgattgaaaatgatcagtcgatcagccgaaatcatgctgtgttaactgctaacttttctgtaaccaacctgagtcaaacagatgaaatccctgtattgacattaaaagataattctaagtatggtacctttgttaatgaggaaaaaatgcagaatggcttttcccgaactttgaagtcgggggatggtattacttttggagtgtttggaagtaaattcagaatagagtatgagcctttggttgcatgctcttcttgtttagatgtctctgggaaaactgctttaaatcaagctatattgcaacttggaggatttactgtaaacaattggacagaagaatgcactcaccttgtcatggtatcagtgaaagttaccattaaaacaatatgtgcactcatttgtggacgtccaattgtaaagccagaatattttactgaattcctgaaagcagttgagtccaagaagcagcctccacaaattgaaagtttttacccacctcttgatgaaccatctattggaagtaaaaatgttgatctgtcaggacggcaggaaagaaaacaaatcttcaaagggaaaacatttatatttttgaatgccaaacagcataagaaattgagttccgcagttgtctttggaggtggggaagctaggttgataacagaagagaatgaagaagaacataatttctttttggctccgggaacgtgtgttgttgatacaggaataacaaactcacagaccttaattcctgactgtcagaagaaatggattcagtcaataatggatatgctccaaaggcaaggtcttagacctattcctgaagcagaaattggattggcggtgattttcatgactacaaagaattactgtgatcctcagggccatcccagtacaggattaaagacaacaactccaggaccaagcctttcacaaggcgtgtcagttgatgaaaaactaatgccaagcgccccagtgaacactacaacatacgtagctgacacagaatcagagcaagcagatacatgggatttgagtgaaaggccaaaagaaatcaaagtctccaaaatggaacaaaaattcagaatgctttcacaagatgcacccactgtaaaggagtcctgcaaaacaagctctaataataatagtatggtatcaaatactttggctaagatgagaatcccaaactatcagctttcaccaactaaattgccaagtataaataaaagtaaagatagggcttctcagcagcagcagaccaactccatcagaaactactttcagccgtctaccaaaaaaagggaaagggatgaagaaaatcaagaaatgtcttcatgcaaatcagcaagaatagaaacgtcttgttctcttttagaacaaacacaacctgctacaccctcattgtggaaaaataaggagcagcatctatctgagaatgagcctgtggacacaaactcagacaataacttatttacagatacagatttaaaatctattgtgaaaaattctgccagtaaatctcatgctgcagaaaagctaagatcaaataaaaaaagggaaatggatgatgtggccatagaagatgaagtattggaacagttattcaaggacacaaaaccagagttagaaattgatgtgaaagttcaaaaacaggaggaagatgtcaatgttagaaaaaggccaaggatggatatagaaacaaatgacactttcagtgatgaagcagtaccagaaagtagcaaaatatctcaagaaaatgaaattgggaagaaacgtgaactcaaggaagactcactatggtcagctaaagaaatatctaacaatgacaaacttcaggatgatagtgagatgcttccaaaaaagctgttattgactgaatttagatcactggtgattaaaaactctacttccagaaatccatctggcataaatgatgattatggtcaactaaaaaatttcaagaaattcaaaaaggtcacatatcctggagcaggaaaacttccacacatcattggaggatcagatctaatagctcatcatgctcgaaagaatacagaactagaagagtggctaaggcaggaaatggaggtacaaaatcaacatgcaaaagaagagtctcttgctgatgatctttttagatacaatccttatttaaaaaggagaagataactgaggattttaaaaagaagccatggaaaaacttcctagtaagcatctacttcaggccaacaaggttatatgaatatatagtgtatagaagcgatttaagttacaatgttttatggcctaaatttattaaataaaatgcacaaaactttgattcttttgtatgtaacaattgtttgttctgttttcaggctttgtcattgcatctttttttcatttttaaatgtgttttgtttattaaatagttaatatagtcacagttcaaaattctaaatgtacgtaaggtaaagactaaagtcacccttccaccattgtcctagctacttggttcccctcagaaaaaaattcatgatactcatttcttatgaatctttccagggatttttgagtcctattcaaattcctatttttaaataatttcctacacaaatgatagcataacatatgcagtgttctacaccttgcttttttacttagtagattaaaaattataggaatatcaatataatgtttttaatattttttcttttccattatgctgtagtcttacctaaactctggtgatccaaacaaaatggcttcagtggtgcagatgtcacctacatgttattctagtactagaaactgaagaccatgtggagacttcatcaaacatgggtttagttttcaccagaatggaaagacctgtacccctttttggtggtcttactgagctgggtgggtgtctgttttgagcttatttagagtcctagttttcctacttataaagtagaaatggtgagattgttttctttttctaccttaaagggagatggtaagaaacaatgaatgtcttttttcaaactttattgacaagtgattttcaagtctgtgttcaaaaatatattcatgtacctgtgatccagcaagaagggagttccagtcaagagtcactacaactgattagttgtttagagaatgagaaatggaacagtgaggaatggaggccatatttccatgacttcccttgtaaacagaagcaacagaagggacaagaggctggcctctacatcactctcaccttccaaatcttgtggaagtgcatctacttgccagaaccaaattaacttacttccaagttctggctgcttgcaggtggaactccagctgcaagggagttagggaaatgaaggtctttttttaaaagcttctcagccttcctagggaacagaaattgggtgagccaatctgcaatttctactacaggcattgagaccagttagattattgaaatattatagagagttatgaacacttaaattatgatagtggtatgacattggatagaacatgggatactttagaagtagaattgacagggcatattagttgatgaaatggagtcatttgagtctcttaatagccatgtatcataattaccaagtgaagctggtggaacatatggtctccattttacagttaaggaatataatggacagattaatattgttctctgtcatgcccacaatccctttctaaggaagactgccctactatagcagtttttatatttgtcaatttatgaatataatgaatgagagttctggtacctcctgtctttacaaatattggtgttgtcagtatttttcctttttaaccattccaatcggtgtgtagtgatgtttcattttggttttaatttgtatatccctgatagctataattgggtcatagaaattctttatacattctagatgcaagtctcttgtcggatatatgtattgagatattacacctagtctgtggcttgactgttttctttatgtcttttgatgaatagaagttttaaattttgacaaggtcaaatttatttttttcttttgtttgatattttttctctccaatttaaccccaagatttcagatattctgctctattatataaactttatatttttatatttgtgatctaccttgaattgatatgtatgttgtgaattatggatcagggttctttttttcccccatacaagtatccagtcattgtaacactgtttattgaaagaattatcctttcctcattaaattaccttgccaattagtaaaaaatcaattaaccataatggtggatctgtttctggactttctgtttggttacactgaaatgtttgtccatccttgcactcactcataccatactgccttgaattactgtagctgcatagatgctccttaagttgggattacattgtaataaacgcaatgtaagttaaaaaaaaaaaaaaaaaa

SEQ ID NO: 1455 - DNA, 2280 bp, Homo sapiens
gtgcgggtttcggttggaggactcgttggggaggtggcctgcgcttgtagagactgcatccccgagacgatggcggagggagataatcgcagcaccaacctgctggctgcagagactgcaagtctggaagaacagctgcaaggatggggagaagtgatgctgatggctgataaagtcctccgatgggaaagagcctggtttccacctgccatcatgggtgtggtttctttggtgtttctgattatctactatctagatccatctgttctgtccggcgtttcctgttttgttatgtttttgtgcttggctgactaccttgttcccattctagcgcctagaatttttggctccaataaatggaccactgaacaacagcaaagattccatgaaatttgcagcaatctagtaaaaactcgacgcagagctgtgggttggtggaaacgcctcttcacactaaaggaagaaaaacctaagatgtacttcatgaccatgatcgtttcccttgctgcggttgcttgggtgggacaacaagtccacaacctgcttctcacctacctgatagtgacttccttactattgcttcctggactaaaccaacatggaatcattttgaagtacattggaatggccaagagggagataaacaaacttctcaaacaaaaagaaaagaaaaacgaatgattcatctgctttaatcagtgtgattaatgcagcacccattgccccgggaaccgtttctgctgtactatctggatactaaaatgttacggaagtagctctttgttctccctcactctgcccttagttaatagaaattcagactcgccaagtaaggcttcgtgcatagtgtcttcatgtcgcgtatagttgagcgcgttcttagcagttggcttcatggacaactcattagtgttttgacttttcttacccagcgttaattgaattcttgcttttagacaacttcctttttgtagtggtgaaccttgccctttagtacagttcaagtgaatctggataattgttcatctttgctttagcttagataccatgtagtggtctgtggctacaggaagctggttctgtctgcttccacagtctgcttaaaaaactgtctgacttcgtgaatatagagaccaagtttaccacttctgatgaagagaccaattaagattcattcctcattctgtttctttccagtgggagaagagtccccatgaaataagatgaaactgattccatgcactagtacatgtaggcttctcccttgtgcaaagcttagcaatttgtaggaaactttgatctttttgtccaagaaaaggaatgtctgacaggcttaagctttcgtccccttgcacttagactcgaagttagtaaatccttaaaggctttttaatagcagacttccaaaagattgcatttaggatttctagcatgcttttaatttcagattttcagctgacattagctatagtatacagtaggttaagactcatgtctatgactttcactctaagactggcaaaaggacagcagtcttctatgtttagtcaatattcatttcagtagaagataatcttatctaatttttgagaccagaataagccttttaaggtaaacctcaaaattatcattttatggtaatactgaccattttagtcccctaggtttgacatgggagatagtgactacactggtgtctgacttttttcctagagatttctccctgaaaaatacaagggctgttggtgagagcagacttgaggtgatgatagttggcctctggtctacaaagatttcataactccttggaaagcttcttataatcattcttaacttcttggtagctagaaatttagagtagttgaaatctttaggaatgaacttctgagggccaaaaaatgtgactgacgggaacaattcttaaactgattaactagctgtaatatagttttgtgaatttattgcactgatgttgtaccttgtggtatatctgtccctattaaataagtgttgttttctcctctttaatattgctgtgaacagtggtgcccattgtagcatatgtttgatttttttttattatttcataagaaaactacgttaattttaccttactttcattgtaaataagcctgtcttcctatctggattttttgtgtgcatacatattctactgattaactacttttgcagttttaatcctgtattatttcttctactttgttttgtgtaaaaggggaaaaaataaaaaaagctggaatcttaaaaaaaaaaaaaaaa

SEQ ID NO: 1456 - DNA, 879 bp, Homo sapiens
gcggagtctccaactgggagagctgcagctgccgagaggaggagaacgctgaggtcggtcggaccaacggacgcgctgaccgctgccaactgcagctcgcgctgcctcctgctcgcgccgtgccactaaggtcactcccgcctccgagagcccagagccgagatggaaacggtccaggagctgatccccctggccaaggagatgatggcccagaagcgcaaggggaagatggtgaagctgtacgtgctgggcagcgtgctggccctcttcggcgtggtgctcggcctgatggagactgtgtgcagccccttcacggccgccagacgtctgcgggaccaggaggcagccgtggcggagctgcaggccgccctggagcgacaggctctccagaagcaagccctgcaggagaaaggcaagcagcaggacacggtcctcggcggccgggccctgtccaaccggcagcacgcctcctaggaactgtgggagaccagcggagtgggagggagacgcagtagacagagacagaccgagaaggaagggagagacagagggggcgcgcgcacaggagcctgactccgctgggagagtgcaggagcacgtgctgttttttatttggacttaacttcagagaaaccgctgacatctagaactgacctaccacaagcatccaccaaaggagtttgggattgagttttgctgctgtgcagcactgcattgtcatgacatttccaacactgtgtgaattatctaaatgcgtctaccattttgcactagggaggaaggataaatgctttttatgttattattattaattattacaatgaccaccattttgcattttgaaataaaaaactttttataccaaaaaaaaaaaaaaaa

SEQ ID NO: 1457 - DNA, 3962 bp, Homo sapiens
gaattccggcgtcgcggacgcatcccagtctgggcgggacgctcggccgcggcgaggcgggcaagcctggcagggcagagggagccccggctccgaggttgctcttcgcccccgaggatcagtcttggccccaaagcgcgacgcacaaatccacataacctgaggaccatggatgctgatgagggtcaagacatgtcccaagtttcagggaaggaaagcccccctgtaagcgatactccagatgagggcgatgagcccatgccgatccccgaggacctctccaccacctcgggaggacagcaaagctccaagagtgacagagtcgtggccagtaatgttaaagtagagactcagagtgatgaagagaatgggcgtgcctgtgaaatgaatggggaagaatgtgcggaggatttacgaatgcttgatgcctcgggagagaaaatgaatggctcccacagggaccaaggcagctcggctttgtcgggagttggaggcattcgacttcctaacggaaaactaaagtgtgatatctgtgggatcatttgcatcgggcccaatgtgctcatggttcacaaaagaagccacactggagaacggcccttccagtgcaatcagtgcggggcctcattcacccagaagggcaacctgctccggcacatcaagctgcattccggggagaagcccttcaaatgccacctctgcaactacgcctgccgccggagggacgccctcactggccacctgaggacgcactccgttggtaaacctcacaaatgtggatattgtggccgaagctataaacagcgaagctctttagaggaacataaagagcgctgccacaactacttggaaagcatgggccttccgggcacactgtacccagtcattaaagaagaaactaatcacagtgaaatggcagaagacctgtgcaagataggatcagagagatctctcgtgctggacagactagcaagtaacgtcgccaaacgtaagagctctatgcctcagaaatttcttggggacaagggcctgtccgacacgccctacgacagcagcgccagctacgagaaggagaacgaaatgatgaagtcccacgtgatggaccaagccatcaacaacgccatcaactacctgggggccgagtccctgcgcccgctggtgcagacgcccccgggcggttccgaggtggtcccggtcatcagcccgatgtaccagctgcacaagccgctcgcggagggcaccccgcgctccaaccactcggcccaggacagcgccgtggagaacctgctgctgctctccaaggccaagttggtgccctcggagcgcgaggcgtccccgagcaacagctgccaagactccacggacaccgagagcaacaacgaggagcagcgcagcggtctcatctacctgaccaaccacatcgccccgcacgcgcgcaacgggctgtcgctcaaggaggagcaccgcgcctacgacctgctgcgcgccgcctccgagaactcgcaggacgcgctccgcgtggtcagcaccagcggggagcagatgaaggtgtacaagtgcgaacactgccgggtgctcttcctggatcacgtcatgtacaccatccacatgggctgccacggcttccgtgatccttttgagtgcaacatgtgcggctaccacagccaggaccggtacgagttctcgtcgcacataacgcgaggggagcaccgcttccacatgagctaaagccctcccgcgcccccaccccagaccccgagccaccccaggaaaagcacaaggactgccgccttctcgctcccgccagcagcatagactggactggaccagacaatgttgtgtttggatttgtaactgttttttgttttttgtttgagttggttgattggggtttgatttgcttttgaaaagatttttatttttagaggcagggctgcattgggagcatccagaactgctaccttcctagatgtttccccagaccgctggctgagattccctcacctgtcgcttcctagaatccccttctccaaacgattagtctaaattttcagagagaaatagataaaacacgccacagcctgggaaggagcgtgctctaccctgtgctaagcacggggttcgcgcaccaggtgtctttttccagtccccagaagcagagagcacagcccctgctgtgtgggtctgcaggtgagcagacaggacaggtgtgccgccacccaagtgccaagacacagcagggccaacaacctgtgcccaggccagcttcgagctacatgcatctagggcggagaggctgcacttgtgagagaaaatactatttcaagtcatattctgcgtaggaaaatgaattggttggggaaagtcgtgtctgtcagactgccctgggtggagggagacgccgggctagagcctttgggatcgtcctggattcactggctttgcggaggctgctcagatggcctgagcctcccgaggcttgctgccccgtaggaggagactgtcttcccgtgggcatatctggggagccctgttccccgctttttcactcccatacctttaatggcccccaaaatctgtcactacaatttaaacaccagtcccgaaatttggatcttctttctttttgaatctctcaaacggcaacattcctcagaaaccaaagctttatttcaaatctcttccttccctggctggttccatctagtaccagaggcctcttttcctgaagaaatccaatcctagccctcattttaattatgtacatctgtttgtagccacaagcctgaatttctcagtgttggtaagtttctttacctaccctcactatatattattctcgttttaaaacccataaaggagtgatttagaacagtcattaattttcaactcaatgaaatatgtgaagcccagcatctctgttgctaacacacagagctcacctgtttgaaaccaagctttcaaacatgttgaagctctttactgtaaaggcaagccagcatgtgtgtccacacatacataggatggctggctctgcacctgtaggatattggaatgcacagggcaattgagggactgagccagaccttcggagagtaatgccaccagatcccctaggaaagaggaggcaaatggcactgcaggtgagaaccccgcccatccgtgctatgacatggaggcactgaagcccgaggaaggtgtgtggagattctaatcccaacaagcaagggtctccttcaagattaatgctatcaatcattaaggtcattactctcaaccacctaggcaatgaagaatataccatttcaaatatttacagtacttgtcttcaccaacactgtcccaaggtgaaatgaagcaacagagaggaaattgtacataagtacctcagcatttaatccaaacaggggttcttagtctcagcactatgacattttgggctgactacttatttgttaggcgggagctctcctgtgcattgtaggataattagcagtatccctggtggctacccaatagacgccagtagcaccccgaattgacaacccaaactctccagacatcaccaactgtcccctgcgaggagaaatcactcctgggggagaaccactgacccaaatgaattctaaaccaatcaaatgtctgggaagccctccaagaaaaaaaatagaaaagcacttgaagaatattcccaatattcccggtcagcagtatcaaggctgacttgtgttcatgtggagtcattataaattctataaatcaattattccccttcggtcttaaaaatatatttcctcataaacatttgagttttgttgaaaagatggagtttacaaagataccattcttgagtcatggatttctctgctcacagaagggtgtggcatttggaaacgggaataaacaaaattgctgcaccaatgcactgagtgaaggaagagagacagaggatcaagggcttt

SEQ ID NO: 1458 - DNA, 2369 bp, Homo sapiens
gtccttcccaagaccacacccaggtccagtcattccctaggacttggcagagagctgtactcacagccaagatcacagcaaaatcagcaaagggaaaaggcatgcagagtgaagtccagaggcaaccagacagaagcatccagaatcctctcacagtggggtcacacaccccatgcttaactcccccaacaatgagttgtaacaacagtcaggtgtggtggtgtgtgcctgtagtcccagctacttgggagcctgaggcaggaggatcacttgagtccagcagttcaagactgcagtgagctatgatcataccactgcactccagcctgagtgacagagtgagactctgtctctaaaatagggctcacctgcttgaggaaacaggaactgcctcggggcagccagccccgccccattgacgtgcagaccttgaatcgaaacccaggctcctgcaggcactggcacagctacagcgagggcctcggccatccaagggtctcccaggtgaccttccctccaccccaggaagctatgacagaggccgggaagctgcccctaccgctacccccacggctggactggtttgtgcacacccagatgggccagctggcccaagacggggtccccgagtggttccatggtgcaatctcaagagaggatgctgagaacttgctggagtcacagccactgggatcctttctcatcagggtcagtcacagccatgtgggctacacactctcctacaaagcccaaagcagctgctgccatttcatggtgaagctcttggatgatgggactttcatgatccccggggagaaggtggcccacacctcgctggacgccctggtcaccttccaccagcagaagccaattgagccgcgcagggagctgctgacacagccctgcaggcagaaggatcccgcaaacgtggattacgaggatctcttcctctactccaacgcagtggccgaggaagctgcctgcccggtgtctgcccctgaggaggcctccccaaagccagtcctgtgtcaccaatcaaaggaaaggaagccgtcagcagagatgaacagaataaccaccaaggaagccacttcctcctgccccccaaaatcccctcttggagagacccgccagaaactctggaggagcctcaaaatgctccccgagagaggccagagggtccggcagcagctaaaaagccacctcgccactgtgaacttgtcgtcactcttggatgtccggagatccacggtgatctcaggccctgggaccggaaaaggcagccaagatcactcaggggatcccacctcgggggacagaggctacacggatccctgtgtggccacatctctcaaaagcccctcacagccccaggcaccaaaagacagaaaggtccccaccaggaaggccgagaggtcggtcagctgcattgaggtgaccccaggggacaggagttggcaccaaatggtagtgagagccctatcctcccaggagtccaagccagagcaccagggcttggcagagcctgagaacgaccagctcccggaggagtaccaacaaccgccaccctttgcccctgggtactgctagagaacaggtccaccctggctctgggactcgctgccaggggctgccacactcctgaatgccttaacatttcttccatggccccacaccatggcatccgggggtcttcgggaacccgggaaatggaataaagatgtttttggggtctgttcctgcactcacccatggggtgagctggttattttagcaacaatcatcagagtgacgctgatggtttggggcaccagctatacatcagccccagtgccagaccttctattcattattttacgcctcagagcaaggccctcagggagggtcatcctccatgttttgaagaagagactgaggttcagagaggataagaggcgtgaccaaggccacagagctatgggtgtcagcaccaggatttgaagccaggtgaatccgagcccttttcccatatcatctgtttgttctgttgtctaaaagcacactgcaagccgggctcagtggctcatgcctgtagtcccagcactctgtggggccgaggcaggcagatcgcttgaggtcaggagtttgagaccagcctggccaacatggtgaaaccccgtctatactaaaaaattcaaaaattacccggacgtggtggcgcatgcctgtaatcccagctacttgggagcctgaggcgggagaattgcttgaacccgggaggcagaggttgcagtgagccgagatcgcatcactgcagtccagcctggatgacagagtgagactccatctcaaaaaataaataaataaataaaaatgaaattaaaaaaaaa

SEQ ID NO: 1459 - DNA, 1936 bp, Homo sapiens
ccggagcctcctggaccaggagaactgtaacgcgagccccgagccatgggcgaaaggcggggccgagacgggttgggggcgccgacggtttcccggccctggctgcagcttggaggagaagctgagcctgtgcttccgcccctcggatccgggcgccgagcccgaggacggccgtgcggccatcacggagctcaactcctgcagggggacgagatttggaatgccctgacagataattatgggaatgtgatgcctgtagactggaagtcatcgcatactaggaccttgcacttgcttactctgaacctctcagaaaaaggggtaagtgacagtttgctctttgatacatcagatgatgaagagctgagagaacagctggatatgcactcaatcatcgtctcctgtgttaatgatgaacccctcttcacggcagaccaggttattgaagaaattgaagaaatgatgcaggaatcaccggacccagaagatgatgaaacccctacacagtcagatcggctttcaatgctttcccaggaaattcaaactctcaagaggtctagtaccggcagttatgaagagagagtgaaaaggctctcagtgtctgagttaaatgaaatcctggaagaaattgagactgccattaaggagtactctgaggagctggtgcagcagttggctttacgagatgaactggagtttgaaaaggaagtgaaaaacagctttatttctgttcttattgaagtgcaaaacaaacagaaagagcacaaagaaacagcaaaaaagaaaaagaaactaaaaaatggcagctctcagaatgggaagaatgagagaagtcatatgcccggcacatatttgactacagtcattccttatgagaaaaaaaacggaccaccgtctgttgaagatcttcaaatattaacaaaaattcttcgtgccatgaaggaggacagtgaaaaagttccgagcttgttaactgattatattctgaaagttctgtgtcctacatagagcagcaactttatctgcggtgggctccaagctagatttccgacagcattattctgagagctggctaccattacccttcttgctattggaaactcagcacatttgaacttgggtttgattcagtattaacagatcttgactacactaattctttatattatagaaccaacggaaatatgggcactattttgaattctagagatggtttttgttaaatctactaataaactgttctcttagtagattaagagagagtaatattaattgtgcatgtgcagttgtatttctcattaactgacagtatgcccatttgtttttatggctttcttatctaaactgcactgatgaactagattaaagccttgggagatttatactataaattcagtgatggcaagaaccaacactgtttttttgtgagaattgtcagtgtaactattacctaccagtattgttcagagagattgaaacagaataaacgggctgttcttgaagaagcaaaaccagaatatgcattactttggtttaatacttagtgctaacattgaaactgttggtggtgatggattttgtagcttgctgcttgtttcaccactggtcaaattttaaccattaaattgccattcacttttagaatcttgtatttaagtaagttttgattttcaaatgttctgcttcatgtgtctgtgaagaattgtacttttttaaaagtgtgtgtcctctgaggtgcttgagaaagtgtacactgcagaactgcccattctcattactgtgtcctattttattcatgcctgtgtgtttttcttaagtatgaattctagatacagctacttatggattcatcaatatcatgagcacttttgctggttccagtcaaatcaatggcatttaataaattttttaagaagtaaaaaaaaaaaaaaaaaaa

SEQ ID NO: 1460 - DNA, 1469 bp, Homo sapiens
ggggggccggactccgctcagtttccggtgcggcgaacaccaaagtccgggaacttaagcattttcggtttctagggttgttacgaagctgcaggagcgagatggaggtggacgcaccgggtgttgatggtcgagatggtctccgggagcagcgaggctttagcgagggagggaggcagaacttcgatgtgaggcctcagtctggggcaaatgggcttcccaaacactcctactggttggacctctggcttttcatccttttcgatgtggtggtgtttctctttgtgtattttttgccatgacttgttcgctgatatctaaattaagaagttggttcttgagtgaattctgaaaatggctacaaacttcttgaataaagaagacaggactctcaatagaagaattccacatctccaagggacccttcctttcattttacactttgttactaatttgcagaactctattaattgggtaggatttcacccattcctagctaagttcttaaaattaaaccctttggttcgtgtttaaaaactttcaaacatctgatggctttacaggggctgaatataaaagcatttgtacttaaaggtcttgtgtattcattaagaaatatagtaatgtcttttaatgttttaagagttgatcagggtttactatgatgcaagtaataggatgattaataagggaaggtttttatgaattcaaaagtcaattattcaaaagcagggaaagattttgagagagggaacaaagtattcttagattgcgtagaagctgctaggttccagttttaatttttaggtttagttggactctgttatgaaaagataggttatgggtgggcgacaggttgatacagtcttagaaaaagcaggtaatatcaaagtattggaaagctagcatgcatgccctcttacctgggtatcttcccccttttttccttttaaactcttgagcctcctataacgaaggattatgtgtttcaaacctatttttttttactgtttcattaagtgtgcttgtgcccaaaatatttacttgtataatatctgtaacttgcttaaatacttcagcaaagtcagcatatttactcattcaacaaatatttgagccaggcattattttagacacagcagtgaacaaaacaaaaaggcattcttgccttcatggagcttacattcttattgttatttaaatctaaatgttataaaacaagaatttatattctagggttgatcagctagtatttaatcaaaaaggccacactcccatagcagctactctaagctgtagtagctaataaaaaatattaatgttggccgggcacagtggctcacgcctataatcccagcactttgggaggccaagggtggtagatcacttgaggtcaagagttgtgacaccagcctggccaacctggtgaaaccctatctctagtaaaaaaaaaaaaaaaaaaaaaaaaa

SEQ ID NO: 1461 - DNA, 2059 bp, Homo sapiens
ccgcaggcgctcggggttggagccagcgaccgtcggtagcagcatggctctcctctttctcctaccccttgtcatgcagggtgtgagcagggctgagatgggcaccgcggatctggggccgtcctcagtgcctacaccaactaatgttacaattgaatcctataacatgaaccctatcgtatattgggagtaccagatcatgccacaggtccctgtttttaccgtagaggtaaagaactatggtgttaagaattcagaatggattgatgcctgcatcaatatttctcatcattattgtaatatttctgatcatgttggtgatccatcaaattctctttgggtcagagttaaagccagggttggacaaaaagaatctgcctatgcaaagtcagaagaatttgctgtatgccgagatggaaaaattggaccacctaaactggatatcagaaaggaggagaagcaaatcatgattgacatatttcacccttcagtttttgtaaatggagacgagcaggaagtcgattatgatcccgaaactacctgttacattagggtgtacaatgtgtatgtgagaatgaacggaagtgagatccagtataaaatactcacgcagaaggaagatgattgtgacgagattcagtgccagttagcgattccagtatcctcactgaattctcagtactgtgtttcagcagaaggagtcttacatgtgtggggtgttacaactgaaaagtcaaaagaagtttgtattaccattttcaatagcagtataaaaggttctctttggattccagttgttgctgctttactactctttctagtgcttagcctggtattcatctgtttttatattaagaaaattaatccattgaaggaaaaaagcataatattacccaagtccttgatctctgtggtaagaagtgctactttagagacaaaacctgaatcaaaatatgtatcactcatcacgtcataccagccattttccttagaaaaggaggtggtctgtgaagagccgttgtctccagcaacagttccaggcatgcataccgaagacaatccaggaaaagtggaacatacagaagaactttctagtataacagaagtggtgactactgaagaaaatattcctgacgtggtcccgggcagccatctgactccaatagagagagagagttcttcacctttaagtagtaaccagtctgaacctggcagcatcgctttaaactcgtatcactccagaaattgttctgagagtgatcactccagaaatggttttgatactgattccagctgtctggaatcacatagctccttatctgactcagaatttcccccaaataataaaggtgaaataaaaacagaaggacaagagctcataaccgtaataaaagcccccacctcctttggttatgataaaccacatgtgctagtggatctacttgtggatgatagcggtaaagagtccttgattggttatagaccaacagaagattccaaagaattttcatgagatcagctaagttgcaccaactttgaagtctgattttcctggacagttttctgctttaatttcatgaaaagattatgatctcagaaattgtatcttagttggtatcaaccaaatggagtgacttagtgtacatgaaagcgtaaagaggatgtgtggcattttcacttttggcttgtaaagtacagacttttttttttttttaaacaaaaaaagcattgtaacttatgaacctttacatccagataggttaccagtaacggaacatatccagtactcctggttcctaggtgagcaggtgatgccccagggacctttgtagccacttcactttttttcttttctctgccttggtatagcatatgtgttttgtaagtttatgcatacagtaattttaagtaatttcagaagaaattctcgaagcttttcaaaattggacttaaaatctaattcaaactaatagaattaatggaatatgtaaatagaaacgtgtatattttttatgaaacattacagttagagatttttaaataaagaattttaaaactc

SEQ ID NO: 1462 - DNA, 494 bp, Homo sapiens
atgaagtttaatccctttgtgacttccaactgaaggaagagtcgcaaaaggcatttcaatgcaccttcctacattcacgggaagattgtcttcccctctttccaacgagctgaaacagaagtataacgggtgatccatgcccatccaaaaggatgatgaagttcaggttgtacgaggacactataaaggtcaacaaattggcaaaatagtcaaggtttacaggaagaaatatgctatctacattgaacgggtgcagcgggaaaaggctaatggcacaactgtccacgtaggcattcaccccagcaaggtggttatcactaggctaaaactggacaaagaccgcaaaaatatccgtgaacggaaagccaaatcttgccaagtaggaaagcaaaagggcaaatacaaggaagaaacaattgagaagatgcaggaataaagtaatcttatacacaagctttgattacaacttgaaacaaagaaaaaagaaaagaaaa

SEQ ID NO: 1463 - DNA, 3656 bp, Homo sapiens
gcccgcgctgcgagccttccatggtgcagcgcatgtgggccgaggcggccgggcctgctggcggcgccgagccgctgtttccgggctcccggcggagccgcagcgtgtgggacgccgtgcgcctggaggtgggcgtccccgacagctgcccggtggtgctgcacagcttcacgcagctagaccccgacctgccgcgcccggagagctccacgcaggagatcggtgaggagctgatcaacggagtcatctactccatctccctgcgcaaggtgcagctgcaccacggaggcaacaaggggcagcgctggctcgggtatgagaatgagtcggccctgaacctttatgagacttgcaaggtgcggaccgtgaaggctggcacgctggagaagctggtggagcacctggtgccagccttccagggcagcgacctctcctacgtcaccatcttcctgtgtacctatagagccttcaccaccacccaacaggtcctggacctgctgttcaaaaggtacggtagatgtgacgccctcacggcctcctctagatacggctgcatcctcccctattccgacgaggatggtggaccccaggaccaacttaaaaatgccatctcctccatcctgggcacctggctggaccagtactcggaggatttctgtcaacctccggactttccctgcctcaagcagctggtggcctacgtgcagctcaacatgccaggctcagacctggagcgccgtgcccaccttctcctggcccagctggagcactcggaacccattgaggcagagcctgaggctctgtcaccagtgccagctctaaaaccaactccagagctcgagctagctctaacaccagctcgagcacccagcccagtgccggctccagccccggagccagagccagctccaacaccagctccaggttcagagctagaagtagctccagcaccagctccggagctccagcaggctccagagccagctgtgggactagaatcggctccagcgccagctctggaactagagccagctccagaacaggatccagctccctcacaaactctagagctggagccagctccagcaccagttccatcattacagccttcctggccttcacctgtggttgcagagaacgggctgagtgaggagaagcctcacctcttggtgttccctccagatctggtggcagagcagtttacactgatggatgcggaactgttcaagaaggtggtgccctaccactgcctgggctccatctggtcccagcgggacaagaagggcaaggagcacctggcgcccaccatccgcgccactgtcacccagttcaacagtgtggccaactgtgtcatcaccacctgcctcgggaaccgaagcacgaaagccccagacagggccagggtggtggagcactggatcgaggtggccagggagtgccggatcctcaagaacttctcgtcactgtatgccatcctctctgccctgcagagcaactccatccaccgtctgaagaagacgtgggaagacgtttccagggacagtttccggatctttcagaagctgtcagagatcttctcagatgagaacaactactcattgagccgggagctgctcatcaaggagggcacctccaagtttgccaccctggagatgaaccccaagagagcccagaaacggccgaaggagacgggcatcatccagggcaccgttccctacctgggcacgttcctcaccgacctggtgatgctggacactgccatgaaggactatctgtatggcagactcatcaactttgagaagaggaggaaggagttcgaggtgatcgcccagatcaagctgctgcagtcggcctgcaacaactacagcatcgcgccagatgagcaatttggggcctggttccgggccgtggagcggctcagcgagactgagagctacaacctgtcgtgcgagctggagcccccatccgagtcagccagcaacaccctcaggaccaagaagaacacagccattgtcaagcgctggagcgaccgccaggcccccagcactgagctcagtaccagtggcagctcccactccaagtcctgtgaccagctcaggtgtggcccctacctcagcagcggggacatcgctgacgcgctcagcgtgcactcggccggctcctctagctccgacgtggaggagatcaacatcagcttcgtcccggagtctcctgatggccaggaaaagaagttctgggaatcagcctcacagtcatccccggagacctccggcatcagctcagcctccagcagcacctcgtcctcctcagcctccaccacgcccgtggctgccacacgcacccacaagcgctctgtctcagggctctgcaactccagctccgcgctgccgctctacaaccagcaggtgggcgactgctgtatcatccgcgtcagcctggacgtggacaatggcaacatgtacaagagcatcctggtgaccagccaagataaggctccggctgtaatccgcaaggccatggacaaacacaacctggaggaggaggagccggaggactatgagctgctgcagattctctcagatgaccggaagctgaagatccctgaaaacgccaacgtcttctatgccatgaactctaccgccaactatgactttgtcctcaagaagcggaccttcaccaagggagtgaaggtcaagcacggagccagctccaccctccctcgcatgaagcagaaaggactcaagattgccaagggcatcttctgagggcatcctcccagggtctggctggctggtagccaagcacttatggaccagagtggcccaggccagctgggcgccttcctcccacctgccagcccagggtaccccagactccagtttcatcctgaacctctcccgctgctgggattgacgcctgccattggtcaggctgacctggcctcccgtggaccactcgctgccttaggtgccttctgctctctggaaccagaggactagctgacttttgccaaggagcagtgccaacgggcatggcatggtgccctgcctgcccccgggcgccacctctgtacacttccctgacaccttcccaggtgtgggtcactgccacctgtgcccatgggcaccccagagcacccactgtgaccactgcagttctctcatgcccacaggcactggcctgtgaccttcgcaggggtcccggcccctcccaccactctagcctttctcaggctgcaccaaagattccatcatcagggccaactgagagtgagggagtctcacccaccgcttaccccagccctcccctgggagcagagagagaaaccctcttcatggaccagactctgcacccggtgagtgaggacagtcccagctgagtcccatcgatgttgaatctcatgccactgcaagtgccattcaccactgcgtcctgggctttacgagaccatgcaagacgggggttagtgaggaaggaggatttggggtgggggtggggtgattgaatatttgtataaaaagcaaaaagaaaaaaaaaatgtttgtttactgattggggaggggcaatatttatttgttgtaaatagcaaatgctagacttgaatattatattaaaatcctgtttctactataaaaaaaaaaaaaaaaaaaaaaaaa

SEQ ID NO: 1464 - DNA, 2070 bp, Homo sapiens
gttcgatgctggtttagggtttcaggcgtggaggttccaaaatccgaggtttgatttcagcctgcccttgccagtgcctgggccgctgggagccgttattggctgccgttaaggaccgttacgtttcccgggtccttctggcactcctctggtggaccgcccccatcggccacacttgccctgctctccagtgattctgtagctcctggctccgtagtctcgcggacagctctctttcctggaagatgtttctggtgggcctgacagggggcattgcctcaggcaagagctcagtgatccaggtgttccagcagctgggctgtgcggtgattgacgtggacgtgatggcccggcacgtcgtgcagccaggataccctgcccaccggcgcatcgtagaggtcttcggcactgaggtcttgctggagaatggcgacataaatcgcaaggtcctgggggacctgatctttaaccagcctgaccggcggcagctgctcatcgccatcacccaccccgagattcgcaaggagatgatgaaggagacgttcaagtacttcctccggggataccgctacgtgattctggatatccccctgctgtttgagaccaagaagttgctcaagtacatgaagcacaccgtggtagtatactgcgaccgggacacacagctggcacggctgatgcggcggaacagcctgaaccgcaaggacgcagaggcccgcatcaatgcccagctgcccctgacagacaaggcccgcatggcccgccatgtcctagacaactcgggcgagtggagtgtcaccaaacgccaggtcatcctcttgcacactgagctggagcgctccctggagtacctgccgctgaggtttggggtcctcacagggctcgctgccattgccagcctcctctacctgctcacccactaccttctgccttacgcctagtggggcactcaaggcagggagccccaggcctccatctatctccttggaggctgaagccaggtaacacatcctgtttcctctcagccccctccacacacacacacacacacacacacacacacacacacacacacacggactctccgaatcagggctgggcctctgtgccaggccatcccgtctttggagtgtatcctatttgaggtcaagaaatagcctgctgtccttcccaccttccctgagcagcacctacagaacagcaaccgtgatggtgtgtgaaagcaacagtcagagactgctatacatttctgtgggtgggggtagggaatactggctctgtggccctcctcagagctgggaggccaagggttcactgggcttgaatcctctctaagcacctaccccattatggcctaaacctcctcagtggaccacgggaaatcatgttggaccaagggtttccatgttcaaacagtcaacaaggccctcccctaggttgagatatttttgatactgaaggcccaggccccccagtatggcttgctgccagcaagcagcaaggattctctcgtgggtaacgctgtagccaggcaggaccagcctcttctgggagacccctctccccacgtagggtttgtgtagtgctcccacatcctgcttattgcctgccacccctgcttctcgcctggacctcttggtattccgtgtacaccatccttgctgtttcttgcctctgtgccttcaacctgctgctcctggcctgggataccttttattttcttttatttcttcttccttttttttttttttttttttttttaacctacaactagctctcagttcaggcactgtctaaagccccaggctgggttaggtggtctaggataccaactccccctcaacattttaccttaatccaacagtacagtaattagccgaaacttgcctggtttttcctactagactgtaagccctctagggacagggacagtgtcttattcatctctgtgttcttagtgcagagcctggcccgctgttggtgtttaataaagtgtgttgatctgaaatgccccagaccaaaaaaaaaaaaaaaaaaaaaaaaaaaaaaaaaaaaaaaaaaaaaaaaaaa

SEQ ID NO: 1465 - DNA, 4305 bp, Homo sapiens
cgacccacgcgtccgaaacagaggaggaggagggaggggagtgcgtgtgtgagagcgcgcgagggagtgtgagtgtgtgtgagcgcgggtgtgaggcggtgcgcaggggcgggcggaggcgctgtccggccccggccaggcgccgggcggggagcatgggaaggggctagaactgctcgagccccccagccccctccccgggatccgcgccccccttcccgggagaggggccgccccccccggacggacatgggctcctgaagttgcgccgctgccggtcgggggaagagacctgacaggtaattaaatgtgtattttgtggacctgggcttggctggaatgctcaggggtcctgaagatcctattatagcttccttctgttgaaccattaagaaaagatggcgaaagtcaacataactagagacctcatccgtaggcagatcaaggagcggggtgccctgagctttgagcggcgctaccatgtcactgacccctttatccggcggctgggcctggaagcagagctgcagggtcactcaggatgtgtcaactgtctggagtggaatgagaaaggagacttgctggcctctggttccgatgaccagcacacgattgtgtgggacccgctgcaccacaagaagctgctctccatgcacacgggacacaccgcaaatatcttctctgtcaagttcctgcctcacgctggggaccgcatcttgatcacgggggcagccgactctaaggtgcatgtgcacgacctgacagtaaaggagaccatccacatgtttggagaccacacaaaccgggtgaagcgcatcgccacagcgcccatgtggcccaacacattctggagtgctgctgaggatgggcttatccgccagtatgaccttcgagagaacagcaaacactcggaggtgctgattgacctgacagagtactgtggccagctggtggaggccaagtgcctcactgtcaacccccaggacaacaactgcctggcagttggggccagcgggcccttcgtgaggctctatgacatccgcatgatccataaccacagaaagagcatgaagcagagcccttcagcgggtgtgcacaccttctgtgaccggcagaaaccccttccggacggtgcagcccagtattacgtagcaggtcacctgccagtgaagcttcctgactacaacaaccgtttgagagtgctggttgccacctatgtgaccttcagccccaatggcacagagctactagtcaacatggggggggaacaggtctatttgtttgacttgacttacaagcagcggccgtacaccttcctcttgcctagaaaatgccactcctcgggggtccagaatggcaagatgtccaccaacggtgtgtccaacggtgtgtccaatggcctgcaccttcatagcaatggcttccggctgccggagagtaggggacatgtcagcccccaagtagagctaccaccatacctggagcgtgtgaaacagcaagccaatgaggcttttgcctgccagcagtggacccaagccattcagctttacagcaaggctgtgcagagggcccctcacaatgccatgctttatggaaaccgagcagcagcctacatgaagcgcaagtgggatggtgaccactatgatgccctgagggactgcctcaaggccatctccctaaacccatgccacctgaaggcacactttcgcctggcccgctgcctctttgagctcaagtatgtggctgaagccctggagtgcctggacgacttcaaagggaaatttccggagcaggcccacagcagcgcttgtgatgcattgggccgcgacatcacagctgccctcttctctaaaaatgatggtgaggagaagaagggacctggtggcggcgccccagtccgcctccgcagcacgagccgcaaggactccatctcagaggatgaaatggtgctgcgggagcgaagctacgactatcagttccgctactgcggccactgcaacaccaccacggatatcaaagaggccaatttctttggcagcaacgctcagtatatcgtcagtggctctgacgatggctccttcttcatctgggaaaaggagaccaccaacctggtccgtgtgctccaaggggatgagtccattgtcaactgcctgcagccacaccccagctactgcttcctggccaccagtggcatcgatcctgttgtgcggctctggaacccccgaccagagagtgaagacctcacaggccgagtcgtggaagatatggagggtgcttcacaggccaaccagcggcgcatgaatgcagacccgttggaggtgatgctgctcaacatgggctaccggatcacgggcctgagcagtgggggtgccggggcctctgatgatgaggacagctctgagggccaggtgcagtgccggcccagctagaccctccagccctggtccccagcccctgctactggctggaccctctgccctgggcaggaggtcaggggattctgttttggtttgtcttccccaccacccttttttttcatttcccctgttttgtttgttagtttggcgttaggggtggaggttgctacaacttgctggctttcggactctgggctgattgtcccctgactatccccagccctgaaaaaaagagcaggaggggacacccctccatatgcccccccccatctcctgctttcatgtccctggagggctctggcctgcctcaaaaccccttctgcctcaggtggggaggaacaagctgaactgtcttcagggactgtcctgccctttagctggcagcagcaggaggagtgggattcccaattggtaagggctcgccttggcctgttgccactcttgctccctagcctgcaaggctagctcccctgtggtcttcaggaaaggttttgaaaaaggatgggtcccaccctccctccagagccaccagtgttagagcggagcccaaaggaaggatgggagccctggagtgggcaagaccaggccacctgctgaggtcgctgtggagcaccctcgctcctctcctggctactagctctggccctgcacctactctcactggccacctctggaggctctgcctttcccaagggccctggcagagggtggggcactgcaccttaccccacccatccatgccagcacttctgcactacggccattctcctcttgggcgctcctcagcctcactgtgacctttctgccagagctcccagccaggcctactctgctgaggtggcgcttcctgctaagggcccttctctgccctttctgccctccttcccatcccacatgctgagccgccacaaagaccaaagaagtgatggcttttctctgtcccctgctgctctgaggggagaggggtgggtctcctgagccactcagatgggaaagtcccttactcggcccctccctccccagcagccccaagctttacactggatgcagcgatcaacccaccactcaccaggcctctcctcccctctgcccccggctcttagctccagctgctccaggtagttggttcatccttccccctctctccctccctgcttccccttcagtgcttacttggctccagccctccagctgcagcccctggggaaaagcagcctcccttctcctctccctccactccctcgctccctccctcagcccctgtctctgccaggtgcctcctctcagtcaggcttcagagcagccctggagacaggagggccatgttaaaagctttttcacagttttaagaagacaagtggagggtgaggatagtggtggggggtctggcaccatctcattgctttaatcccagcaacacaggtggcagcttctcccccttccttcccaccccagtccctcttcccacccctctcttctagcttggtaatgaagtatatttattggtgaaggaaacagctgctgctgcttctcctgctgctgggacctgctcccctgtctcttctccgtgacctttctctagccagggagaagggagagcaggagtattggggctgggccctggggcccaaggaccagctgggtcccctttgctttcttgtgttccagccacctgccatttcctccctgcctcccaccctccctccctgccccctgtcctgcttcccaccccctgcctgcccagcctgggccctgcagtgtggagagacacataagccttactgtcctctgggggcaggagccgagcctttttgttgctccgctcccaggagagtgagggtgacgcaattgattaaaaccattttgttctaggaaaaaaaaaaaaaaa

SEQ ID NO: 1466 - DNA, 3779 bp, Homo sapiens
gcgtcgagctcgccgcggactcaagatggcggcgtgtggacgtgtacggaggatgttccgcttgtcggcggcgctgcatctgctgctgctattcgcggccggggccgagaaactccccggccagggcgtccacagccagggccagggtcccggggccaactttgtgtccttcgtagggcaggccggaggcggcggcccggcgggtcagcagctgccccagctgcctcagtcatcgcagcttcagcagcaacagcagcagcagcaacagcaacagcagcctcagccgccgcagccgcctttcccggcgggtgggcctccggcccggcggggaggagcgggggctggtgggggctggaagctggcggaggaagagtcctgcagggaggacgtgacccgcgtgtgccctaagcacacctggagcaacaacctggcggtgctcgagtgcctgcaggatgtgagggagcctgaaaatgaaatttcttcagactgcaatcatttgttgtggaattataagctgaacctaactacagatcccaaatttgaatctgtggccagagaggtttgcaaatctactataacagagattaaagaatgtgctgatgaaccggttggaaaaggttacatggtttcctgcttggtggatcaccgaggcaacatcactgagtatcagtgtcaccagtacattaccaagatgacggccatcatttttagtgattaccgtttaatctgtggcttcatggatgactgcaaaaatgacatcaacattctgaaatgtggcagtattcggcttggagaaaaggatgcacattcacaaggtgaggtggtatcatgcttggagaaaggcctggtgaaagaagcagaagaaagagaacccaagattcaagtttctgaactctgcaagaaagccattctccgggtggctgagctgtcatcggatgactttcacttagaccggcatttatattttgcttgccgagatgatcgggagcgtttttgtgaaaatacacaagctggtgagggcagagtgtataagtgcctctttaaccataaatttgaagaatccatgagtgaaaagtgtcgagaagcacttacaacccgccaaaagctgattgcccaggattataaagtcagttattcattggccaaatcctgtaaaagtgacttgaagaaataccggtgcaatgtggaaaaccttccgcgatcgcgtgaagccaggctctcctacttgttaatgtgcctggagtcagctgtacacagagggcgacaagtcagcagtgagtgccagggggagatgctggattaccgacgcatgttgatggaagacttttctctgagccctgagatcatcctaagctgtcggggggagattgaacaccattgttccggattacatcgaaaagggcggaccctacactgtctgatgaaagtagttcgaggggagaaggggaaccttggaatgaactgccagcaggcgcttcaaacactgattcaggagactgaccctggtgcagattaccgcattgatcgagctttgaatgaagcttgtgaatctgtaatccagacagcctgcaaacatataagatctggagacccaatgatcttgtcgtgcctgatggaacatttatacacagagaagatggtagaagactgtgaacaccgtctcttagagctgcagtatttcatctcccgggattggaagctggaccctgtcctgtaccgcaagtgccagggagacgcttctcgtctttgccacacccacggttggaatgagaccagtgaatttatgcctcagggagctgtgttctcttgtttatacagacacgcctaccgcactgaggaacagggaaggaggctctcacgggagtgccgagctgaagtccaaaggatcctacaccagcgtgccatggatgtcaagctggatcctgccctccaggataagtgcctgattgatctgggaaaatggtgcagtgagaaaacagagactggacaggagctggagtgccttcaggaccatctggatgacttggtggtggagtgtagagatatagttggcaacctcactgagttagaatcagaggatattcaaatagaagccttgctgatgagagcctgtgagcccataattcagaacttctgccacgatgtggcagataaccagatagactctggggacctgatggagtgtctgatacagaacaaacaccagaaggacatgaacgagaagtgtgccatcggagttacccacttccagctggtgcagatgaaggattttcggttttcttacaagtttaaaatggcctgcaaggaggacgtgttgaagctttgcccaaacataaaaaagaaggtggacgtggtgatctgcctgagcacgaccgtgcgcaatgacactctgcaggaagccaaggagcacagggtgtccctgaagtgccgcaggcagctccgtgtggaggagctggagatgacggaggacatccgcttggagccagatctatacgaagcctgcaagagtgacatcaaaaacttctgttccgctgtgcaatatggcaacgctcagattatcgaatgtctgaaagaaaacaagaagcagctaagcacccgctgccaccaaaaagtatttaagctgcaggagacagagatgatggacccagagctagactacaccctcatgagggtctgcaagcagatgataaagaggttctgtccggaagcagattctaaaaccatgttgcagtgcttgaagcaaaataaaaacagtgaattgatggatcccaaatgcaaacagatgataaccaagcgccagatcacccagaacacagattaccgcttaaaccccatgttaagaaaagcctgtaaagctgacattcctaaattctgtcacggtatcctgactaaggccaaggatgattcagaattagaaggacaagtcatctcttgcctgaagctgagatatgctgaccagcgcctgtcttcagactgtgaagaccagatccgaatcattatccaggagtccgccctggactaccgcctggatcctcagctccagctgcactgctcagacgagatctccagtctatgtgctgaagaagcagcagcccaagagcagacaggtcaggtggaggagtgcctcaaggtcaacctgctcaagatcaaaacagaattgtgtaaaaaggaagtgctaaacatgctgaaggaaagcaaagcagacatctttgttgacccggtacttcatactgcttgtgccctggacattaaacaccactgcgcagccatcacccctggccgcgggcgtcaaatgtcctgtctcatggaagcactggaggataagcgggtgaggttacagcccgagtgcaaaaagcgcctcaatgaccggattgagatgtggagttacgcagcaaaggtggccccagcagatggcttctctgatcttgccatgcaagtaatgacgtctccatctaagaactacattctctctgtgatcagtgggagcatctgtatattgttcctgattggcctgatgtgtggacggatcaccaagcgagtgacacgagagctcaaggacaggctacaatacaggtcagagacaatggcttataaaggtttagtgtggtctcaggatgtgacaggcagtccagcctgacctttctgcacactccagacaaacttcccagacaagctcctttgtgcctctacgtggagagggtgtggaaagttatcacattaaaagatggaggatttaaaaaaaaaaaaaaaaaaaaaaaaaaaagaaaaaaaaaaaaaaa

SEQ ID NO: 1467 - DNA, 4256 bp, Homo sapiens
tacgagcggctgtgaaggaaactgtttaaccggatcccattgtacccagagtgcagagccgcctttccagcatgcaggggctgctcagcgtttagtcacatcaagaaatagaacagaattcagccatggccccaagaaagagaggtggacgaggtatttcattcatcttttgctgtttccgaaataatgatcacccagaaatcacgtatcggctgcgaaatgatagcaactttgcgcttcagaccatggaaccagcattgcccatgccccctgtggaggagctggatgtcatgttcagtgaactggtggatgaactggacctcacagacaaacacagagaagccatgtttgcacttccagctgagaaaaaatggcaaatatactgtagcaagaaaaaggaccaggaagaaaacaagggagctacaagttggcctgaattctacattgatcagctcaattccatggctgctagaaaatctctgctggctttagagaaggaagaagaagaagaaagaagtaaaactatagagagtttaaagacagcactgaggacaaaaccaatgaggtttgtaaccagattcatcgacttggatggcctatcatgtatcctcaactttctaaagaccatggactacgagacctcagagtctcgaatacatacttctctcattggctgtataaaggcgttaatgaacaactctcaaggccgggctcacgtcctggctcattctgagagtattaatgtaattgctcagagtctgagcacagagaacattaaaacgaaggtggccgtgctggaaatcttgggcgccgtgtgcctggttcccgggggccacaagaaggttctgcaggccatgctgcactaccagaagtatgccagcgaaaggacccgctttcagacattaattaacgacttggataaaagcactgggcggtatcgagatgaagtgagtctcaagactgccatcatgtccttcattaatgcagtgctcagccaaggtgcaggagtggagagtttggactttagacttcatcttcgctatgaatttctgatgttaggaattcaacctgtaatagataaattaagggaacacgaaaattcaacattagataggcatttagacttttttgaaatgctccgaaatgaagatgaactagaatttgccaaaagatttgaactggttcacatagacacaaaaagtgcaactcagatgtttgagctgaccaggaagaggctgacacatagtgaagcttacccgcatttcatgtccatcctgcaccactgcctccaaatgccttacaagaggagtggcaacactgttcagtactggctactactagatagaattatacagcagatagttatccagaatgacaaaggacaggaccctgactccacacctttggaaaactttaatattaagaatgtcgtacgaatgttggttaatgaaaatgaagttaagcagtggaaagaacaagcggaaaaaatgagaaaagagcacaatgagctacaacagaaactggaaaagaaagaacgagaatgtgatgctaagactcaagagaaggaagagatgatgcagaccttaaataaaatgaaagagaaacttgaaaaggagactactgagcataagcaagtcaagcagcaggtggcggacctcacagcacagctccatgagctcagcaggagggccgtctgtgcttcaatcccaggtggaccctcgcctggagcaccaggagggccctttccttcctctgtgcctggatctctccttcctcccccaccacccccacctctaccaggtgggatgcttccccctccaccgcctcccctccctccaggtggccctcctcctcccccagggcctcctcccttaggggcaatcatgccacctcctggtgctccaatgggcctagcactgaagaagaaaagcattcctcagcccacaaatgccctgaaatccttcaactggtctaaactgcccgagaacaaactggaaggaacagtatggaccgaaattgatgatacaaaagtcttcaaaattctagatcttgaagacctggaaagaaccttctctgcctatcaaagacagcaggatttctttgtgaacagtaactccaagcagaaagaagcagatgccattgatgacactctgagttccaaacttaaagttaaagagctttcggtgattgatggtcggagagctcagaattgcaacatccttctatcgaggttgaaattatccaatgacgaaatcaaacgggcaattctaacaatggacgaacaggaagatctgcccaaggacatgttggaacagctcttgaaatttgttcctgaaaaaagtgacattgacctattggaggaacataaacacgaactggatcggatggccaaggctgataggttcctttttgagatgagccgaattaatcactatcagcaaaggttgcaatcgctgtacttcaaaaagaagtttgcagagcgtgtggcagaagtgaaacctaaagtggaagcaattcgttctggctcagaagaggtgtttaggagtggtgccctcaagcagttgctggaggtggttttggcatttggaaattatatgaataaaggtcaaagagggaatgcatatggattcaagatatctagcctaaacaaaattgctgacacaaaatccagcatcgacaaaaacattacccttttgcactatctcatcactattgtggaaaataagtaccccagtgttctcaatctaaatgaagaattgcgagatattcctcaagctgcgaaagtaaacatgactgagctggacaaagaaataagtaccttgagaagtggcttgaaagcagtagagacagagctggaatatcagaagtctcagcccccacagcccggagataagtttgtgtctgttgtcagccagttcatcacagtagccagcttcagcttctctgatgttgaagaccttctagcagaagctaaagacctgtttactaaagcagtgaagcactttggggaagaggctggcaaaatacaaccagatgagttctttggcatttttgatcaatttcttcaagctgtgtcagaagccaaacaagaaaacgaaaatatgagaaagaaaaaggaggaagaagaacgtcgagctcgcatggaagctcagctcaaagaacaacgtgaaagggaacgtaaaatgagaaaagctaaagagaatagtgaagaaagcggagagtttgatgaccttgtttcagctttacgctcaggagaagtgtttgacaaagacctttctaaattgaaacggaatcgcaaacgtattaccaaccagatgactgacagcagcagagagagaccaatcacaaaacttaatttctaattttccatgaatacttttttttagaaagctcattagcagccctctaaagtgactagaacgtttcattacactgccttgcaatccaaacagtggcaattttttccttcatctgtgagtgaatgtgtgaacgtgtgtatgtaaatgtatgtgtgtatatattaaaaaatgtatatagatgtctgagtgttgtctggagacctatacgtatggttaaaaagatttatgttaatgtatgtgctccaaaacctttcgtgtatgcattcacattgagtgtggctcattttctttccccgaacgccatgactgttcagaagcacaatactatctcctgaaagagataagagacattccctagattcaaaggcaaaacagaagaaacaaacaaacaaacaaacaaagcttgcaaaatattttatggtttccaagcttgatatcctttaaaattattttcattgatggaactggagttgttggaaaaacatagatttaaaatgatttttgatagctgacattgtgatgttgatgtatcacatcagtaataggaccagctttgaatttctgacattggtgtggggatacagtctgtaaatgtttattgagaacatcttgcacacaatttgaattatgtagaatgtcaatcaagtttttgtatatttaaaagttggacatcaattttttcccctgatttcatcaagttatctctgccaagtgctcttgataatttcttcagatttttggaaaaaaacactatataaatgcaatccatgctttttttaaagaacaacattgccagagtatgcttgttctaacaatatagatatataaaccttaaaaataataaaatatctcacccaagacttaaaggaagaattctctgaagggataaagattact

SEQ ID NO: 1468 - DNA, 740 bp, Homo sapiens
gcctcacagaattgagagtttgttcttacacacaagtttaatgccaccttcctctgtctgccatggaccaacaagcaatatatgctgagttaaacttacccacagactcaggcccagaaagttcttcaccttcatctcttcctcgggatgtctgtcagggttcaccttggcatcaatttgccctgaaacttagctgtgctgggattattctccttgtcttggttgttactgggttgagtgtttcagtgacatccttaatacagaaatcatcaatagaaaaatgcagtgtggacattcaacagagcaggaataaaacaacagagagaccgggtctcttaaactgcccaatatattggcagcaactccgagagaaatgcttgttattttctcacactgtcaacccttggaataacagtctagctgattgttccaccaaagaatccagcctgctgcttattcgagataaggatgaattgatacacacacagaacctgatacgtgacaaagcaattctgttttggattggattaaatttttcattatcagaaaagaactggaagtggataaacggctcttttttaaattctaatgacttagaaattagaggtgatgctaaagaaaacagctgtatttccatctcacagacatctgtgtattctgagtactgtagtacagaaatcagatggatctgccaaaaagaactaacacctgtgagaaataaagtgtatcctgactcttga

SEQ ID NO: 1469 - DNA, 2103 bp, Homo sapiens
acgcgcctgtgttgccgcccgcggccctggcttcgggcttcagggagctctggtgcagtctccgcctgtcagtgccggcagtcgtccgcggcgcccgccccggtcccgcactggtgcagccatgtcctcttccccgtgggagcctgcgaccctgcgccgggtgttcgtggtgggggttggcatgaccaagtttgtgaagcctggagctgagaattcaagagactaccctgacttggcagaagaagcaggcaagaaggctttagctgatgcacagatcccttattcagcagtggaccaggcatgtgttggctatgtttttggtgtggcagaatgtgtcttggctcttgggtttgagaagatgagtaagggaagccttggaataaaattttcagatagaaccattcccactgataagcatgttgacctcctgatcaataagtatggattgtctgctcacccagttgctcctcagatgtttgggtatgctggaaaagaacatatggaaaaatatggaacaaaaattgaacactttgcaaaaattggatggaaaaatcataaacattcagttaataacccgtattcccagttccaagatgaatacagtttagatgaagtgatggcatctaaagaagtttttgattttttgactatcttacaatgttgtcccacttcagatggtgctgcagcagcaattttggccagtgaagcatttgtacagaagtatggcctgcaatccaaagctgtggaaattttggcacaagaaatgatgactgatttgccaagctcgtttgaagaaaaaagcattattaaaatggttggctttgatatgagtaaagaagctgcaagaaaatgctatgagaaatctggcctgacaccaaatgatattgacgtaatagaacttcacgattgcttttctaccaacgaactccttacttatgaagcactgggactctgtccagaaggacaaggtgcaacgctggttgatagaggagataatacatatggaggaaagtgggtcataaatcctagtggtggactgatttcaaagggacacccactaggcgctacaggaggacattcctgctcttgaaatttcctgataacccggacaagttcatggaaagcttgatctacattcatcctaatctttgctgatgcctccatgtatgttaccttaagttgccgtgctaactgccgtccttcttcctgtgttacctgtctttgatgatccagatctgctttattaccaattaaaatcattgggaactcatcacgatcctttactctgagaatctgtctttgaaacttatagatttcttcaaaactgcctctatctgtgactgaaaagaccaacaggaagccctcgccagtcctcatatactgttctctcatggctccaagctcttcttgtcctgctgtatccaaaatatctagccgggctgctctgtcatctatcacacactgctttgtgtaagaatcttcattggttggatcataatccgttacaaaataggactcccaacttaggaaacaaaacatttgtaatatgattgaagactcctgcatgcctcctcaataatattcccctctctcctcccccagcaccaagaggtaatcaatatcctgaatttggtatctgtcattctcatgcatttatacaacattagtaatcatatgatagtattcctaagctatgttttggagaggacaccactgcaaatcttcagccctatactagcttttatcggtagccatcaattgcagttttaatagaaatacaaatacatcaagtgtctgttctttaatttgtaaagaaaatttgttttctagcgtgacaccctcaaggtaccgtatctgtatgtaaatgttgtgcccaatgctacacagacattattttaaaactattttctgcctttggtaaatagactaaactgttttctttattcctcaaaagaattagatcatacttcagtgttgattttgttgctaatgggacatggagatgtctggatgataataaatattcctgtggtatggtcactgaaaaaaaaaaaaaaaaaaaaaaaaaaaaaaaaaaaaaaaaaaaaaaaaaaaaaaaaaaaa

SEQ ID NO: 1470 - DNA, 1447 bp, Homo sapiens
gaaagaggcaagttcctggtgcaaaggtggctctgcagcataatttaggcattggaggagctgtggttgtaacactctacaagatgggttttccggaagccgccagttcttttagaactcatcaaattgaagctgttccaaccagctctgcaagtgatggatttaaggcaaatcttgtttttaaggagattgagaagaaacttgaagaggaaggggaacagtttgtgaagaaaatcggtggtatttttgccttcaaggtgaaagatggccctgggggtaaagaggccacctgggtggtggatgtgaagaatggcaaaggatcagtgcttcctaactcagataagaaggctgactgcacaatcacaatggctgactcagacttcctggctttaatgactggtaaaatgaatcctcagtcggccttctttcaaggcaaattgaaaatcactggcaacatgggtctcgctatgaagttacaaaatcttcagcttcagccaggcaacgctaagctctgaagaactccctttggctacttttgaaaatcaagatgagatatatagatatatatccatacattttattgtcagaatttagactgaaactacacattggcaaatagcgtgggatagatttgtttcttaatgggtgtgaccaatcctgtttttcctatgctctgggtgaatagagcctgatggtatactactgctttgcggaattgcatacaactgtgcattacaaagttaatatggtaattatggtctggggtaaaattgagtttcagaataaaattaggaacagtaaaatccaaagaactatgtaaacaaaaaagcttttgttttgcttacaaagtatatttaaggattattctgctgaagattcagtttaagagttttccttgggagaactaagtaagaaacacaatgccaacagctggccagtaattagtgttgtgcacttcatgtcattaatcaatttctcaatagttcttaaaattagtgagattaaaaatctaaaaattttgcatttcatgctatcagaaacagtattttcttcccaaatcaaaataaaagaaatatgatcagagcttgaacacaggcttatttttaaaataaaaatatttttaacatgggtttccttattgaaaaatcagtgtattagtcataaaacaccatcattaagaataattgaacaataaagtttgctttcagatgcagttttcaaattataatctcatttcaatttataacgttctcagtcctttgttataattttcctttttcatgtaagtttaattatctgcatttatcttttttcctagtttttctaatactaatgttatttcttaaaattcagtgagatataggataaaataatgctttgagaagaatgtttaatagaaaattaaaataactttttctggcaaaaaaaaaaaaaaaaaaaaaaaaaa

SEQ ID NO: 1471 - DNA, 1438 bp, Homo sapiens
gaaagaggcaagttcctggtgcaaaggtggctctgcagcataatttaggcattggaggagctgtggttgtaacactctacaagatgggttttccggaagccgccagaactcatcaaattgaagctgttccaaccagctctgcaagtgatggatttaaggcaaatcttgtttttaaggagattgagaagaaacttgaagaggaaggggaacagtttgtgaagaaaatcggtggtatttttgccttcaaggtgaaagatggccctgggggtaaagaggccacctgggtggtggatgtgaagaatggcaaaggatcagtgcttcctaactcagataagaaggctgactgcacaatcacaatggctgactcagacttcctggctttaatgactggtaaaatgaatcctcagtcggccttctttcaaggcaaattgaaaatcactggcaacatgggtctcgctatgaagttacaaaatcttcagcttcagccaggcaacgctaagctctgaagaactccctttggctacttttgaaaatcaagatgagatatatagatatatatccatacattttattgtcagaatttagactgaaactacacattggcaaatagcgtgggatagatttgtttcttaatgggtgtgaccaatcctgtttttcctatgctctgggtgaatagagcctgatggtatactactgctttgcggaattgcatacaactgtgcattacaaagttaatatggtaattatggtctggggtaaaattgagtttcagaataaaattaggaacagtaaaatccaaagaactatgtaaacaaaaaagcttttgttttgcttacaaagtatatttaaggattattctgctgaagattcagtttaagagttttccttgggagaactaagtaagaaacacaatgccaacagctggccagtaattagtgttgtgcacttcatgtcattaatcaatttctcaatagttcttaaaattagtgagattaaaaatctaaaaattttgcatttcatgctatcagaaacagtattttcttcccaaatcaaaataaaagaaatatgatcagagcttgaacacaggcttatttttaaaataaaaatatttttaacatgggtttccttattgaaaaatcagtgtattagtcataaaacaccatcattaagaataattgaacaataaagtttgctttcagatgcagttttcaaattataatctcatttcaatttataacgttctcagtcctttgttataattttcctttttcatgtaagtttaattatctgcatttatcttttttcctagtttttctaatactaatgttatttcttaaaattcagtgagatataggataaaataatgctttgagaagaatgtttaatagaaaattaaaataactttttctggcaaaaaaaaaaaaaaaaaaaaaaaaaa

SEQ ID NO: 1472 - DNA, 1317 bp, Homo sapiens
gaaagaggcaagttcctggtgcaaaggtggctctgcagcataatttaggcattggaggagctgtggttgtaacactctacaagatgggttttccggaagccgccagttcttttagaactcatcaaattgaagctgttccaaccagctctgcaagtgatggatttaaggcaaatcttgtttttaaggagattgagaagaaacttgaagagataagaaggctgactgcacaatcacaatggctgactcagacttcctggctttaatgactggtaaaatgaatcctcagtcggccttctttcaaggcaaattgaaaatcactggcaacatgggtctcgctatgaagttacaaaatcttcagcttcagccaggcaacgctaagctctgaagaactccctttggctacttttgaaaatcaagatgagatatatagatatatatccatacattttattgtcagaatttagactgaaactacacattggcaaatagcgtgggatagatttgtttcttaatgggtgtgaccaatcctgtttttcctatgctctgggtgaatagagcctgatggtatactactgctttgcggaattgcatacaactgtgcattacaaagttaatatggtaattatggtctggggtaaaattgagtttcagaataaaattaggaacagtaaaatccaaagaactatgtaaacaaaaaagcttttgttttgcttacaaagtatatttaaggattattctgctgaagattcagtttaagagttttccttgggagaactaagtaagaaacacaatgccaacagctggccagtaattagtgttgtgcacttcatgtcattaatcaatttctcaatagttcttaaaattagtgagattaaaaatctaaaaattttgcatttcatgctatcagaaacagtattttcttcccaaatcaaaataaaagaaatatgatcagagcttgaacacaggcttatttttaaaataaaaatatttttaacatgggtttccttattgaaaaatcagtgtattagtcataaaacaccatcattaagaataattgaacaataaagtttgctttcagatgcagttttcaaattataatctcatttcaatttataacgttctcagtcctttgttataattttcctttttcatgtaagtttaattatctgcatttatcttttttcctagtttttctaatactaatgttatttcttaaaattcagtgagatataggataaaataatgctttgagaagaatgtttaatagaaaattaaaataactttttctggcaaaaaaaaaaaaaaaaaaaaaaaaaa

SEQ ID NO: 1473 - DNA, 2697 bp, Homo sapiens
acgcgcctgtgttgccgcccgcggccctggcttcgggcttcagggagctctggtgcagtctccgcctgtcagtgccggcagtcgtccgcggcgcccgccccggtcccgcactggtgcagccatgtcctcttccccgtgggagcctgcgaccctgcgccgggtgttcgtggtgggggttggcatgaccaagtttgtgaagcctggagctgagaattcaagagactaccctgacttggcagaagaagcaggcaagaaggctttagctgatgcacagatcccttattcagcagtggaccaggcatgtgttggctatgtttttggtgactctacctgtgggcagagggctatctatcacagtttgggaatgactggaattcctataatcaatgtcaacaataactgtgctactggttctactgctttgtttatggcccgccagctgattcagggtggtgtggcagaatgtgtcttggctcttgggtttgagaagatgagtaagggaagccttggaataaaattttcagatagaaccattcccactgataagcatgttgacctcctgatcaataagtatggattgtctgctcacccagttgctcctcagatgtttgggtatgctggaaaagaacatatggaaaaatatggaacaaaaattgaacactttgcaaaaattggatggaaaaatcataaacattcagttaataacccgtattcccagttccaagatgaatacagtttagatgaagtgatggcatctaaagaagtttttgattttttgactatcttacaatgttgtcccacttcagatggtgctgcagcagcaattttggccagtgaagcatttgtacagaagtatggcctgcaatccaaagctgtggaaattttggcacaagaaatgatgactgatttgccaagctcgtttgaagaaaaaagcattattaaaatggttggctttgatatgagtaaagaagctgcaagaaaatgctatgagaaatctggcctgacaccaaatgatattgacgtaatagaacttcacgattgcttttctaccaacgaactccttacttatgaagcactgggactctgtccagaaggacaaggtgcaacgctggttgatagaggagataatacatatggaggaaagtgggtcataaatcctagtggtggactgatttcaaagggacacccactaggcgctacaggtcttgctcagtgtgcagaactctgctggcagctgagaggggaagccggaaagaggcaagttcctggtgcaaaggtggctctgcagcataatttaggcattggaggagctgtggttgtaacactctacaagatgggttttccggaagccgccagttcttttagaactcatcaaattgaagctgttccaaccagctctgcaagtgatggatttaaggcaaatcttgtttttaaggagattgagaagaaacttgaagaggaaggggaacagtttgtgaagaaaatcggtggtatttttgccttcaaggtgaaagatggccctgggggtaaagaggccacctgggtggtggatgtgaagaatggcaaaggatcagtgcttcctaactcagataagaaggctgactgcacaatcacaatggctgactcagacttcctggctttaatgactggtaaaatgaatcctcagtcggccttctttcaaggcaaattgaaaatcactggcaacatgggtctcgctatgaagttacaaaatcttcagcttcagccaggcaacgctaagctctgaagaactccctttggctacttttgaaaatcaagatgagatatatagatatatatccatacattttattgtcagaatttagactgaaactacacattggcaaatagcgtgggatagatttgtttcttaatgggtgtgaccaatcctgtttttcctatgctctgggtgaatagagcctgatggtatactactgctttgcggaattgcatacaactgtgcattacaaagttaatatggtaattatggtctggggtaaaattgagtttcagaataaaattaggaacagtaaaatccaaagaactatgtaaacaaaaaagcttttgttttgcttacaaagtatatttaaggattattctgctgaagattcagtttaagagttttccttgggagaactaagtaagaaacacaatgccaacagctggccagtaattagtgttgtgcacttcatgtcattaatcaatttctcaatagttcttaaaattagtgagattaaaaatctaaaaattttgcatttcatgctatcagaaacagtattttcttcccaaatcaaaataaaagaaatatgatcagagcttgaacacaggcttatttttaaaataaaaatatttttaacatgggtttccttattgaaaaatcagtgtattagtcataaaacaccatcattaagaataattgaacaataaagtttgctttcagatgcagttttcaaattataatctcatttcaatttataacgttctcagtcctttgttataattttcctttttcatgtaagtttaattatctgcatttatcttttttcctagtttttctaatactaatgttatttcttaaaattcagtgagatataggataaaataatgctttgagaagaatgtttaatagaaaattaaaataactttttctggcaaaaaaaaaaaaaaaaaaaaaaaaaa

SEQ ID NO: 1474 - DNA, 2498 bp, Homo sapiens
gagctcctcctaggacacccctttccccttggggaaaggattgtgcccccaggcccttccccgcggaggtccctctcctccttccccctcatctccccttcctgggacagaaagtgcctccacctgcatccccaggggcccggcctccagggcccgctggccccacagcaggcaagctgagatgacggtcaagctggatttcgaggagtgtctcaaggactcaccccgtttccgagcctctattgagctggtggaagccgaagtgtcagaattggagacccgtctggaaaagctcctgaaactgggcactggtctcctggaaagtgggcgccattaccttgctgccagccgcgccttcgttgtcggcatttgtgacctggcccgcctgggtccaccagagcccatgatggcggagtgtctggaaaaattcaccgtgagcctgaaccacaagctggacagccatgcggagcttctagatgccacccaacacacactgcagcagcagatccagaccctggtcaaggaaggtctgcggggtttccgagaggctcgccgggatttctggcggggggctgagagcctggaggctgccctgacccacaacgcagaggttcccaggcgccgggcccaggaggcagaagaggcaggagctgctttgaggacggctcgagctgggtaccggggacgggcactggattatgccctgcagatcaacgtgattgaggacaagaggaagtttgacatcatggagtttgtgctgcgtttggtggaggcccaggctacccatttccagcagggccatgaggagctgagccggctgtcccagtatcgaaaggagctgggcgcccagttgcaccagctggtcttgaattcagcacgagagaagagggacatggagcagagacacgtgctgctgaaacagaaggagctgggtggggaggagccagaaccaagcttaagagaggggcctggtggcctggtgatggaaggacatctcttcaaacgggccagcaacgcatttaagacctggagcagacgctggttcaccattcagagcaaccaactggtttaccagaagaagtacaaggaccctgtgactgtggtggtggatgaccttcgtctctgcacagtgaaactctgccctgactcagaaaggcggttctgctttgaggtggtgtccaccagcaagtcctgcctcctccaggctgactcagagcgcctcctgcagctgtgggtcagtgctgtgcagagcagcattgcttctgccttcagtcaggctcgccttgatgacagcccccggggtccaggccagggctcaggacacctggccataggctctgctgccaccctgggctctggtggaatggccaggggaagggagcctgggggagtcgggcacgtggtggcccaggtccagagtgtggatggcaatgcccagtgctgcgactgccgggagccagccccggagtgggccagcatcaaccttggtgtcaccctctgcattcagtgttccggcatccacaggagccttggtgttcacttctccaaagtccggtctctgacccttgactcatgggagccagaactagtgaagctcatgtgtgagctgggaaatgtcatcatcaaccagatctatgaggcccgcgtggaggccatggcagtgaagaaaccagggcccagctgctcccggcaggagaaggaggcctggattcacgctaaatacgtggagaagaagttcctgaccaagctgcctgagattcgagggcgaagaggtggccgggggcgcccaagggggcagcctcctgtgcccccaaagccttccatcaggccccggccagggagcttgagatccaagccagagcccccctctgaggacctgggaagcctgcaccctggggccctactgtttcgagcgtctgggcatcctccatctcttcccaccatggctgatgcccttgcccatggagctgatgtcaactgggtcaatgggggccaagataatgccacaccgctgatccaggccacagctgctaattctcttctggcctgtgagtttctcctccagaacggggcgaacgtgaaccaagcggacagtgcgggccggggcccgctgcaccacgcaaccattcttggccacacggggctcgcctgcctgttcctgaaacggggagctgatctgggggctcgagactctgaaggcagggaccctctgaccatcgccatggaaacagccaacgctgacatcgtcaccctgctacgactggcaaagatgagggaggctgaagcggcccaggggcaggcaggagatgagacgtatcttgacatcttccgcgacttctccctcatggcgtcagacgacccggagaagctgagccgtcgcagtcatgacctccacacgctgtgacccgaggcccacggggcccgcgcctgcctcccttccccgccaccgggccctctgccattaaagcctccgtgcttcgctcaaaaaaaaaaaaaaa

SEQ ID NO: 1475 - DNA, 2326 bp, Homo sapiens
ctaccgggggtcccttgctacccatatgtgtgaagaaaagggggaaatgaaagccctagaacccacactgcagtgggcatgggatcatcctggaaccaggagaaacgaggttagggctaccaccttaaccgcccaggtgctggctctgcgtgaatatcttaggaaatgcaagctgaggacaggtcacaatttgggtctgcagcagaaatgctttcagaacagacagcagcgctggggacaggatgggaatcaatgaatgtacagctggatggagcagagccccaggtggaaaggggaagccaggaagagcggccatggagaacagtaccaggacctctggagcacctgtgctgtgaccttgaagaggagccacagtcccttcaggagaaggctcagtctgctccctgggttcctgcaattccccaggaggggaacactggagactgggagatggcagctgcacttcttgcggctggatcacagggcctggtaaccatcaaggatgtgtcactgtgcttctctcaggaggagtggcggagcctggacccctctcagacagacttttatggagaatatgtcatgcaggaaaactgtgggatagtagtctctctgagatttccaattcccaaactggacatgctttctcaactagaaggaggagaagaacaatgggtccctgacccccaggacttagaggagagggacattctgagggtcacatatacaggaggtggaagtgaacatgagggggatacccctgaactagaagcagaacctcccagaatgttatccagcgtgtctgaagatactgttctctggaacccggagcatgatgagagctgggattccatgcccagcagctccagaggaatgctcctggggcccccttttcttcaggaagatagtttctcaaacctgctgtgtagcacagagatggattccctgttaagaccccacacatgcccccagtgtgggaaacagtttgtatggggttcccaccttgccaggcatcaacaaacacacactggggagagaccctacagctgcctcaagtgtgagaagacctttgggcgaagacatcacctcatcaggcaccagaaaacccacctacatgacaagaccagcaggtgctctgagtgtggtaagaatttccgatgcaactcccatctggccagccaccagagagtgcatgcagaaggcaaatcctgcaaaggccaagaggttggagagagccctggcacaaggaaacggcagcgtgccccaccagtgccaaagtgtcacgtgtgcactgaatgtgggaagagctttggccgaaggcaccaccttgtgagacactggctgacccacactggggagaagcccttccagtgccctcgctgtgagaagagctttggccgaaaacatcacctggacaggcacctgctcacccaccagggacaaagtccccggaacagctgggacagaggaacatctgtcttctgaaatctgtttccactacagctatggtcaagtctatcagccggtgctaccaggagtcactgccagggctgccgttctcctgaaccccagtggccagaatcataagccctgaccccatccctagaaagatgaggtcccagcaatggccagagcatttctcaccagttctgtgagatagcacataaaaatagagttctttgggcaaaacttttgggaagcaatgcatcctacatgggctgatattcagcctgagctgttctcaagaggagagtggtactggcagtttatggctgaaatccattctgattggttggagtctatgctataccagttgttaaacattttgagtatcactcttgcatactgttactattatattttctctatatatagacagaaaggccattttagaatattaaaggctctgaaaatttctgcagtagacccaactgaagtttctattaaggcagtgtttcctaaatgtatttgacctcagtatcctttctatttacatcccacagaactggtgactatgaaacactctggtgaacactgggttagagagtaacaaggaaacaagagatagtgatcaggcatccagagcccccttttttatccatatgaaagccaggggggccagaccttgttcatgtgtgggtctgtcttccttatgccaatcagcagtatatacatcacctctcaccctcacctgctgaaaaaataacctttttacccattattcctactcccttcatcctgcacatacatatatccagctgagagatcacactacaaggctaagagatgatctaatacccccaaatagccctggcccacacagaaaaac

SEQ ID NO: 1476 - DNA, 1584 bp, Homo sapiens
cgggatgcggcgcgccgcgcgttgaacctccttggcctgggcgaagctgtgtggaccaagcaagtcaggagtgtggccatgttttctgagcaggctgcccagagggcccacactctactgtccccaccatcagccaacaatgccacctttgcccgggtgccagtggcaacctacaccaactcctcacaacccttccggctaggagagcgcagctttagccggcagtatgcccacatttatgccacccgcctcatccaaatgagacccttcctggagaaccgggcccagcagcactggggcagtggagtgggagtgaagaagctgtgtgaactgcagcctgaggagaagtgctgtgtggtgggcactctgttcaaggccatgccgctgcagccctccatcctgcgggaggtcagcgaggagcacaacctgctcccccagcctcctcggagtaaatacatacacccagatgacgagctggtcttggaagatgaactgcagcgtatcaaactaaaaggcaccattgacgtgtcaaagctggttacggggactgtcctggctgtgtttggctccgtgagagacgacgggaagtttctggtggaggactattgctttgctgaccttgctccccagaagcccgcacccccacttgacacagataggtttgtgctactggtgtccggcctgggcctgggtggcggtggaggcgagagcctgctgggcacccagctgctggtggatgtggtgacggggcagcttggggacgaaggggagcagtgcagcgccgcccacgtctcccgggttatcctcgctggcaacctcctcagccacagcacccagagcagggattctatcaataaggccaaatacctcaccaagaaaacccaggcagccagcgtggaggctgttaagatgctggatgagatcctcctgcagctgagcgcctcagtgcccgtggacgtgatgccaggcgagtttgatcccaccaattacacgctcccccagcagcccctccacccctgcatgttcccgctggccactgcctactccacgctccagctggtcaccaacccctaccaggccaccattgatggagtcagatttttggggacatcaggacagaacgtgagtgacattttccgatacagcagcatggaggatcacttggagatcctggagtggaccctgcgggtccgtcacatcagccccacagccccggacactctaggttgttaccccttctacaaaactgacccgttcatcttcccagagtgcccgcatgtctacttttgtggcaacacccccagctttggctccaaaatcatccgaggtcctgaggaccagacagtgctgttggtgactgtccctgacttcagtgccacgcagaccgcctgccttgtgaacctgcgcagcctggcctgccagcccatcagcttctcgggcttcggggcagaggacgatgacctgggaggcctggggctgggcccctgactcaaaaaagtggttttgaccagagaggcccagatggaggctgttcattccctgcagtgtcggcattgtaaataaagcctggcacttgctgatgcg

SEQ ID NO: 1477 - DNA, 1781 bp, Homo sapiens
agtcgcttttgttctcgcgatatttccgggtacgcgggagccccggcgacccgggcttctgtgaaacatggcggtaggctgggaccataacacaagcatgactatatgaaggaagaggaaggttttcctgaagatgaggcgactgaatcggaaaaaaactttaagtttggtaaaagagttggatgcctttccgaaggttcctgagagctatgtagagacttcagccagtggaggtacagtttctctaatagcatttacaactatggctttattaaccataatggaattctcagtatatcaagatacatggatgaagtatgaatacgaagtagacaaggatttttctagcaaattaagaattaatatagatattactgttgccatgaagtgtcaatatgttggagcggatgtattggatttagcagaaacaatggttgcatctgcagatggtttagtttatgaaccaacagtatttgatctttcaccacagcagaaagagtggcagaggatgctgcagctgattcagagtaggctacaagaagagcattcacttcaagatgtgatatttaaaagtgcttttaaaagtacatcaacagctcttccaccaagagaagatgattcatcacagtctccaaatgcatgcagaattcatggccatctatatgtcaataaagtagcagggaattttcacataacagtgggcaaggcaattccacatcctcgtggtcatgcacatttggcagcacttgtcaaccatgaatcttacaatttttctcatagaatagatcatttgtcttttggagagcttgttccagcaattattaatcctttagatggaactgaaaaaattgctatagatcacaaccagatgttccaatattttattacagttgtgccaacaaaactacatacatataaaatatcagcagacacccatcagttttctgtgacagaaagggaacgtatcattaaccatgctgcaggcagccatggagtctctgggatatttatgaaatatgatctcagttctcttatggtgacagttactgaggagcacatgccattctggcagttttttgtaagactctgtggtattgttggaggaatcttttcaacaacaggcatgttacatggaattggaaaatttatagttgaaataatttgctgtcgtttcagacttggatcctataaacctgtcaattctgttccttttgaggatggccacacagacaaccacttacctcttttagaaaataatacacattaacacctcccgattgaaggagaaaaactttttgcctgagacataaaacctttttttaataataaaatattgtgcaatatattcaaagaaaagaaaacacaaataagcagaaaacatacttattttaaaaaagaaaaaaaaggataaaaaaacccaaactgaaattctatatacgttgtgtctgttacaaatgtcgtagaagaaatcatgcagctaaacgatgaagaagcccaactggagtgttgctttgaagatgacgccttcttatattttcatagcaaatgggtggtatcaaaatcagacattgcttcttgctgataaaaagcctgaaggaaataagtgaaactacatctatgggaaaaaaaaaaacattgagaagtgcaaatgttcgcatccttttgtttttaaaagatatgatgtcagaataaaatgtggaaaacatacggaaaactagtctagactttaaagaattgtgatcaggtcacattgttaataaaaaaaaaaaacgggctaaaaa

SEQ ID NO: 1478 - DNA, 3283 bp, Homo sapiens
gcgcgaggtggctcagccgcaagatggcggcgctggcggaggagcagacggaggtggcggtcaagctagagcctgagggaccgccaacgctgctacctccgcaggcgggggacggcgcaggcgagggtagcggcggcactaccaacaacggccccaacggcggcggcgggaacgttgcggcgtcgtcgtccactggcggggatggcgggacccccaagcccacggtggctgtctccgccgctgccccggcgggggcggccccggtgcccgccgctgctccggacgccggcgctccgcatgaccgacagactctactggccgtgctgcagttcctacggcagagcaaactccgcgaggccgaagaggcgctgcgccgtgaggccgggctgctggaggaggcagtggcgggctccggagccccgggagaggtggacagcgccggcgctgaggtgaccagcgcgcttctcagccgggtgaccgcctcggcccctggccctgcggcccccgaccctccgggcactggcgcttcgggggccacggtcgtctcaggttcagcctcaggtcctgcggctccgggtaaagttggaagtgttgctgtggaagaccagccagatgtcagtgccgtgttgtcagcctacaaccaacaaggagatcccacaatgtatgaagaatactatagtggactgaaacacttcattgaatgttccctggactgccatcgggcagagttgtcccaacttttttatcctctgtttgtgcacatgtacttggagctagtctacaatcaacatgagaatgaagcaaagtcattctttgagaagttccatggagatcaggaatgttattaccaggatgacctacgagtattatctagtcttaccaaaaaggaacacatgaaagggaatgagaccatgttggattttcgaacaagtaaatttgttctgcgtatttcccgtgactcgtaccaactcttgaagaggcatcttcaggagaaacagaacaatcagatatggaacatagttcaggagcacctctacattgacatctttgatgggatgccgcgtagtaagcaacagatagatgcgatggtgggaagtttggcaggagaggctaaacgagaggcaaacaaatcaaaggtattttttggtttattaaaagaaccagaaattgaggtacctttggatgacgaggatgaagagggagaaaatgaagaaggaaaacctaaaaagaagaagcctaaaaaagatagtattggatccaaaagcaaaaaacaagatcccaatgctccacctcagaacagaatccctcttcctgagttgaaagattcagataagttggataagataatgaatatgaaagaaaccaccaaacgagtgcgccttgggccggactgcttaccctccatttgtttctatacatttctcaatgcttaccagggtctcactgcagtggatgtcactgatgattctagtctgattgctggaggttttgcagattcaactgtcagagtgtggtcggtaacacccaaaaagcttcgtagtgtcaaacaagcatcagatcttagtcttatagacaaagaatcagatgatgtcttagaaagaatcatggatgagaaaacagcaagtgagttgaagattttgtatggtcacagtgggcctgtctacggagccagcttcagtccggataggaactatctgctttcctcttcagaggacggaactgttagattgtggagccttcaaacatttacttgtttggtgggatataaaggacacaactatccagtatgggacacacaattttctccatatggatattattttgtgtcagggggccatgaccgagtagctcggctctgggctacagaccactatcagcctttaagaatatttgccggccatcttgctgatgtgaattgtaccagattccatccaaattctaattatgttgctacgggctctgcagacagaactgtgcggctctgggacgtcctgaatggtaactgtgtaaggatcttcactggacacaagggaccaattcattccttgacattttctcccaatgggagattcctggctacaggagcaacagatggcagagtgcttctttgggatattggacatggtttgatggttggagaattaaaaggccacactgatacagtctgttcacttaggtttagtagagatggtgaaattttggcatcaggttcaatggataatacagttcgattatgggatgctatcaaagcctttgaagatttagagaccgatgactttactacagccactgggcatataaatttacctgagaattcacaggagttattgttgggaacatatatgaccaaatcaacaccagttgtacaccttcattttactcgaagaaacctggttctagctgcaggagcttatagtccacaataaaccatcggtattaaagaccttttggaagctactgtttttaaaaagggagactaaaagcaaatacctcagtgattaatatttaagctacagagaatgtttttgtctatatggatctggaagtatgctgcttggaaaaatctgaacaggacagttccacgtttctatagcaaccacatttgactaatttccgttagttgaataagaggtattatgatcatggaggggacatttatggtgctttggattgtgtggaaactatgcattttctgttcaaatgctattttaatttattacatttagaaaaaaagttgatttcaataattcatcctgcttcaagattcaaattcagaaatatactatcatcttgaattttagctgaagaatcctatgagcatgtatgtttctgctgtaaaaacgtagttactgtatggcactcaaaaactatgttaaatgatccactaactttttttttcttggcccatgattaatggaatgtatgtaactaggtagggttcctttcttagatctagaggaagtacagccacccactgacatctgaatttatatacctgttgagttttgagtgcacccaaacactcgataaaccaggtgaagaaatttagcttccatgttctacttcagctaaaacagctacatacaacctagtacacttgaagtcagacagacatttcagttgcttacctccagtactgagccttgctttgggaaactaaaagatttagaccaagtcactgccagtttttgcctttgttgcattttgtacagtttttatatttttgatatcttgtaaataaagacaaccagcttttccaggttcataaaaaaaaaaaaaaaaa

SEQ ID NO: 1479 - DNA, 5099 bp, Homo sapiens
ggagctcggttggccttgggtgggtctagacagccgcggcggctgcggcgccgatagtgacagtgagtgcgtgagacccggagagaaatggcgatggcgatgtcggacagtggggcgagccgcctgcgtcggcagctggagtcagggggttttgaggcgcggctgtacgtgaagcagctctcgcagcagtcggatggggaccgggacctccaggagcaccggcagcgcatccaggcgctggcggaggagacggcgcagaacctgaagcgcaacgtctaccagaactaccggcagttcatagagacggcccgcgagatctcctacctggagagcgagatgtaccagctcagccatttgctgaccgagcagaaaagcagcctggagagcatcccgcttacgttgctgcctgccgctgctgccgccggagccgccgccgcctctggaggggaggagggagtcggtggggcggggggccgagaccacctccgaggccaggccggctttttctccacccccgggggtgcctcccgcgacggctccggtccaggcgaggaaggaaagcagcgcactctcaccaccctgcttgagaaggtggaaggctgcaggcatctgctggagacgccgggacagtacttggtgtacaatggggacctagtggaatacgatgcggaccacatggcccaactgcagcgggtgcacggctttctcatgaacgattgcttgttggtggctacctggctgcctcagcggcgtgggatgtatcgctacaacgctctctattccctagatggtttggccgtagtcaatgtcaaggacaacccgcccatgaaggacatgttcaagctgcttatgttccccgagagccgtattttccaggccgaaaatgctaaaatcaaacgagagtggctggaagtgctggaggacaccaagagggccctcagtgagaaaaggcgaagggagcaggaggaggcagcggcccctcgagggccaccccaagtgacttccaaggccactaacccatttgaggatgacgaagaagaagaaccagctgttcctgaggtagaggaagagaaggtggacctctccatggaatggatccaggagttacctgaagacctggatgtctgcattgcgcagagagactttgaaggggcggttgacctgctggataaattgaaccattacctggaagataaacctagcccacctcctgtaaaagaactaagggccaaagtggaggagcgagttcgacagctcactgaggtgctagttttcgaactctccccagatcgttccctgagaggtggtccgaaggctactcgcagagcagtttcgcaactgatccggctgggccagtgcacgaaggcctgtgagctatttttgagaaacagggcagccgctgttcatactgcaattcgtcagcttcgcatcgaaggtgccactttactctatattcataagctgtgccatgtcttctttaccagccttctcgagactgcaagagaatttgagatcgattttgcaggcactgacagcggctgctactctgcctttgtggtctgggcaagatcagccatgggcatgttcgtggatgcttttagcaagcaggtgtttgatagtaaggagagcctctctacagcagctgagtgtgtaaaagtggctaaggagcattgccagcaactgggtgatatcggactggatctcaccttcatcatccatgcccttctggtgaaagacatccaaggggccttgcacagttacaaagaaatcatcattgaagccactaaacatcgcaactctgaagagatgtggaggaggatgaacttgatgacgccagaagccctgggtaagctcaaagaagagatgaaaagttgtggggtaagtaactttgagcagtacacaggggatgactgctgggtgaacctaagttacacagtggttgctttcaccaaacagaccatgggcttcttggaagaggccctgaagctgtatttcccagagctgcacatggtacttttggagagcctggtggaaatcattttggttgctgttcagcatgtggattatagtcttcgatgtgagcaggatccagagaagaaagcttttatcagacagaatgcatcctttttatatgaaacagtcctccctgtggtggagaaaaggtttgaagaaggtgtggggaaacctgccaagcaactccaagatctgaggaatgcatctagacttattcgtgtgaatcctgaaagtacaacatcagtggtctaatgcttgggtctgtttatatgtgtatatatgcagagagagagcttatatattatttatatttatattaagttgtattagcatactctatagtttcaaacacaacttgaaaattaaaagtgccctcttaaaaatacaaaaatcaaaaagaggaaaataagttaaattaagcccaagtaacaaaaatactggaattattaaaacgtatagtatgctagctatccttttaaattatgctaattctcttcttctgaaattatggtcacactatatactatagcatttcggttttatcctttgataaaacttttcttttttcttttttttttttgagacagggtctcaccccgtcgcacaggctggagtgcagtggcaaagtctcgactcactgcagccttgacctcccgggcccaggtagtcctcccacctcagcctcccatgtagcaggaaccacaggcaggcaccaccatacccagctaatttttgtattttttgtagagatggggtttcgccatgttgcccaggctagtcttttctttcttctctttttttttccccacagtatatattatacagcagtcataatatctataaatacatagagtttatgttgtgaagtttcccagttcactgaaatgttaggtttcctaaagggtacagtgccgtgtaaaacaacctgcctcatatatttctcctcaaaacgttggactatttgggaaaaggaaaagagttgggaaaattggttttaaggtaagttttagtcaaaagaattctttcttgaaactagctggtttgtggattcagatactctgatccttacagaatccaagaggaagctttcataaaaacaattcagcaaatatttccaatataatttgaatggctaattttcagttgctaattaattagcagctttgtaatacttgatttgggagcatttacttggaaatcctaaggactataataaaagttttcaacatatttctaaattgtgtgagtttccagctgtagcttttgtctttgtcacattttaaaaaataataagcaagacacattggggacactggcagcagttgccaggttttagctgccaccgcttcagtatgagatatagctgtcccatcttcccccattcagggtaggagatatagtgacccagacttcatgcaaatggaaaaaaagttttaactgaaatatttatttagatttcagggtctagatggatgggaaagtagaaaaacatatgcaaatctcagtgttctcactatgaccactctgagcagagatttggttttgtttccttttgtaacaaagtgaaaacaggtgagacaatgtgcccaaaacaaagggaagaagagaaccttctgtgactcctaaaatgttccatgctgcatttttgtttcattttttatttttccttgctttgtttttaaacatgaatataatgcttacttcaaattgtttagtaaaacaaaataactaaagaaatgtgagcttcccaaggtttctaaactatcgctgttgtatattctatagcgttccttattctttgagggaaactgtgcttgctgtgatccattttgtctctagcttctagttgtgattcttgtccataagcaccaaatttgatgcccatgatttcaaaaggtcatttcttttatctgaatgaaaatggtggtactaagactgtgaaaattatgtgaaacctaaagtagttgccaaagtggctcagggttgtaaaattcattgacttaattattcatgtgccagatcaacccctttattttctctttagctgtgcatatttaaaatattggaaagtatcagatttacagattttctttgactaatttttttcacataactttaggattttcgaaagttgtaaccataactggatatcttagctgagcaaaggcggttataatttgtctttttaagatcactggaaattgataaaattttgtgataattatgattattctgtgccatttacagtttctaatactatactgtatgaaatatgtataaatatatgatgctgagtctgtggaatgatacttctgaaatcaaaattcctcataaggcatgaagttgtaaaaacttgaatgtgtatagttagatatttaaatggttgcttcttcatagaattgtctgctttttaaaactggaagtacaggattttcttcaggtaaaatctgtgtgttccaattacagttgtagctgaaggaagtatgctttggtgagtcaattagtatgggaacttgactaaagacccccagtgttgtaacgtacctttgtacccagacaaaacaattatgttacattcctcaaagtggcatgggctttcttctctaattcttctgttttattagacccaagacaagttctaaaaattgaatgcaatgagagattgtccagaaatgtaatatatactaaaatataccacttaagcattgattgccttttcttgtttgcttcaagaatataaaacttgttacttgagcttggaatcatgggcttgattgaattaattactcttggggaaaaaagacaccttgtggcattaagtcttgctttggttaaagccttatttcacataattgctaaaaactcatttttgtttaatatactacctatagtttaattatcggcacttgtattttgtaacttgatatcttacctaggattgggaatttgggacatgacatgtactataaaagtcagtctatgtacatactgcttattgatgtgctgtgatatgagggaatctgaaatgtttcataaaaataaagcttaaaaattgtcttacactggataaaagtgatattaagaaa

SEQ ID NO: 1480 - DNA, 466 bp, Homo sapiens
accactgctggctttttgctgtagctccacattcctgtgcattgaggggttaacattaggctgggaagatgacaaaacttgaagagcatctggagggaattgtcaatatcttccaccaatactcagttcggaaggggcattttgacaccctctctaagggtgagctgaagcagctgcttacaaaggagcttgcaaacaccatcaagaatatcaaagataaagctgtcattgatgaaatattccaaggcctggatgctaatcaagatgaacaggtcgactttcaagaattcatatccctggtagccattgcgctgaaggctgcccattaccacacccacaaagagtaggtagctctctgaaggctttttacccagcaatgtcctcaatgagggtcttttctttccctcaccaaaacccagccttgcccgtggggagtaagagttaataaacacactcacgaaaagtt

SEQ ID NO: 1481 - DNA, 1629 bp, Homo sapiens
tctttggtgctgggaggcgggcgcagggtagctgttggcgccgccgcgtttctgggcctggccaactcacgtgaccgacgcgggctctgaagcggtgggccgcaccgaggcggcggcggcggcgacgactgcagctcgggaggtagcggcctggcgagggacgggccggctgccctctcggacggccgcggcggagggcaaaaatggcggaggcttcggcggccggggcggactcgggcgccgctgtagccgcccaccggtttttctgccacttttgcaagggcgaggtcagccccaaactaccggaatatatatgtcccagatgtgaatcaggctttattgaagaagtgacagatgattccagttttttaggtggtggcggcagtcggatagacaataccacaacaacacattttgcagagctttggggccatttggatcacacgatgttttttcaagattttagaccctttctaagtagcagtccactggaccaagataatagagccaatgaaaggggtcaccagactcacactgacttctggggagcaagacctccacggttgccattgggtcggagatacagatctcgaggaagttctcgtcctgacagatctccagctattgaaggaatactacaacacatctttgcaggattctttgcaaattctgccattcctggatctccacaccctttttcctggagcgggatgctgcactccaaccctggggactatgcctggggtcagacagggcttgatgccattgtaacccagcttttaggacaactggaaaacacaggccctcccccagctgacaaggaaaagatcacatctcttccaacagtgacagtaactcaggaacaagttgatatgggtttagagtgtccagtatgcaaagaagattacacagttgaagaggaagtccggcagttaccttgcaatcacttctttcacagcagttgtattgtgccgtggctagaactgcatgacacatgtcctgtatgtaggaagagcttaaatggtgaggactctactcggcaaagccagagcactgaggcctctgcaagcaacagatttagcaatgacagtcagctacatgaccgatggactttctgaagctaaagaccacacctgaatcagggctgtggtaatcatcttaccatagctgtaaattgtatcaaaacaaaaaattagtagatggatttaggaatatgtaagaaactcaacacataatataaatgcaatgaatgtttttcttctttaaatttaaagttagtatctacagatggaattgtatctacaaccaaatgcctcttatccctgaattcagagtgataattttataagtgtgaaacttaattatgtagggctccccccgtctgaatagaattaattccttaaagtctagttagggtcctgctgtctgtcatgttgccttgtaacggatgtttccacctccttctccaacctctaccccaccattagtgtattttactataaaaacagtggaaccacagccctaaagtcctgctgatataaagtccttttgtcttaattgtatttaaaaaaaaaaaaaaactactcttgatcacattagctatgaggcgaggtcaaattcaggtaaaaa

SEQ ID NO: 1482 - DNA, 3135 bp, Homo sapiens
ggccgtcggcggaggcgccattttgtgtagccgccgaaccttgttggaggttctggggcgcagaaccgctactgctgcttcggtctctccttgggaaaaaataaaatttgaaccttttggagctgtgtgctaaatcttcagtgggacaatgggttcagacaaaagagtgagtagaacagagcgtagtggaagatacggttccatcatagacagggatgaccgtgatgagcgtgaatcccgaagcaggcggagggactcagattacaaaagatctagtgatgatcggaggggtgatagatatgatgactaccgagactatgacagtccagagagagagcgtgaaagaaggaacagtgaccgatccgaagatggctaccattcagatggtgactatggtgagcacgactataggcatgacatcagtgacgagagggagagcaagaccatcatgctgcgcggccttcccatcaccatcacagagagcgatattcgagaaatgatggagtccttcgaaggccctcagcctgcggatgtgaggctgatgaagaggaaaacaggtgtaagccgtggtttcgccttcgtggagttttatcacttgcaagatgctaccagctggatggaagccaatcagaaaaagttggtgattcaaggaaagcacattgcaatgcattatagcaatcccagacctaagtttgaagattggctttgtaacaagtgctgccttaacaatttcaggaaaagactaaaatgcttccgatgtggagcagacaagtttgactctgaacaggaagtgcctcctggaaccacagagtcggttcagtctgtggattactactgtgatacgatcattcttcggaacatagctccgcacactgtggtggattccatcatgacagcactgtctccttacgcgtctttagctgtcaataacatccgcctcataaaagacaaacagacccagcagaacagaggcttcgcatttgtgcagctgtcctctgcaatggatgcttctcagctgcttcagatattacagagtctccatcctcctttgaaaattgatggcaaaactattggggttgattttgcaaaaagtgccagaaaagacttggtcctctcagatggtaaccgcgtcagcgccttctctgtagctagtacggctattgctgctgctcagtggtcatccacccagtctcaaagtggtgaaggaggcagtgttgactacagttatctgcaaccaggtcaagatggctatgcccaatatgctcagtattcacaggattatcagcagttttatcaacaacaagctggaggattggaatctgatgcatcatctgcatcaggcacagcagtgaccaccacctcagcggctgtagtgtcccagagtcctcagctgtataatcaaacctccaatccacctggctctccgactgaggaagcacagcctagcactagcacaagtacacaggccccagccgcttcccctactggtgtagttcctggtaccaaatatgcagtacctgacacgtccacttaccagtatgatgaatcttcaggatattactatgatccgacaacagggctctattatgaccccaactcgcaatactactataattccttgacccagcagtacctttactgggatggggaaaaagagacctacgtgccagctgcagagtctagctcccaccagcagtcgggcctgcctcctgcaaaagaggggaaagagaagaaggagaaacccaagagcaaaacagcccagcagattgccaaagacatggaacgctgggctaagagtttgaataagcagaaagaaaactttaaaaatagctttcagcctgtcaattccttgagggaagaagaaaggagagaatctgctgcagcagacgctggctttgctctctttgagaagaagggagccttagctgaaaggcagcagctcatcccagaattggtgcgaaatggagatgaggagaatcccctcaaaaggggtctggttgctgcttacagtggtgacagtgacaatgaggaggagctggtggagagacttgagagtgaggaagagaagctagctgactggaagaagatggcctgtctgctctgccggcgccagttcccgaacaaagatgccctagtcaggcaccagcaactctcagaccttcacaagcaaaacatggacatctaccgacgatccaggctgagcgagcaggagctggaagccttggagctaagggagagagagatgaaataccgagaccgagctgcagaaagacgggagaagtacggcattccagaacctccagagcccaagcgcaagaagcagtttgatgccggcactgtgaattacgagcaacccaccaaagatggcattgaccacagtaacattggcaacaagatgctgcaggccatgggctggcgggaaggctctggcttgggacgaaagtgtcaaggcattacggctcccattgaggctcaagttcggctaaagggagctggcctaggagccaaaggcagcgcatatggtttgtcgggcgccgattcctacaaagatgctgtccggaaagccatgtttgcccggttcactgagatggagtgagagagagagagagagagagatgacaaggagcacaagaagtggtccatctcccgaattcgctgttaccgcctgtctctttaagggcatgccttgtgctgttaatagatcttagggtgaaccacttcattctgcagggttctccctcccaccttaaagaagttccccttatgtgggttgcctggtgaatggccttccttcccgccagagggcttgtgaacagaccggagaggacagtggattgtttatactccagtgtacatagtgtaatgtagcgtgtttacatgtgtagcctatgttgtggtccatcagcccctcacattcctaggggtttgagatgctgtaggtggtatgtgacaccaaagccacctctgtcatttgttgtgatgtcttttcttggcaaaagccttgtgtatatttgtatattacacatttgtacagaattttggaagattttcagtctagttgccaaatctggctcctttacaaaagaaataccttgagaaaaaaaaaaaaaaaaaaaaaaaaaaaaaaaaaaaaaa

SEQ ID NO: 1483 - DNA, 8092 bp, Homo sapiens
atgggggatggtggtggtgtgagggagaatccaaaaatgaataaagatagtcattctatagcccgccccggagcggcgcgcgcaccccaggactcgcgtcgcgtgactcggccaaggcgcgcagggtttgcgcccgcccgcgccacttccgactcagccctcggttcaggttccggggcgccgcagagctcccggcctctggaccgcgcgcggcgctctggggaatccggcgccacgcgccgtgcggtggccaggatggaggaggccggagcagcggtggtcacggccggggaggccgaactgaactggtcccgcctcagcgtgtccaccgagacgctggagtctgagctggaggcgcggggggaggagcggcgcggggcgcgggaggcgctgctgcggctgctgctgcctcacaaccgtctggtgtcgctgccacgggcgctgggcagcggcttcccgcacctccagctgctggacgtgagcggcaacgcgttgaccgcgctcgggccggagctgctcgctctgcgcggcctgcgcacgctgctggccaagaacaaccggctcggcgggcccagtgcgctgcccaagggcctggcccagtcgccgctctgccgcagcctccaggtgctcaacctcagcggcaactgtttccaggaggtgcctgcctcgctcttagagctgcgcgcgctgcagaccctgagcctgggcggcaaccaactgcagagcatcccggctgagatcgagaacttgcagagtttagagtgtttatatcttggaggaaatttcattaaagaaatcccaccagaattaggaaatctgccttctctgaattatttggtattatgtgacaacaaaatccaaagcatacctcctcaactttcacagttacattcacttcgttccctaagtcttcacaataacttgctgacatatctgcctcgagagatcctcaaccttattcatttggaagagttgagtttacgaggaaatccattggttgttcgttttgttagagatttaacctatgatcctccaactctcctggaattagctgcacggaccattaagattcgaaatatttcctacactccctatgatcttcctggaaatcttcttagatacttgggttcagccagcaattgcccaaacccaaagtgtggaggagtctactttgactgctgtgtcagacaaattaaatttgtggacttctgtgggaagtatcgcctcccactgatgcactacttgtgttcaccagaatgttcttccccttgcagttctgcctctcacagctccacttcccagagtgaatctgactcagaagatgaagctagtgttgctgcacgcagaatgcagaaagttcttcttggttgaacaggagtgcacagtgttgtgaaatacttaaaaaactgagcaaaatggttagacaagaaaatagagcttgaagttcactagaaatcttatcttcatcttaagtgttcatcaaagagtctgggatgatataaaacattttgtgtttcatctacccattcagcaagaatgagtccagtcccatgtttagattattttaacataatttgtgaatgatagtttcacatttggctgatggtttgcagttttcactcaagttttgcatgaatcacaaagcagaatggtaccttttgaagagcagttctgcaataagtcatgagtagtataacttttggacattgagatggagaaagtgagaaattatcaaagctataattgccagagttgcccttgggtttaggtagaacactgtataccatatatactatataccatatatactatatataccatatatattatatgccataaacaggattaaccctcccttttctaattgcctgtatgtctagattacagaactattcaaagaagctcacagatggttacatgggacaaacctttctgacaaactaactggtaaagtaaggcatataacatttacatgagatattaaaactttttcattattatcctttgttctatatgattgctattaaccttatgtaatctagcaatgactgttatagtgccttaatccagcaaggatataaaaatgtattcaagaagtaatgccagagcaacctataacctgacataccatgcagaacattgtaaaatattctttaacagaactaggtaaataactgtgtatctaatatccgatctcatggccctcttaacatttttttgtttaaatgtgcactcatcccttataagcacattacttttacacttaatggtaggccacaatcttcatcaatctgttcatcataagacagagtaagaatttttaacagaaaattctaaaagagatagaagctaggaaagcttctttatatcttgcattaaatgggtagggaaaaaatatgactctcacccatgtcatgtactggaccatctttctctactttttaaagaaaaactaatacaactagaaaaacatcacaacaagccaaataaaaatggagaaaaggagtcattgtccttatacctaatggaacagtttccagaactactttaactatggaagcatttttgaaaataaagtattaataaaatagaaaaaaattattaaatatattgtatccttaatgtatagcaggaaaatagtttcacaaattaattgctattagaaattaccaaatttttattaagtactttaatatgcaatacaaattgaataatagtacaactataagttgatataaagtaagtgcttactggtaatcattaaataactaataacatgacttgttggttaatgttaaacctacagtaagaaatgttatacagatcagataggcattagaacatcaggtgtaccttttctgatttctggcattcatggcacaccatttcttaaaagcagattgttgtataataacatatacatgtattagggtttttttcatatatattttttattttagaagaaactagcataattcagggtttatgtgtttatttgtatattaattcatgaaacatgagagtttcatgaactgcagatgtgaaacgctgctatagaatgaatcccttcacctttaccttgttataatgtagtaagattttgttttccttttgactcagaaattttctatgtctatagaggtaatctaatatgttcctactgcctagaagagtaatacataggtgattatatcataaaatagaggtataaagtctttgcttacttctccatgtgggccacagcaagctgcagactgtacagttatgaaaggtaaagatgacttaggctgtgcctaagtgacaaatgtaaaatgttttgtaaataagtgacttacctaagatacataagatattttcatagaaaataatgtattcatagtaaaatactcaaattgataggaccaattttttctggcctaaatgcttatgcctacttcctaatcaattaccagcttgacttaagtaactgcttgagtagtcttctaagagttagtcttcgtaaaataaatggataggtatgtaaatatataatcttacataccctttccagcttcctagaaaggtctactgcttcatcttttacagatgtaaataggtccaaccagagacagtttctggcctttgcatataagaatatagatgtataccacagtattatttcaacaaaatgttatggttctatgtatagttgaaaactctatgatcagcatacaactgtcttttggtaatttttaatgaagtctacatttagccgtcggttttatctttcttaaatctttgacctaaacttttgtaagagcagctaataatttctaagattttccctgtttctttttcctacctttccttttctcataactgattggagaaattaatcagaagtcaaatacaagggacttcataatctagaaaccagataatcagctcccaagtcatgtagctaactatgcatttaaaataagtctgtctctttagttcttaagtcatatatttgtttgttaattacagtaaatgaactttaattggggtttttaaaagacagaattagcgaagtctaatttttataatgaaataagtttttgatattgctctacttggacgattttagtgaccaaaactatggataaaactgcctaagcataacattaatatatttagaatggcattcttcagtgctagtatttgaaattggaattagtacattgtgcattcttagtagtctttatccctagaatcaattctctcagcatcaccaaactgaattggtgaaatagtgctaagattctgggcaataggaagattagtgaatatgatacattgattccagggtgccagggattggctgacattaaggaccagctggctatggtcctcaggctacggtcctcagtattctagtatttgagtagtggaggtaaatccaaaggcgactggttatattttacttctaaatgtgtgctgaagtgtctcttgttcaaaaattcttgatatttagagcttcaagttaccacatttaaaagtaaagacttggcacggtggcacacacctataatcttagcactttgggaggccgaagtggatggatcatatgcagtcaggaatttgagaccagcctggccaacatggtgaaacctcatctttactaaaaatacaaaaattagccgggcgttgtgacgcacacccatagtcccagctaactccggaggctaagacaagagaatcacttgaacttgggagacagaggttgcagtaatctgagatcactccgctgcactccagcctgagtgagagtgagactgtgtctcaaacaaacaaacaaaaaacaaacaaaaaaatttgcattgtaaattgtacctcaaatttgagcagtttttgtgtttgtgtaaattaaagtaaaaagcagtccacaataatgttttgtaatactgcacaccagttctaccagattttgtaactatcagatttaaatgaaaaaagagaaggaagaggctgattgctggagtgttaaagaaatcttggccgggcgtggtggctcacgcttgtaatcccagcactttgggaggccgaggcgggtggatcacgaggtcaggagatcgagaccatcctggctaacacggtgaaaccccgtctctactaaaaatacaaaaaaaaattagccgggcgtgatggcgggcgcctgtagtcccagctactcgggaggctgaggcaagagaatggcgtgaacccgggaggcggagcttgcagtgagccgagattgcgccactgcactcccgcctgggccacagagcgagactccgtctcaaaaaaaaaaaaaaaaaaaaaagaaatctttagaagccacagggctagaagagaagtcaccaaacacctagggacagtcctaggcctagaaagccctttaaagtaatagtgaattgttttaaaattaagttattgagtggcctactgactaccatccaaaaacctttatcaccaaatttgttcagtgtttgctattgggagattgtccatatccctccgtaattaagggccagcaagtaatacgatcttcttacagccaaccttgctcttcccaaagggagaaagtaatacatcattaacctggaatttgtgatataacaggtagccttggttaatgtttaccttttcactatgtaaaaaagaaaaaacacacagcaaatagtgcaaataaaatttggtcttttaaagcattttagcagtagctatgtaaaaaaagttaatggttattattcctaaattttcataagacccttggtagacaaaactatcggttatattatgtatatatgaggttagttaagctgcatttagttaggaacatttaatttttacctaaatgatccttttttcatccagaggtagagattttattgtcattatgaatgttactccccatttagtccaaaatagtgagcttttaagttgtgccaggtacttaacaatagtaaaagctattgtatagatttttattcaatgtgacctataatacatttctgattccttctgtattgaatgtcccagtttccatattaagtgctatgccctgtataacattaatgaatttaatagtgtacaattttgggccaggcatggtggctcacgccagtaatcctggcactttgggaggcagaggcaggcagatcacctgaggtcaggggttcgagatcagcctggccaacatggcaaaatcacatctctactaaaaatacaaaaattagccaggcgtggtggtgcatgcctgtagtcccagctactcaggaggctgaggcaggagaatcgcttgaacccaggaggcggaggttgcagtgagccgagatcatgccattgcactccagcctgggagacagagcaagactctatctcaaaaataaaaataaaaaaaaaattgcgtgcaattttgtattttcatagtcgtatctttttaaaggtatcatgatttcagttgtggtcaggaagtatgtgccttaaatcctctactctagacccaaagtttggagagctatattatttaataagttgtttgtgacagccttgttacctttttcatttgatttgagggagaaagactgtgatcctgacagattccttctcataaaatggcctaatgtgtatcagtctaggacttctggggagggaacctctaccatgcattctgtcccaggatgtcaaagtcataagaatcagggtcccctgaaataaaatcactgaaaagatatgttctgttatatattatttaaaaaatttatctggtgccaccaaagaatgacagcagtttctaaccaacttcatatttatagcatcttatgaagatattgtaaggcttagcatattttgccactggttttctttgtaatataggttgaaagtgagacatgtttgaatacttttgtatgtaaatatctcccattctttttctatctcttcttggtctatatttactaagaattgatatttaaaaaacagttcactaatgaactctacatattattgaacactcacagggcaatattgatttgggtgctactagacttttacctaacattagtctttctcaatagttgttgtaaaggatagtattcaatccagtaaatattaaagtgtattagtttaatgaaggttatttatatactgtcataccacaaacctatggtggaaagaacatctgcattcaccagaatgtacttgttcctttggctgtgaataaattggataagacttttttattgtaagttccagctgttggaagatacggggataagattgacattgctgttgcagtattgcaaaaacatgactaaattggttaattatgtctaccgcttatgtttaagagaatcctttcactaacttaaattgttaacattgttgtgatattgagaaagaatattaacctaaacagtcactttacaacaatcatgtaaagacgtgtgcctgcagttgaggttttttgcatttctgagcctgctttgtattcatgagaaacaaaaacataatgggagaaaagttttagataagcagcattgtaagtttttgtaaagtttgggatgtcaaagtattaacgaagggtactgaaaacatacttttacttgggtcaaattactttttatgatctgatttcttaattttctgtatttgaaatcttgcaaattaggaatatctacatctatagataaataagtaaaacttaatggtagaaataagtgtaattcagcaacatgattcaacaatttttatatttaggataagttattgtttattatattaatatcaaatttatatattgccttgtaatgctaaatgctcttaaaagaatatatgggctacttcaattctaccaccttcttccccctcccccaggacgtacaaaagatcttatattaaccaatcctctgtgaattttgccatatcaaacattgtgccttattttaataaaactgttttgttggaatccagttctatattaaagtctctataatgttgatatttgcctgattacttgttacatcattgaatacatacattaaatatgtactaacattgactctgttctagatgcaatggataaaagata

SEQ ID NO: 1484 - DNA, 8093 bp, Homo sapiens
atgggggatggtggtggtgtgagggagaatccaaaaatgaataaagatagtcattctatagcccgccccggagcggcgcgcgcaccccaggactcgcgtcgcgtgactcggccaaggcgcgcagggtttgcgcccgcccgcgccacttccgactcagccctcggttcaggttccggggcgccgcagagctcccggcctctggaccgcgcgcggcgctctggggaatccggcgccacgcgccgtgcggtggccaggatggaggaggccggagcagcggtggtcacggccggggaggccgaactgaactggtcccgcctcagcgtgtccaccgagacgctggagtctgagctggaggcgcggggggaggagcggcgcggggcgcgggaggcgctgctgcggctgctgctgcctcacaaccgtctggtgtcgctgccacgggcgctgggcagcggcttcccgcacctccagctgctggacgtgagcggcaacgcgttgaccgcgctcgggccggagctgctcgctctgcgcggcctgcgcacgctgctggccaagaacaaccggctcggcgggcccagtgcgctgcccaagggcctggcccagtcgccgctctgccgcagcctccaggtgctcaacctcagcggcaactgtttccaggaggtgcctgcctcgctcttagagctgcgcgcgctgcagaccctgagcctgggcggcaaccaactgcagagcatcccggctgagatcgagaacttgcagagtttagagtgtttatatcttggaggaaatttcattaaagaaatcccaccagaattaggaaatctgccttctctgaattatttggtattatgtgacaacaaaatccaaagcatacctcctcaactttcacagttacattcacttcgttccctaagtcttcacaataacttgctgacatatctgcctcgagagatcctcaaccttattcatttggaagagttgagtttacgaggaaatccattggttgttcgttttgttagagatttaacctatgatcctccaactctcctggaattagctgcacggaccattaagattcgaaatatttcctacactccctatgatcttcctggaaatcttcttagatacttgggttcagccagcaattgcccaaacccaaagtgtggaggagtctactttgactgctgtgtcagacaaattaaatttgtggacttctgtgggaagtatcgcctcccactgatgcactacttgtgttcaccagaatgttcttccccttgcagttctgcctctcacagctccacttcccagagtgaatctgactcagaagatgaagctagtgttgctgcacgcagaatgcagaaagttcttcttggttgaacaggagtgcacagtgttgtgaaatacttaaaaaactgagcaaaatggttagacaagaaaatagagcttgaagttcactagaaatcttatcttcatcttaagtgttcatcaaagagtctgggatgatataaaacattttgtgtttcatctacccattcagcaagaatgagtccagtcccatgtttagattattttaacataatttgtgaatgatagtttcacatttggctgatggtttgcagttttcactcaagttttgcatgaatcacaaagcagaatggtaccttttgaagagcagttctgcaataagtcatgagtagtataacttttggacattgagatggagaaagtgagaaattatcaaagctataattgccagagttgcccttgggtttaggtagaacactgtataccatatatactatataccatatatactatatataccatatatattatatgccataaacaggattaaccctcccttttctaattgcctgtatgtctagattacagaactattcaaagaagctcacagatggttacatgggacaaacctttctgacaaactaactggtaaagtaaggcatataacatttacatgagatattaaaactttttcattattatcctttgttctatatgattgctattaaccttatgtaatctagcaatgactgttatagtgccttaatccagcaaggatataaaaatgtattcaagaagtaatgccagagcaacctataacctgacataccatgcagaacattgtaaaatattctttaacagaactaggtaaataactgtgtatctaatatccgatctcatggccctcttaacatttttttgtttaaatgtgcactcatcccttataagcacattacttttacacttaatggtaggccacaatcttcatcaatctgttcatcataagacagagtaagaatttttaacagaaaattctaaaagagatagaagctaggaaagcttctttatatcttgcattaaatgggtagggaaaaaatatgactctcacccatgtcatgtactggaccatctttctctactttttaaagaaaaactaatacaactagaaaaacatcacaacaagccaaataaaaatggagaaaaggagtcattgtccttatacctaatggaacagtttccagaactactttaactatggaagcatttttgaaaataaagtattaataaaatagaaaaaaattattaaatatattgtatccttaatgtatagcaggaaaatagtttcacaaattaattgctattagaaattaccaaatttttattaagtactttaatatgcaatacaaattgaataatagtacaactataagttgatataaagtaagtgcttactggtaatcattaaataactaataacatgacttgttggttaatgttaaacctacagtaagaaatgttatacagatcagataggcattagaacatcaggtgataccttttctgatttctggcattcatggcacaccatttcttaaaagcagattgttgtataataacatatacatgtattagggtttttttcatatatattttttattttagaagaaactagcataattcagggtttatgtgtttatttgtatattaattcatgaaacatgagagtttcatgaactgcagatgtgaaacgctgctatagaatgaatcccttcacctttaccttgttataatgtagtaagattttgttttccttttgactcagaaattttctatgtctatagaggtaatctaatatgttcctactgcctagaagagtaatacataggtgattatatcataaaatagaggtataaagtctttgcttacttctccatgtgggccacagcaagctgcagactgtacagttatgaaaggtaaagatgacttaggctgtgcctaagtgacaaatgtaaaatgttttgtaaataagtgacttacctaagatacataagatattttcatagaaaataatgtattcatagtaaaatactcaaattgataggaccaattttttctggcctaaatgcttatgcctacttcctaatcaattaccagcttgacttaagtaactgcttgagtagtcttctaagagttagtcttcgtaaaataaatggataggtatgtaaatatataatcttacataccctttccagcttcctagaaaggtctactgcttcatcttttacagatgtaaataggtccaaccagagacagtttctggcctttgcatataagaatatagatgtataccacagtattatttcaacaaaatgttatggttctatgtatagttgaaaactctatgatcagcatacaactgtcttttggtaatttttaatgaagtctacatttagccgtcggttttatctttcttaaatctttgacctaaacttttgtaagagcagctaataatttctaagattttccctgtttctttttcctacctttccttttctcataactgattggagaaattaatcagaagtcaaatacaagggacttcataatctagaaaccagataatcagctcccaagtcatgtagctaactatgcatttaaaataagtctgtctctttagttcttaagtcatatatttgtttgttaattacagtaaatgaactttaattggggtttttaaaagacagaattagcgaagtctaatttttataatgaaataagtttttgatattgctctacttggacgattttagtgaccaaaactatggataaaactgcctaagcataacattaatatatttagaatggcattcttcagtgctagtatttgaaattggaattagtacattgtgcattcttagtagtctttatccctagaatcaattctctcagcatcaccaaactgaattggtgaaatagtgctaagattctgggcaataggaagattagtgaatatgatacattgattccagggtgccagggattggctgacattaaggaccagctggctatggtcctcaggctacggtcctcagtattctagtatttgagtagtggaggtaaatccaaaggcgactggttatattttacttctaaatgtgtgctgaagtgtctcttgttcaaaaattcttgatatttagagcttcaagttaccacatttaaaagtaaagacttggcacggtggcacacacctataatcttagcactttgggaggccgaagtggatggatcatatgcagtcaggaatttgagaccagcctggccaacatggtgaaacctcatctttactaaaaatacaaaaattagccgggcgttgtgacgcacacccatagtcccagctaactccggaggctaagacaagagaatcacttgaacttgggagacagaggttgcagtaatctgagatcactccgctgcactccagcctgagtgagagtgagactgtgtctcaaacaaacaaacaaaaaacaaacaaaaaaatttgcattgtaaattgtacctcaaatttgagcagtttttgtgtttgtgtaaattaaagtaaaaagcagtccacaataatgttttgtaatactgcacaccagttctaccagattttgtaactatcagatttaaatgaaaaaagagaaggaagaggctgattgctggagtgttaaagaaatcttggccgggcgtggtggctcacgcttgtaatcccagcactttgggaggccgaggcgggtggatcacgaggtcaggagatcgagaccatcctggctaacacggtgaaaccccgtctctactaaaaatacaaaaaaaaattagccgggcgtgatggcgggcgcctgtagtcccagctactcgggaggctgaggcaagagaatggcgtgaacccgggaggcggagcttgcagtgagccgagattgcgccactgcactcccgcctgggccacagagcgagactccgtctcaaaaaaaaaaaaaaaaaaaaaagaaatctttagaagccacagggctagaagagaagtcaccaaacacctagggacagtcctaggcctagaaagccctttaaagtaatagtgaattgttttaaaattaagttattgagtggcctactgactaccatccaaaaacctttatcaccaaatttgttcagtgtttgctattgggagattgtccatatccctccgtaattaagggccagcaagtaatacgatcttcttacagccaaccttgctcttcccaaagggagaaagtaatacatcattaacctggaatttgtgatataacaggtagccttggttaatgtttaccttttcactatgtaaaaaagaaaaaacacacagcaaatagtgcaaataaaatttggtcttttaaagcattttagcagtagctatgtaaaaaaagttaatggttattattcctaaattttcataagacccttggtagacaaaactatcggttatattatgtatatatgaggttagttaagctgcatttagttaggaacatttaatttttacctaaatgatccttttttcatccagaggtagagattttattgtcattatgaatgttactccccatttagtccaaaatagtgagcttttaagttgtgccaggtacttaacaatagtaaaagctattgtatagatttttattcaatgtgacctataatacatttctgattccttctgtattgaatgtcccagtttccatattaagtgctatgccctgtataacattaatgaatttaatagtgtacaattttgggccaggcatggtggctcacgccagtaatcctggcactttgggaggcagaggcaggcagatcacctgaggtcaggggttcgagatcagcctggccaacatggcaaaatcacatctctactaaaaatacaaaaattagccaggcgtggtggtgcatgcctgtagtcccagctactcaggaggctgaggcaggagaatcgcttgaacccaggaggcggaggttgcagtgagccgagatcatgccattgcactccagcctgggagacagagcaagactctatctcaaaaataaaaataaaaaaaaaattgcgtgcaattttgtattttcatagtcgtatctttttaaaggtatcatgatttcagttgtggtcaggaagtatgtgccttaaatcctctactctagacccaaagtttggagagctatattatttaataagttgtttgtgacagccttgttacctttttcatttgatttgagggagaaagactgtgatcctgacagattccttctcataaaatggcctaatgtgtatcagtctaggacttctggggagggaacctctaccatgcattctgtcccaggatgtcaaagtcataagaatcagggtcccctgaaataaaatcactgaaaagatatgttctgttatatattatttaaaaaatttatctggtgccaccaaagaatgacagcagtttctaaccaacttcatatttatagcatcttatgaagatattgtaaggcttagcatattttgccactggttttctttgtaatataggttgaaagtgagacatgtttgaatacttttgtatgtaaatatctcccattctttttctatctcttcttggtctatatttactaagaattgatatttaaaaaacagttcactaatgaactctacatattattgaacactcacagggcaatattgatttgggtgctactagacttttacctaacattagtctttctcaatagttgttgtaaaggatagtattcaatccagtaaatattaaagtgtattagtttaatgaaggttatttatatactgtcataccacaaacctatggtggaaagaacatctgcattcaccagaatgtacttgttcctttggctgtgaataaattggataagacttttttattgtaagttccagctgttggaagatacggggataagattgacattgctgttgcagtattgcaaaaacatgactaaattggttaattatgtctaccgcttatgtttaagagaatcctttcactaacttaaattgttaacattgttgtgatattgagaaagaatattaacctaaacagtcactttacaacaatcatgtaaagacgtgtgcctgcagttgaggttttttgcatttctgagcctgctttgtattcatgagaaacaaaaacataatgggagaaaagttttagataagcagcattgtaagtttttgtaaagtttgggatgtcaaagtattaacgaagggtactgaaaacatacttttacttgggtcaaattactttttatgatctgatttcttaattttctgtatttgaaatcttgcaaattaggaatatctacatctatagataaataagtaaaacttaatggtagaaataagtgtaattcagcaacatgattcaacaatttttatatttaggataagttattgtttattatattaatatcaaatttatatattgccttgtaatgctaaatgctcttaaaagaatatatgggctacttcaattctaccaccttcttccccctcccccaggacgtacaaaagatcttatattaaccaatcctctgtgaattttgccatatcaaacattgtgccttattttaataaaactgttttgttggaatccagttctatattaaagtctctataatgttgatatttgcctgattacttgttacatcattgaatacatacattaaatatgtactaacattgactctgttctagatgcaatggataaaagata

SEQ ID NO: 1485 - DNA, 10182 bp, Homo sapiens
ccggaaaatggccgccgccgccgccgccgcgccgagcggaggaggaggaggaggcgaggaggagagactgctccataaaaatacagactcaccagttcctgctttgatgtgacatgtgactccccagaatacaccttgcttctgtagaccagctccaacaggattccatggtagctgggatgttagggctcagggaagaaaagtcagaagaccaggacctccagggcctcaaggacaaacccctcaagtttaaaaaggtgaagaaagataagaaagaagagaaagagggcaagcatgagcccgtgcagccatcagcccaccactctgctgagcccgcagaggcaggcaaagcagagacatcagaagggtcaggctccgccccggctgtgccggaagcttctgcctcccccaaacagcggcgctccatcatccgtgaccggggacccatgtatgatgaccccaccctgcctgaaggctggacacggaagcttaagcaaaggaaatctggccgctctgctgggaagtatgatgtgtatttgatcaatccccagggaaaagcctttcgctctaaagtggagttgattgcgtacttcgaaaaggtaggcgacacatccctggaccctaatgattttgacttcacggtaactgggagagggagcccctcccggcgagagcagaaaccacctaagaagcccaaatctcccaaagctccaggaactggcagaggccggggacgccccaaagggagcggcaccacgagacccaaggcggccacgtcagagggtgtgcaggtgaaaagggtcctggagaaaagtcctgggaagctccttgtcaagatgccttttcaaacttcgccagggggcaaggctgaggggggtggggccaccacatccacccaggtcatggtgatcaaacgccccggcaggaagcgaaaagctgaggccgaccctcaggccattcccaagaaacggggccgaaagccggggagtgtggtggcagccgctgccgccgaggccaaaaagaaagccgtgaaggagtcttctatccgatctgtgcaggagaccgtactccccatcaagaagcgcaagacccgggagacggtcagcatcgaggtcaaggaagtggtgaagcccctgctggtgtccaccctcggtgagaagagcgggaaaggactgaagacctgtaagagccctgggcggaaaagcaaggagagcagccccaaggggcgcagcagcagcgcctcctcaccccccaagaaggagcaccaccaccatcaccaccactcagagtccccaaaggcccccgtgccactgctcccacccctgcccccacctccacctgagcccgagagctccgaggaccccaccagcccccctgagccccaggacttgagcagcagcgtctgcaaagaggagaagatgcccagaggaggctcactggagagcgacggctgccccaaggagccagctaagactcagcccgcggttgccaccgccgccacggccgcagaaaagtacaaacaccgaggggagggagagcgcaaagacattgtttcatcctccatgccaaggccaaacagagaggagcctgtggacagccggacgcccgtgaccgagagagttagctgactttacacggagcggattgcaaagcaaaccaacaagaataaaggcagctgttgtctcttctccttatgggtagggctctgacaaagcttcccgattaactgaaataaaaaatatttttttttctttcagtaaacttagagtttcgtggcttcagggtgggagtagttggagcattggggatgtttttcttaccgacaagcacagtcaggttgaagacctaaccagggccagaagtagctttgcacttttctaaactaggctccttcaacaaggcttgctgcagatactactgaccagacaagctgttgaccaggcacctcccctcccgcccaaacctttcccccatgtggtcgttagagacagagcgacagagcagttgagaggacactcccgttttcggtgccatcagtgccccgtctacagctcccccagctccccccacctcccccactcccaaccacgttgggacagggaggtgtgaggcaggagagacagttggattctttagagaagatggatatgaccagtggctatggcctgtgcgatcccacccgtggtggctcaagtctggccccacaccagccccaatccaaaactggcaaggacgcttcacaggacaggaaagtggcacctgtctgctccagctctggcatggctaggaggggggagtcccttgaactactgggtgtagactggcctgaaccacaggagaggatggcccagggtgaggtggcatggtccattctcaagggacgtcctccaacgggtggcgctagaggccatggaggcagtaggacaaggtgcaggcaggctggcctggggtcaggccgggcagagcacagcggggtgagagggattcctaatcactcagagcagtctgtgacttagtggacaggggagggggcaaagggggaggagaagaaaatgttcttccagttactttccaattctcctttagggacagcttagaattatttgcactattgagtcttcatgttcccacttcaaaacaaacagatgctctgagagcaaactggcttgaattggtgacatttagtccctcaagccaccagatgtgacagtgttgagaactacctggatttgtatatatacctgcgcttgttttaaagtgggctcagcacatagggttcccacgaagctccgaaactctaagtgtttgctgcaattttataaggacttcctgattggtttctcttctccccttccatttctgccttttgttcatttcatcctttcacttctttcccttcctccgtcctcctccttcctagttcatcccttctcttccaggcagccgcggtgcccaaccacacttgtcggctccagtccccagaactctgcctgccctttgtcctcctgctgccagtaccagccccaccctgttttgagccctgaggaggccttgggctctgctgagtccgacctggcctgtctgtgaagagcaagagagcagcaaggtcttgctctcctaggtagccccctcttccctggtaagaaaaagcaaaaggcatttcccaccctgaacaacgagccttttcacccttctactctagagaagtggactggaggagctgggcccgatttggtagttgaggaaagcacagaggcctcctgtggcctgccagtcatcgagtggcccaacaggggctccatgccagccgaccttgacctcactcagaagtccagagtctagcgtagtgcagcagggcagtagcggtaccaatgcagaactcccaagacccgagctgggaccagtacctgggtccccagcccttcctctgctcccccttttccctcggagttcttcttgaatggcaatgttttgcttttgctcgatgcagacagggggccagaacaccacacatttcactgtctgtctggtccatagctgtggtgtaggggcttagaggcatgggcttgctgtgggtttttaattgatcagttttcatgtgggatcccatctttttaacctctgttcaggaagtccttatctagctgcatatcttcatcatattggtatatccttttctgtgtttacagagatgtctcttatatctaaatctgtccaactgagaagtaccttatcaaagtagcaaatgagacagcagtcttatgcttccagaaacacccacaggcatgtcccatgtgagctgctgccatgaactgtcaagtgtgtgttgtcttgtgtatttcagttattgtccctggcttccttactatggtgtaatcatgaaggagtgaaacatcatagaaactgtctagcacttccttgccagtctttagtgatcaggaaccatagttgacagttccaatcagtagcttaagaaaaaaccgtgtttgtctcttctggaatggttagaagtgagggagtttgccccgttctgtttgtagagtctcatagttggactttctagcatatatgtgtccatttccttatgctgtaaaagcaagtcctgcaaccaaactcccatcagcccaatccctgatccctgatcccttccacctgctctgctgatgacccccccagcttcacttctgactcttccccaggaagggaaggggggtcagaagagagggtgagtcctccagaactcttcctccaaggacagaaggctcctgcccccatagtggcctcgaactcctggcactaccaaaggacacttatccacgagagcgcagcatccgaccaggttgtcactgagaagatgtttattttggtcagttgggtttttatgtattatacttagtcaaatgtaatgtggcttctggaatcattgtccagagctgcttccccgtcacctgggcgtcatctggtcctggtaagaggagtgcgtggcccaccaggcccccctgtcacccatgacagttcattcagggccgatggggcagtcgtggttgggaacacagcatttcaagcgtcactttatttcattcgggccccacctgcagctccctcaaagaggcagttgcccagcctctttcccttccagtttattccagagctgccagtggggcctgaggctccttagggttttctctctatttccccctttcttcctcattccctcgtctttcccaaaggcatcacgagtcagtcgcctttcagcaggcagccttggcggtttatcgccctggcaggcaggggccctgcagctctcatgctgcccctgccttggggtcaggttgacaggaggttggagggaaagccttaagctgcaggattctcaccagctgtgtccggcccagttttggggtgtgacctcaatttcaattttgtctgtacttgaacattatgaagatgggggcctctttcagtgaatttgtgaacagcagaattgaccgacagctttccagtacccatggggctaggtcattaaggccacatccacagtctcccccacccttgttccagttgttagttactacctcctctcctgacaatactgtatgtcgtcgagctccccccaggtctacccctcccggccctgcctgctggtgggcttgtcatagccagtgggattgccggtcttgacagctcagtgagctggagatacttggtcacagccaggcgctagcacagctcccttctgttgatgctgtattcccatatcaaaagacacaggggacacccagaaacgccacatcccccaatccatcagtgccaaactagccaacggccccagcttctcagctcgctggatggcggaagctgctactcgtgagcgccagtgcgggtgcagacaatcttctgttgggtggcatcattccaggcccgaagcatgaacagtgcacctgggacagggagcagccccaaattgtcacctgcttctctgcccagcttttcattgctgtgacagtgatggcgaaagagggtaataaccagacacaaactgccaagttgggtggagaaaggagtttctttagctgacagaatctctgaattttaaatcacttagtaagcggctcaagcccaggagggagcagagggatacgagcggagtcccctgcgcgggaccatctggaattggtttagcccaagtggagcctgacagccagaactctgtgtcccccgtctaaccacagctccttttccagagcattccagtcaggctctctgggctgactgggccaggggaggttacaggtaccagttctttaagaagatctttgggcatatacatttttagcctgtgtcattgccccaaatggattcctgtttcaagttcacacctgcagattctaggacctgtgtcctagacttcagggagtcagctgtttctagagttcctaccatggagtgggtctggaggacctgcccggtgggggggcagagccctgctccctccgggtcttcctactcttctctctgctctgacgggatttgttgattctctccattttggtgtctttctcttttagatattgtatcaatctttagaaaaggcatagtctacttgttataaatcgttaggatactgcctcccccagggtctaaaattacatattagaggggaaaagctgaacactgaagtcagttctcaacaatttagaaggaaaacctagaaaacatttggcagaaaattacatttcgatgtttttgaatgaatacgagcaagcttttacaacagtgctgatctaaaaatacttagcacttggcctgagatgcctggtgagcattacaggcaaggggaatctggaggtagccgacctgaggacatggcttctgaacctgtcttttgggagtggtatggaaggtggagcgttcaccagtgacctggaaggcccagcaccaccctccttcccactcttctcatcttgacagagcctgccccagcgctgacgtgtcaggaaaacacccagggaactaggaaggcacttctgcctgaggggcagcctgccttgcccactcctgctctgctcgcctcggatcagctgagccttctgagctggcctctcactgcctccccaaggccccctgcctgccctgtcaggaggcagaaggaagcaggtgtgagggcagtgcaaggagggagcacaacccccagctcccgctccgggctccgacttgtgcacaggcagagcccagaccctggaggaaatcctacctttgaattcaagaacatttggggaatttggaaatctctttgcccccaaacccccattctgtcctacctttaatcaggtcctgctcagcagtgagagcagatgaggtgaaaaggccaagaggtttggctcctgcccactgatagcccctctccccgcagtgtttgtgtgtcaagtggcaaagctgttcttcctggtgaccctgattatatccagtaacacatagactgtgcgcataggcctgctttgtctcctctatcctgggcttttgttttgctttttagttttgcttttagtttttctgtcccttttatttaacgcaccgactagacacacaaagcagttgaatttttatatatatatctgtatattgcacaattataaactcattttgcttgtggctccacacacacaaaaaaagacctgttaaaattatacctgttgcttaattacaatatttctgataaccatagcataggacaagggaaaataaaaaaagaaaaaaaagaaaaaaaaacgacaaatctgtctgctggtcacttcttctgtccaagcagattcgtggtcttttcctcgcttctttcaagggctttcctgtgccaggtgaaggaggctccaggcagcacccaggttttgcactcttgtttctcccgtgcttgtgaaagaggtcccaaggttctgggtgcaggagcgctcccttgacctgctgaagtccggaacgtagtcggcacagcctggtcgccttccacctctgggagctggagtccactggggtggcctgactcccccagtccccttcccgtgacctggtcagggtgagcccatgtggagtcagcctcgcaggcctccctgccagtagggtccgagtgtgtttcatccttcccactctgtcgagcctgggggctggagcggagacgggaggcctggcctgtctcggaacctgtgagctgcaccaggtagaacgccagggaccccagaatcatgtgcgtcagtccaaggggtcccctccaggagtagtgaagactccagaaatgtccctttcttctcccccatcctacgagtaattgcatttgcttttgtaattcttaatgagcaatatctgctagagagtttagctgtaacagttctttttgatcatctttttttaataattagaaacaccaaaaaaatccagaaacttgttcttccaaagcagagagcattataatcaccagggccaaaagcttccctccctgctgtcattgcttcttctgaggcctgaatccaaaagaaaaacagccataggccctttcagtggccgggctacccgtgagcccttcggaggaccagggctggggcagcctctgggcccacatccggggccagctccggcgtgtgttcagtgttagcagtgggtcatgatgctctttcccacccagcctgggataggggcagaggaggcgaggaggccgttgccgctgatgtttggccgtgaacaggtgggtgtctgcgtgcgtccacgtgcgtgttttctgactgacatgaaatcgacgcccgagttagcctcacccggtgacctctagccctgcccggatggagcggggcccacccggttcagtgtttctggggagctggacagtggagtgcaaaaggcttgcagaacttgaagcctgctccttcccttgctaccacggcctcctttccgtttgatttgtcactgcttcaatcaataacagccgctccagagtcagtagtcaatgaatatatgaccaaatatcaccaggactgttactcaatgtgtgccgagcccttgcccatgctgggctcccgtgtatctggacactgtaacgtgtgctgtgtttgctccccttccccttccttctttgccctttacttgtctttctggggtttttctgtttgggtttggtttggtttttatttctccttttgtgttccaaacatgaggttctctctactggtcctcttaactgtggtgttgaggcttatatttgtgtaatttttggtgggtgaaaggaattttgctaagtaaatctcttctgtgtttgaactgaagtctgtattgtaactatgtttaaagtaattgttccagagacaaatatttctagacactttttctttacaaacaaaagcattcggagggagggggatggtgactgagatgagaggggagagctgaacagatgacccctgcccagatcagccagaagccacccaaagcagtggagcccaggagtcccactccaagccagcaagccgaatagctgatgtgttgccactttccaagtcactgcaaaaccaggttttgttccgcccagtggattcttgttttgcttcccctccccccgagattattaccaccatcccgtgcttttaaggaaaggcaagattgatgtttccttgaggggagccaggaggggatgtgtgtgtgcagagctgaagagctggggagaatggggctgggcccacccaagcaggaggctgggacgctctgctgtgggcacaggtcaggctaatgttggcagatgcagctcttcctggacaggccaggtggtgggcattctctctccaaggtgtgccccgtgggcattactgtttaagacacttccgtcacatcccaccccatcctccagggctcaacactgtgacatctctattccccaccctccccttcccagggcaataaaatgaccatggagggggcttgcactctcttggctgtcacccgatcgccagcaaaacttagatgtgagaaaaccccttcccattccatggcgaaaacatctccttagaaaagccattaccctcattaggcatggttttgggctcccaaaacacctgacagcccctccctcctctgagaggcggagagtgctgactgtagtgaccattgcatgccgggtgcagcatctggaagagctaggcagggtgtctgccccctcctgagttgaagtcatgctcccctgtgccagcccagaggccgagagctatggacagcattgccagtaacacaggccaccctgtgcagaagggagctggctccagcctggaaacctgtctgaggttgggagaggtgcacttggggcacagggagaggccgggacacacttagctggagatgtctctaaaagccctgtatcgtattcaccttcagtttttgtgttttgggacaattactttagaaaataagtaggtcgttttaaaaacaaaaattattgattgcttttttgtagtgttcagaaaaaaggttctttgtgtatagccaaatgactgaaagcactgatatatttaaaaacaaaaggcaatttattaaggaaatttgtaccatttcagtaaacctgtctgaatgtacctgtatacgtttcaaaaacaccccccccccactgaatccctgtaacctatttattatataaagagtttgccttataaattt

SEQ ID NO: 1486 - DNA, 4952 bp, Homo sapiens
aagtggcagttggcgtaggtgcattcggagtgcggccgaggtaactaccgagtcttcggcgggctcgcgagcccggccgcggcctgctggtttcagtgatggctcatgaagcaatggaatatgatgttcaggtgcagttaaatcatgccgaacaacagccagctcctgctggcatggccagcagccaagggggaccagccctcctccagcctgttcctgctgatgtggtcagcagccagggggtaccatccatcctccagccagctcctgctgaggtgatcagcagccaagcgacaccacccctgctccagcctgctccgcaactgtctgttgacctgacagaagtggaggtcttgggagaagacactgtggagaacatcaatccaagaacttcagaacaacataggcagggatctgatggtaatcacaccatcccagcatcttcgttgcattcaatgaccaacttcatcagcggactgcagagacttcatggcatgctggaattcctgagaccttcatcttcaaaccacagtgtagggccaatgagaacaagaaggagggtatctgcttcacggagggcaagagccggagggtctcagaggacagacagtgccaggttgagagcaccattggatgcttactttcaggtgagcaggacccagcctgacttgccagctaccacttatgattcagagactaggaatcctgtatctgaagagttgcaggtgtctagtagttctgattctgacagtgacagctctgcagagtatggaggggttgttgaccaggcagaggaatctggagctgtcattttagaagagcaactagcaggtgtctcagcagagcaagaagttacatgtatcgatggaggcaagaccctccccaaacagccatctccccagaagtctgagcctctgctaccttctgcttctatggatgaggaagaaggggacacttgtacaatatgtctggaacagtggaccaatgctggggaccaccggctctcagcattacgctgtgggcatctctttgggtataggtgcatttccacgtggcttaaaggacaagtacgaaaatgtccccagtgcaacaagaaagccaggcacagtgacattgtcgtcctttatgcccgaaccctgagagctttggacactagtgaacaggagcgcatgaaaagttccctactgaaggaacagatgctaaggaaacaggccgagttagaatcagcacagtgccgactccaactgcaggtcctcactgataagtgcactaggcttcaaaggcgtgttcaggacttgcaaaaacttacgtcacatcaaagtcagaatttacagcaacccaggggctcccaagcatgggtcctgagctgctcaccctccagccagggccagcacaagcacaagtaccacttccaaaagaccttcacagtatctcaggcaggaaactgccggatcatggcatactgtgatgctctgagctgcctggtgatatcacagccttctcctcaggcctcttttcttccaggctttggtgttaagatgttgagtactgccaacatgaagagcagtcagtacattccgatgcatggcaaacagatccgtggactggcgtttagcagttacctcagaggcttgctactctctgcttccctagacaacactattaaactgaccagcctggagacaaataccgtggtccagacttataatgctggacgtcctgtctggagctgttgctggtgtcttgatgaggctaactacatctatgctggactggccaatggttcaattctggtatatgacgtgcgaaacacgagcagtcatgtgcaggagttagtagctcagaaagccagatgcccactggtctccctgtcatacatgcccagagctgcctcagctgcatttccatatggtggggtgctggctggaaccttggaggatgcttcattctgggaacagaaaatggacttttctcattggcctcatgtgctgcccttggagccagggggctgcatagactttcagacagagaacagctcccggcactgtcttgtgacctacaggcctgataaaaatcacaccaccatacgaagtgtgctgatggaaatgtcctaccgactggatgacactggaaatccaatctgctcctgccagcctgtacatacattttttggaggacctacttgcaaactattgaccaaaaatgccattttccaaagcccagagaatgatggcaacatcctggtgtgtactggggatgaagcagcaaattctgccctgctgtgggatgctgccagtggctcgttgctccaggacctacagaccgatcagcctgtgttggacatctgcccatttgaggtgaaccgtaacagctacttggctaccttaacagagaagatggtccacatctataagtgggagtgactgtggtctcgaaaccttgaaggcatgctgctggttagatgttgtttgctagcgcctagcagccccaagcaagatccctgtttattgtctgcagtctagaacattgggaatcatggtttgtttgcattagtatgattctaggaccctaggtcactgagacactacagattgtgtatctgttatgtccactaaaagagtaattgatgggtactttatctacattatccatttcttgggtttaaagccttcattaaccattattgtatgttggaaattcttattttctttattttctgtgtgactttctggaccttagagagtgtcctctcatcatctaggatgtgagtgggcatcaagcattttctggggaatatgacatcccatctgagttgtcctgtcacttaagtatccttgaagggactaaccatcgtcttggtactgatttgatgcaacgtagatgtaaaagagtattattcagttgaacacaagagggcactgtagaaccttgtgtccggtttatttctgaccttgaaggctgacaatcttttagtaacttgtctcatctccacacaagtgtgtgatagcacacctgggtgtgctttgtggcaataacacttgtgttccaggtgtgaagtgctgggacattggcaggcccagtgatggaagcagctagtgaacgattccctttgctaatgcctagtgcattaagttcattgctttgcgaaaggtaaggaaagaggccagttgtttgagcggtggggaagattttgttttttctagccagcttaggatctcaggattggttttatccaagctagtgctttgaagaacactatctcttgccaggaaaagatgagtgataggtcaaagcttttacttgagtctcccctagtgtcagagatcaggagaaaagacataagagaatttacaaaagctattcagactgctattgaaaacatgagaagaacttgtctcccattttgagagttcctatctaaataaagccaattcctcagactgaggggctgttcttaagtgttctttatacattccagttatccagttaaagccttccccatgtgaagctgatgtttgattccagtttcctttgatttgcctccctaaccttttctagggctcagtttgtatttctttgccttgcctcagactactttgccaacccacttccacaacagaatatgcttcaagatgtgggcaggtcagtgtcctgttcatgggagaaaatggcttaacagtctgattttctcaaatgattattgaagagttgttatcgtttttattataaaacacttctgacctgtcaattcaagagctgtttctaggatctttctctccggcaaggggttgttgcactagatttccccagagttccaagttctagttgtgccttttaatgaccctttaatattttaggacataattttttccttttttaaatttttttgtagaaatagatgtttcactacgttgtccaggctggtcttggactcctggcctcaagcaatcctcccacctcagcctcctaaagtgccaaaattataggcgtgagccactgcacccggcccctatttgaagacgtcttttgtaaaagctagcttctagaacctgagaaaagctcttttctcagaggagatactccttttgatatgttaatgattaagagtggttgcccaggcctagtttcagtggcagaataggattggaattaaaaagcagaactcatctggcttcagcagattgccaccaagaggatacaggtggtcaggtcctggctggctttgtctttgggcctgggcaggcttaggatttgactttctttgaagtacctgatgctgattgattccactaatagtaggaagcaagagacttaactatgagggacgttatgtgaatcttaagtcttaccagtccttgcattagtacattaaatttggatgttttggaagcaaattcatacgatcgtgagtgatttctccaaagaaaaaaagccttgtccagcctgaccaacatggtgaaaccccatctctactaaaaatacaaaaattaactgggtgcagtggtgcgcatgcctgtagtcccagctacttgggaggctgaggcaggagaattgcttgaaccctgggaggcagaggttgcagtgagtcgagatcgcgccactgcactccagcctcggtgacagagcaagactccatctcaaaaaaaacaaacaaacaaaaaaaaaccctgatgccattcccagtccccgttgtaggacatcacatttataaatccaggctttagtcttctgggctccaccagtctctgccccaccatattcctttgtcactacctctaagtttttttccccacttgaggatttggagttaaacgaactcaaaatgtcttgtcattgtatgtattcttgcccctgctttgaaaacagggccatgggaactctgtttatgccctgttttaatgtttctgttttatgttttactgttaatatgaaaataaagaatttgctatgta

SEQ ID NO: 1487 - DNA, 2053 bp, Homo sapiens
ggtgatgctgcagccaagatggcgcccgcggcggccgtggcggcctgagcgtgatgctccgggttctcggcggcggctgtggccttggccggggccttgggtctctcccggtcgtgagcgatcagcgcctctccgccggccgggctagccgggacagagaggagacggccacgaagagaggaggcagtgagcaacaggacgagaccgcggcgtctccagcctcggtaccatggccgggatcatcaagaaacaaatcttgaagcacctctccagatttaccaaaaatttatctcctgacaagataaatctaagtacccttaaaggagaaggtgaactgaagaatttggagttggatgaagaagtactccagaatatgttggatttgccaacatggcttgctatcaacaaagttttttgtaataaagcgtccattaggatcccatggacaaaactgaaaacacatcccatctgtttgtccctggataaagtaataatggaaatgagtacatgtgaagaaccaagaagccctaatggcccatcaccaattgcaactgcttcaggacaaagtgaatacggctttgctgaaaaagtagttgagggaatttctgtttctgtaaattctatagtcatcagaattggagcaaaagccttcaatgcatcatttgaactttctcagcttcggatctatagtgtaaatgcacactgggaacatggagatttgagatttactcgtattcaggatccacagagaggagaggttttgacttttaaagaaataaattggcagatgataagaatagaggcagatgccacccaaagttcacatcttgaaattatgtgtgctcctgttcgattaataaccaaccaatcaaaaatcagagtcacacttaaaagaaggttaaaggactgcaatgtcatagcaacaaagttagttctaatattggatgacttattatgggttttgactgattcccagttgaaagctatggtacaatatgcaaagtctcttagtgaagcaatagaaaaatcaacagaacaaaggaagagtatggctcctgaacctacacagagctctacagtagtcgcatctgcccagcaagtgaagacaacgcaaacttcaaatgctcctgatgtaaatgatgcaattgtgaaactattcaatgattttgatgttaaggaaacctcccatcatttagtgatttctcatctagatctacacatatgtgatgacattcatgctaaagaaaaagagtcaaacagacgtattactggaggggcaatgcaactctcttttacacagctaactatagattattatccttatcataaagcaggagatagttgtaatcattggatgtattttagtgatgcaaccaaaacaaaaaatggatgggccaatgagttattgcatgaatttgagtgcaacgttgaaatgcttaaacaggctgtgaaggatcataatgtaggttcacctcctaaatccccaacacatgcctctccccagcacacacaaacagagaaggactaccctctgaaagggacatgcagaacaccttcagtattatctcaacaatcaaaagctaagctaatgtctagttctgttgtggttagacttgcagatttcaatatataccaggtctctacagcggaacaatgtcgttcttcccccaaaagcatgatttgctgcaataaaaaatccctatatcttccacaagaaatgtcagctgtctatatagaattcacagaatattactatccagatggaaaggattttccaactgccttcctaagcagatgagaaaactcaagatagatgaaggaagacatctgctctgcatctcatagggagtaaaatggcacagttgaaactcaagcattgtcttgtaaatctaaattcattgttttttctccactgtattacactgctcccctttgcccctgtattcaccacggccattgtctgttattgcataatcatagtattccagccatgcccccataattgtttttcttaaataaaatatatcattgaacaagtaaaaaaaaaaaaaaa

SEQ ID NO: 1488 - DNA, 5195 bp, Homo sapiens
ggtgatgctgcagccaagatggcgcccgcggcggccgtggcggcctgagcgtgatgctccgggttctcggcggcggctgtggccttggccggggccttgggtctctcccggtcgtgagcgatcagcgcctctccgccggccgggctagccgggacagagaggagacggccacgaagagaggaggcagtgagcaacaggacgagaccgcggcgtctccagcctcggtaccatggccgggatcatcaagaaacaaatcttgaagcacctctccagatttaccaaaaatttatctcctgacaagataaatctaagtacccttaaaggagaaggtgaactgaagaatttggagttggatgaagaagtactccagaatatgttggatttgccaacatggcttgctatcaacaaagttttttgtaataaagcgtccattaggatcccatggacaaaactgaaaacacatcccatctgtttgtccctggataaagtaataatggaaatgagtacatgtgaagaaccaagaagccctaatggcccatcaccaattgcaactgcttcaggacaaagtgaatacggctttgctgaaaaagtagttgagggaatttctgtttctgtaaattctatagtcatcagaattggagcaaaagccttcaatgcatcatttgaactttctcagcttcggatctatagtgtaaatgcacactgggaacatggagatttgagatttactcgtattcaggatccacagagaggagaggttttgacttttaaagaaataaattggcagatgataagaatagaggcagatgccacccaaagttcacatcttgaaattatgtgtgctcctgttcgattaataaccaaccaatcaaaaatcagagtcacacttaaaagaaggttaaaggactgcaatgtcatagcaacaaagttagttctaatattggatgacttattatgggttttgactgattcccagttgaaagctatggtacaatatgcaaagtctcttagtgaagcaatagaaaaatcaacagaacaaaggaagagtatggctcctgaacctacacagagctctacagtagtcgcatctgcccagcaagtgaagacaacgcaaacttcaaatgctcctgatgtaaatgatgcaattgtgaaactattcaatgattttgatgttaaggaaacctcccatcatttagtgatttctcatctagatctacacatatgtgatgacattcatgctaaagaaaaagagtcaaacagacgtattactggaggggcaatgcaactctcttttacacagctaactatagattattatccttatcataaagcaggagatagttgtaatcattggatgtattttagtgatgcaaccaaaacaaaaaatggatgggccaatgagttattgcatgaatttgagtgcaacgttgaaatgcttaaacaggctgtgaaggatcataatgtaggttcacctcctaaatccccaacacatgcctctccccagcacacacaaacagagaaggactaccctctgaaagggacatgcagaacaccttcagtattatctcaacaatcaaaagctaagctaatgtctagttctgttgtggttagacttgcagatttcaatatataccaggtctctacagcggaacaatgtcgttcttcccccaaaagcatgatttgctgcaataaaaaatccctatatcttccacaagaaatgtcagctgtctatatagaattcacagaatattactatccagatggaaaggattttccaattccatctcccaacctctatagccagctgaatgcactacagtttactgtggatgaaagaagcattctatggttaaatcaatttctgttggatttaaaacagagtcttaatcagttcatggctgtgtacaagttgaatgacaattcaaaatctgacgagcatgttgatgttcgagttgatggcttaatgctaaagtttgtcattccttctgaagtgaaatctgaatgtcatcaagatcagccacgtgcaatttctattcagagttctgaaatgattgccacaaatacaaggcactgtccaaactgtcgacattctgacctagaagctttgtttcaagactttaaagattgtgatttttttagtaaaacatataccagcttccccaaatcttgtgacaattttaatcttctacatccaattttccagagacatgctcatgaacaagataccaaaatgcatgaaatttataaaggaaatattactccccaattgaataaaaacactcttaaaacttctgctgccacggatgtttgggctgtgtacttttctcaattttggatagattatgaagggatgaaaagtggaaaaggacggccaataagttttgtagactcattccctctttccatttggatttgtcaaccaacaagatatgcagagtcacaaaaagagccgcagacttgtaatcaggtatctctaaatacatcacaaagtgaatctagtgatctggctggccgattgaagcggaagaagctcttgaaggagtattatagtacagagtctgagcctttgacaaatggtggtcagaagccttcttcatcagatacatttttcagattttccccttcctcgtcagaggcagatattcatctcctagttcatgttcataaacatgtcagtatgcagattaatcactaccagtatctgcttctacttttcctgcatgagtcacttatcctgctttcagagaacttaaggaaagatgtagaagctgtaactggcagtcctgctagtcagacatccatttgtattggaattttacttagaagtgcagaactggctcttttgctccatccagtggatcaagcaaatactcttaagtctcctgtttctgaaagtgtgagcccagtggtacctgattatttgcctacagaaaatggggattttttgtcttcaaaaagaaaacaaattagtagggatataaatagaattagaagtgtaactgttaatcatatgtcagacaacagatctatgagtgttgaccttagccatatccctttaaaggatcctttgctttttaaatcagctagtgatacaaatctgcaaaaaggcatttcttttatggactatttatcagataaacatttagggaaaataagtgaagatgaaagtagtggacttgtttacaaaagtggctcaggagaaattggatcagaaacaagtgacaaaaaggattcattttatacagattcaagtagtatcttaaactacagagaagattcgaatatactttcatttgatagtgatggtaatcaaaacatactttcaagtactttaactagtaaaggaaatgaaaccatagagtccatctttaaagctgaagatttgcttccagaagcagcttcactctctgaaaacctggatatcagtaaagaagagacccccccagttagaacacttaaatcacagtcatctttaagtggaaagcctaaggaacgttgcccacccaacctggctcctctctgtgtttcttataagaatatgaaaagaagctcttcacaaatgtcattggataccatttcacttgacagcatgatattggaagaacagttattagaaagtgatggaagtgatagccatatgtttttggaaaaaggaaataaaaagaactcaactacaaattacaggggcacagcagaaagtgtgaatgctggtgcaaacctacagaattatggtgaaacttctccagatgccatcagtacaaattcagagggtgctcaggaaaatcatgatgacctgatgtccgttgtggtatttaaaattactggtgttaatggggaaattgacatccgaggggaagatacagaaatctgtcttcaagtgaaccaggtgacaccagaccaattaggcaatatcagccttcggcattacctttgtaatcgtccagttggttccgatcagaaagctgtaattcattccaaatcctctcctgagatttctctgagatttgaaagtgggcctggtgctgtaatacactctttacttgcagaaaaaaatggatttctgcagtgccacatagaaaacttcagcactgagtttcttacatcttctcttatgaatattcaacattttttggaagatgaaactgttgcaacagtaatgccaatgaagatacaagtttctaacacgaaaataaatttaaaagatgatagtccccggagtagtacagtatcccttgaaccagctcctgtaactgtacatattgatcatcttgtggtagagagaagtgacgatggctcttttcatatcagagattctcacatgcttaacactggaaatgatttgaaagaaaatgtcaaaagcgattcagtgctgctgaccagtggaaagtatgatctgaagaaacaacgcagtgtcacgcaagccactcagacaagcccaggggttccttggccttctcagtcagctaactttcctgagttctcctttgacttcactagggaacagctcatggaagagaatgaatctcttaaacaggaactggctaaagctaaaatggctcttgcagaggctcacttggaaaaagatgctcttcttcatcatataaagaagatgacagttgaatagcaggagtggcagtcaaaactgaaattatagctctggagtaggaaggttatatttataatgtggatgttaccagttaggggaagacttttattttcatgaaaagacaataaaacaaaatggaatgtgatgaagtggtgactatttcaaagccagtttagaaagtattagtacgggcattacaatcttttggttgttttgtgttttggggcttaaccctcttttaagctgttgtgatctagggaagtcaacacatagtgtaaaataattacatgcctaatgaaaagaagatgtcatttcctaattttgatatctcattttcggcattttttaaaatgtaaaaggaaaacctcttgtgttcacacagattgctgaattgatttctccatatttgttaataatttactattatttacaaagattcaaatgcttttatgactaatgtaaaatgaaaagaggcttacattttaaatgttattaaaattatgtacttaaatctataattatttaattattgtaaaaagtccaagcagatcaataaactatataattaaaaaaaaaaaaaaaaaaaaaa

SEQ ID NO: 1489 - DNA, 2769 bp, Homo sapiens
actggccgcatagagacgcagcgcacgcgcagtcgcgtatccgtgtgatgggcgggctgttgacggcgctgcgatggctgcctgcgagggcaggagaagcggagctctcggttcctctcagtcggacttcctgacgccgccagtgggcggggccccttgggccgtcgccaccactgtagtcatgtacccaccgccgccgccgccgcctcatcgggacttcatctcggtgacgctgagctttggcgagagctatgacaacagcaagagttggcggcggcgctcgtgctggaggaaatggaagcaactgtcgagattgcagcggaatatgattctcttcctccttgcctttctgcttttctgtggactcctcttctacatcaacttggctgaccattggaaagctctggctttcaggctagaggaagagcagaagatgaggccagaaattgctgggttaaaaccagcaaatccacccgtcttaccagctcctcagaaggcggacaccgaccctgagaacttacctgagatttcgtcacagaagacacaaagacacatccagcggggaccacctcacctgcagattagacccccaagccaagacctgaaggatgggacccaggaggaggccacaaaaaggcaagaagcccctgtggatccccgcccggaaggagatccgcagaggacagtcatcagctggaggggagcggtgatcgagcctgagcagggcaccgagctcccttcaagaagagcagaagtgcccaccaagcctcccctgccaccggccaggacacagggcacaccagtgcatctgaactatcgccagaagggcgtgattgacgtcttcctgcatgcatggaaaggataccgcaagtttgcatggggccatgacgagctgaagcctgtgtccaggtccttcagtgagtggtttggcctcggtctcacactgatcgacgcgctggacaccatgtggatcttgggtctgaggaaagaatttgaggaagccaggaagtgggtgtcgaagaagttacactttgaaaaggacgtggacgtcaacctgtttgagagcacgatccgcatcctgggggggctcctgagtgcctaccacctgtctggggacagcctcttcctgaggaaagctgaggattttggaaatcggctaatgcctgccttcagaacaccatccaagattccttactcggatgtgaacatcggtactggagttgcccacccgccacggtggacctccgacagcactgtggccgaggtgaccagcattcagctggagttccgggagctctcccgtctcacaggggataagaagtttcaggaggcagtggagaaggtgacacagcacatccacggcctgtctgggaagaaggatgggctggtgcccatgttcatcaatacccacagtggcctcttcacccacctgggcgtattcacgctgggcgccagggccgacagctactatgagtacctgctgaagcagtggatccagggcgggaagcaggagacacagctgctggaagactacgtggaagccatcgagggtgtcagaacgcacctgctgcggcactccgagcccagtaagctcacctttgtgggggagcttgcccacggccgcttcagtgccaagatggaccacctggtgtgcttcctgccagggacgctggctctgggcgtctaccacggcctgcccgccagccacatggagctggcccaggagctcatggagacttgttaccagatgaaccggcagatggagacggggctgagtcccgagatcgtgcacttcaacctttacccccagccgggccgtcgggacgtggaggtcaagccagcagacaggcacaacctgctgcggccagagaccgtggagagcctgttctacctgtaccgcgtcacaggggaccgcaaataccaggactggggctgggagattctgcagagcttcagccgattcacacgggtcccctcgggtggctattcttccatcaacaatgtccaggatcctcagaagcccgagcctagggacaagatggagagcttcttcctgggggagacgctcaagtatctgttcttgctcttctccgatgacccaaacctgctcagcctggatgcctacgtgttcaacaccgaagcccaccctctgcctatctggacccctgcctagggtggatggctgctggtgtggggacttcgggtgggcagaggcaccttgctgggtctgtggcattttccaagggcccacgtagcaccggcaaccgccaagtggcccaggctctgaactggctctgggctcctcctcgtctctgctttaatcaggacaccgtgaggacaagtgaggccgtcagtcttggtgtgatgcggggtgggctgggccgctggagcctccgcctgcttcctccagaagacacgaatcatgactcacgattgctgaagcctgagcaggtctctgtgggccgaccagaggggggcttcgaggtggtccctggtactggggtgaccgagtggacagcccagggtgcagctctgcccgggctcgtgaagcctcagatgtccccaatccaagggtctggaggggctgccgtgactccagaggcctgaggctccagggctggctctggtgtttacaagctggactcagggatcctcctggccgccccgcagggggcttggagggctggacggcaagtccgtctagctcacgggcccctccagtggaatgggtcttttcggtggagataaaagttgatttgctctaaccgc

SEQ ID NO: 1490 - DNA, 1278 bp, Homo sapiens
gcttcgcggcggaggcccgggcaactcttttgaatggaatcgggctgattcatcgccggtttgcagacagagccgcgtcgggtgtgcgccgctgctgctgttgcctctgtcttcgcgtcaccacagaggcaagacaagggtccatatcgcggcatccggctcccgcccgtcttcaggagagaaagaaaaaataaaatatacttggggaagttgtacctgccagaattagcaagagctttctttaagaagacatttgtcaaactcaacaaattgaaggttaacaccttaagagttgtagttactgaccagaaatatggacagacttcttagacttggaggaggtatgcctggactgggccaggggccacctacagatgctcctgcagtggacacagcagaacaagtctatatctcttccctggcactgttaaaaatgttaaaacatggccgtgctggagttccaatggaagttatgggtttgatgcttggagaatttgttgatgattataccgtcagagtgattgatgtgtttgctatgccacagtcaggaacaggtgtcagtgtggaggcagttgatccagtgttccaagctaaaatgttggatatgttgaagcagacaggaaggccggagatggttgttggttggtatcacagtcaccctggctttggttgttggctttctggtgtggatatcaacactcagcagagctttgaagccttgtcggagagagctgtggcagtggttgtggatcccattcagagtgtaaaaggaaaggttgttattgatgccttcagattgatcaatgctaatatgatggtcttaggacatgaaccaagacaaacaacttcgaatctgggtcacttaaacaagccatctatccaggcattaattcatggactaaacagacattattactccattactattaactatcggaaaaatgaactggaacagaagatgttgctaaatttgcataagaagagttggatggaaggtttgacacttcaggactacagtgaacattgtaaacacaatgaatcagtggtaaaggagatgttggaattagccaagaattacaataaggctgtagaagaagaagataagatgacacctgaacagctggcaataaagaatgttggcaagcaggaccccaaacgtcatttggaggaacatgtggatgtacttatgacctcaaatattgtccagtgtttagcagctatgttggatactgtcgtatttaaataaagcaacgaaaaacgccaaaaaaaaaaaaaaaa

SEQ ID NO: 1491 - DNA, 3262 bp, Homo sapiens
agcggttccgggcggcagcacaaggcggtagccatggcggaggcggcggctgcagcgggtgggactggcttgggcgcgggcgcgagctacgggtctgcagcggaccgggaccgggacccggacccggaccgcgccgggcggaggctgcgggttctctctggccatctgctgggccggccccgggaggctctgagtaccaatgagtgcaaagcgcggagagccgcgtcggcggccacggcagcgcccacggccactcccgccgcgcaggagtcgggcaccatcccaaagaagcggcaagaagttatgaaatggaatggatggggatataatgattctaaattcatcttcaataagaagggccaaattgaattgactgggaaaaggtaccctcttagtggcatgggtttaccaacatttaaagaatggatccaaaatacccttggagtaaatgtggagcataaaactacctctaaagcatccttaaatcctagtgatacacctccttctgttgtaaatgaagattttcttcatgaccttaaagaaactaatatttcatattcacaagaggcagatgatcgagtatttagagctcatggtcattgtcttcatgagatatttttgctcagggaaggaatgtttgagcgaattcctgatatagttttatggccaacatgccatgatgatgtagttaagattgtgaatctagcttgcaaatataatctttgtatcataccaattggtggaggaacaagtgtttcatatggcctgatgtgtcctgcagatgagacaagaacaattatttctttggacacttcacaaatgaatcgaattctctgggttgatgagaacaatttgacagctcatgtagaggctggcataacaggacaagagttggaaagacagcttaaagaaagtggttattgtacaggtcatgaaccagattccctggagttcagtactgtaggaggatgggtatctactcgcgcatcaggcatgaagaagaatatctatggcaatatcgaggacctggtggttcatataaaaatggtaacacctagaggtataatagaaaaaagctgtcaaggacctcgtatgtcaacaggccctgatatccatcacttcatcatgggatctgaaggaactcttggtgtaataacagaagctacaataaaaatcagaccagtccctgaataccaaaagtatggctcagtagctttccctaattttgaacaaggagtagcctgtttaagagaaattgcaaaacagagatgtgctccggcatctattcgcctcatggacaacaagcagtttcagtttggtcatgctcttaaacctcaggtttcctctatttttacatcatttttggacggattaaaaaagttttatattacaaagtttaaaggatttgacccaaatcagctaagtgtagccacattactgtttgagggggatcgtgagaaggttcttcaacatgaaaaacaagtgtatgatattgctgcaaaatttggtgggttggcagctggagaagataatggacagagaggttatttgctgacctatgttattgcatacattcgagacttggctttggaatactatgtattaggagaatcttttgagacttctgctccttgggacagggtggtagatctctgtagaaatgtaaaagaaagaataacaagggaatgcaaagagaagggtgttcagtttgctcctttttctacatgcagggtgacgcagacttacgatgcaggtgcttgtatctacttctattttgcctttaactacaggggaattagtgacccactgaccgtatttgaacaaactgaggcagctgctagagaagaaatccttgctaatggagggagcctgtcacatcaccatggagtgggcaagttacggaagcaatggctaaaggaaagtatctctgatgtcggctttgggatgctgaagtctgtcaaggaatatgtggaccccaataacatctttggaaacagaaaccttttataaatccattagtaccattacaaaaaaatgtcaattttttttttaagttttcaactgtggttatactagtaatcaaatatatcatggactatattttggatacatttgtttctttggtttaaaataagtttgttttcattctgtagtttgttttgtttctacatctatggattgacagatagtattcctaaatctctctcattgtaggtacatcattttacattcagcggttgtcatttcaaattttagtcaggcagcacaaagctgtcaattattccagaggaagctgctgccagctgttttgtattgttgcttcctcttggggaacaaagacagatttggtatcattgattgctcagctagcctctttttaaaagaacgtttctgggaatcagatgtctagggaaggattccactgaggagtgatacacgtgtacattgtttaagagcatagtctagtgtgagtaggccattaaggggaaggatattcatgaaagaatttaggcaacctgttatttagaaagccttcacgtctgtaaggtgcttggcctacttttttttttaaattagtatacatgcataaaaccttgtatcatcaatatacaaattattctgttaggggacatgtttttgttctccatgtttctgtttctattgtggtatgagttgtatttgtatcactgagataacctattgttatattctaattcattgataatatgttttgtaagaaaagctgacatccttcattgcaagtgaagaacaggtttaccatgaaatgaatgcctttattcaacttagagtcctaatgtttctgatttcacattcttgttgctgaaatgcagaagaaacagctacagcaagagcagaaggaaaactcttagacttaatgtctccaattgcaagaattgtttcactaaagaaacagtcatcattcaactactgaatttgaaagcctcagcagtttcaatgacaaaaatcatttttgattttttaaaattaatcccaatggcatgataaattttcatataaaaagtaaagtttcaatttagtttttaataatggtttaatgccttttttgaataactggtttaacctaattttttttaaatgtaatgtattaatgcatataccataatcaaaagtttgaaatatcctgtttcttaaataatgagaacattaatcacatttagcaagcatttgtacattcaaacctggatattaaagtgaaatgattactttgaaaaaaaaaaaa

SEQ ID NO: 1492 - DNA, 9105 bp, Homo sapiens
ggagccgccgggaggtaggcgcgggacgggcggctgcggtggcggcgggtggaccgattgtcgctcggcggcgggagtcggtggagtctcgctctttcgcaaggctggagtgcaatggcatgatctcggctcactgcagcctccgcctcctgggttcaagtgattcttctgcctcagcctcccgagtagctgggactacagaaatgctggtaatttcagtcacttgctgatgacttctgatgtcccagcaaatgttggcattgttgactgctgagaagatacttctgaggacccacgtctaaggtggacttggttcgcactcttctggttagtccctgaacaggagtgatgcctccaggcaggtggcatgctgcctatccagctcaggcccagtcttcgagggagcgagggcggcttcagacagtaaagaaggaagaagaggatgaaagctatactccagtgcaggctgccaggccacagactctcaaccgccctggccaggagctgttccgccagctcttcagacagcttcgctaccatgagtcttcagggcccctagaaactctgagccggctccgggaactctgtcgctggtggctgaggcctgacgttctctccaaggcacagatcctagagctgctggtgctggaacagttcctgagcatcctgcctggggagctccgggtttgggtgcagcttcataaccctgagagtggcgaggaggctgtggccttgctggaggagctgcagagggaccttgatgggacatcctggagggacccgggccctgcccagagcccagatgtgcattggatgggtacaggagccctgcgatctgcacagatatggtcccttgcttcacctctcaggagcagctctgctctgggggaccacctggagcctccctatgaaatagaagcacgtgacttcctggctgggcaatccgatactcctgctgcccagatgcctgcccttttcccgagagaggggtgcccgggagaccaggtaacaccaaccaggtccctgacagcccagctccaggagaccatgactttcaaggatgtggaggtgaccttctcccaggacgagtgggggtggctggactctgctcagaggaacctgtacagggatgtgatgctggagaattataggaacatggcttccctggtgggaccattcaccaaacctgctctgatctcctggttggaagcaagggagccatggggcctgaacatgcaggcagctcagcctaaggggaatccagttgctgctcctacaggagatgacctccagagtaaaacaaacaaattcatcttaaatcaggaacctttggaagaagcagaaaccttagctgtgtcatcaggatgtcctgcgacaagtgtttctgagggaattgggctcagagaatcttttcaacagaagagcaggcagaaggatcaatgtgaaaatcccatacaagtaagagttaagaaagaagagaccaatttcagtcacaggacaggaaaagactctgaagtatcaggaagtaatagtcttgacttaaaacatgttacatatttgagagtttctggaagaaaggaatcccttaaacatggctgtggcaaacacttcagaatgagttcacaccactatgactacaagaaatatgggaaggggctcagacacatgattgggggcttcagcctacatcagagaattcatagtggactgaaagggaacaaaaaggacgtgtgtggaaaagacttcagccttagctctcatcaccaacgtgggcagagtcttcacacagtgggagtgtcatttaagtgcagtgactgtggaaggactttcagtcatagctcccatcttgcgtatcatcagagacttcacactcaagagaaagcatttaaatgtagggtgtgtgggaaagccttccggtggagttccaactgtgcgcggcatgagaaaattcacactggagtgaagccttataaatgcgatttatgtgagaaagctttccgacgcctgtcagcctaccgtctgcaccgagaaacccatgctaagaagaaatttcttgaattgaatcagtatagggcagctctcacctacagctcagggtttgatcatcatttgggagaccaaagtggggagaaactctttgactgcagccagtgcaggaaatccttccactgtaagtcatatgttcttgaacatcaaaggattcacacccaggagaagccctataaatgtaccaaatgtaggaaaacctttagatggagatcaaactttactcgtcatatgaggttgcatgaggaggaaaaattctacaaacaagatgaatgtcgtgaaggcttcaggcaatctcctgactgcagtcagccccagggtgctcccgctgtggagaaaacatttctgtgtcagcagtgtgggaaaacttttactagaaagaaaactctcgttgaccaccagagaattcacacaggtgagaaaccttaccagtgtagcgattgtgggaaggactttgcctataggtcagcctttattgttcataagaagaagcatgccatgaaaagaaaacctgagggcgggccatcttttagtcaggacacagtgttccaggttcctcagagcagtcactccaaagaggagccctacaaatgcagccagtgtggcaaggccttccgcaatcactcattcctcctcatccatcagagagttcacactggagagaagccatataagtgcagggagtgtgggaaagccttcagatggagttccaatctctaccgacatcagaggattcactctcttcaaaaacagtatgattgccatgaaagtgaaaagactccaaatgtggagccaaaaatcctcactggtgagaaacgtttttggtgtcaagaatgtgggaaaacctttacacgtaaaagaacccttttagatcataagggaatacacagtggagagaagcgctataaatgtaatctatgtgggaaatcttatgatagaaactatcgccttgttaaccatcagaggatccactctacagagagacctttcaaatgtcagtggtgtgggaaagagttcattgggagacataccctttccagtcaccagaggaaacacaccagagcagcacaggctgaacgtagcccgcctgcacggtcttcctctcaggacacaaagttgagattacagaagctaaaaccaagtgaagagatgcccctcgaagactgcaaagaagcttgcagccagagctccaggctcactggactccaggacataagcattgggaaaaagtgccacaaatgcagcatatgtgggaaaacttttaacaagagttcacaactcattagccacaagagatttcatactcgagagaggcccttcaaatgcagcaagtgtggaaagaccttcaggtggtcttcgaacctggctcggcatatgaaaaaccatattagagattagcctgggacctgacagtgacagtgggggtgggttctcagtcccctgctagagaacccttaattataggcattgtggagtaactttgataaagggcccagccctttctgttttggaagctagtgacagaatcccaaggatttgaaagctcggggagtccccagcctgcctgctaggatgtgacgctggggaagtgcagcaccatgtcctttggagcccttctggagactccggcccctaggagtggcctctgcaccatagcctgcggctcccctattcaggtctccttccacaactctgaagagagagaccactgccctttgtggttggacagaatatctgtggcatcatgggctatggctgctggaaaggggccagtgggatcctagatttgtcttcaagtttggcctgtggccatgcctattctgttgactttaaaagcagcagcatcaagaactcctagccttcccaaatgccccctggggagttctggctggggcttcagccttcctggctggcttttggatatctgctagggggttagagtggtctcagcggcaggtggaggagagcaggatgctgggctcaagcgcttggcgtgtggatctctaccagtaccctgttgccatccccatcccacaggcctgcataggcagcagcggtccatctgtttaacagaaatgtgctgagcactcccatacaccaggcgctggtgtgtttgccagagacccagcagggaccagaacagatgaaaatcctgccatcttggatctttacagatgacaaacaaatgggatacgcagtattctggatggtgatgtgtgtagtggacaaagtgaatcagagaagagcagagggagtgctggattgggagatcagtcgtgattttagatagtctggtcagggagggcctcaactgagaaggtgaaatgtgagcaaagacgtgaaggaagccagggaggtagcaggtagctctctagggagagttgcaggcagaggagattgggtcttgactggtgtcctcaggaaggaagcccctgggatggagtgcagggagccagctggaagggaaggagaggggccagggaggccacaggcccggccatatgagcatcatgggtcattacgggggcttgagctggctcagagggaggcagggagcttttggacaattttgagttgaggagtgatgtggtttgaatctgaattatattttataagggttaaccacagatccaaggactcagtaaaagggtgaaaggcttctcatgcagttagccttgctgccagttcccataaatcagactcctccccactccgtttctgaattttctataggatcctcggcctcagcagatataaacgcttaccattgttgtgttcatgtctctagcccctgcacactgcaggcccctctcagcttcacatacccctctccatgtatgagatctggtgctagcaatcagattcaacccgaaggaacaagtgcatgtgcctgctgctctcaggagaaaaggcagcctgttctgggaggagctccctcactggcccacccacttgtgttgaagcaaaaagcaagaatcaattacttaaaggcaaaggagtgatattgctaaagcatgtgagtaatcattgcttctgattattgaagaggtcagattatgaatgaaaggataaaatgttttaatagtagagcagtgtcctgactataggggcccgttcatggagctggtcatttcttgaaatgagaagaaaccaacctggaagatgtctttttcagtagagtatggaataatcttacctgctctggattgccatgagcaggtgaaaatgaaggctctgatattgtgtggtggtgtcacaggatggtgggggcggggcagaagtctcctgttggtgttctgatgcctgttcagctttgtcctcaggaaggtttggtcatcttggttctgccatcctcttgccttcctacggcagcagctgttcatggcactgaagatgtcccttcactgtcccaaaactggcactagaagtggctgggcaggggggccagagtcataggaagggtcttggagtcatcagatctgggttccaggcatggtgtgccttttcttggcaggattgatcttgagcaagtcaatgaacctctgcatcaatttccttatgtgtgaagttagagtgcttggctgtgctacctgattcctgagattggtgaaagagggcttggtttaccaaggctctccatcaggtggttgacctctaggaccagggccctctcagaggtgcagcttccatgtcagttggtgttgtaaccatggaaaagtccctttccaatcaaacttttagcacccctttccccccatctctgctccctttgccacaggataccttgtaaagttcctgccccagtatagggatatttttactgtcttttttattttttgagacagggttgcccagggtggagtgcagtggcaggatcacagcttactgcagccttgacctcccaggctcaggtcccatctgagcctcccgagtagctggggctacaggtgtgtgccaccctgccagctaattttttatatttttttgtagagacaaaacttttatttttttttcccatgttgctcatgctggtctcaaactcctgggctcaagcaatccacccacctctgcctcccaaagtgctgggattacaggcgtgagccactgtgcctgacctgtcatttttatagaatgaaatgtgcttatttctaaacattctaatcaaattttaaaatgtgcaaagaatgaagtgaaaaactgaatttttttttttttttgatacggagtctcactctgttacccaggctagagtgcagtggcgcgatctccgctcactgcaagctctgcctcctgggctcacaccattctcctgcctcagcctcctcagtagctgggactacaagtgcctgccaccacgcctgggttattttttatatttttagtagagacggggtttcactgtgttagccaggatggtctcgatctccaggatggtctcgatctccaggatggtctcgatctcctgacgtcgtgatccacccgcctcggcctcccaaaatgctgggattacaggtgtgagccactgtgcccggccaaaagaacagaaattattttatcctgaagtaagctgtttatatttgggattatactgaacctatttgtccaataacctgagttttcaaataattttagttctataagtactataattatataaatattaatgaattcagattagctgaaaggaaaaaaagtagaagcctgactacttggtgctaactactaaagattttggcagaatcaatgttggatttggctttcctgtcccttccccatgccagccccccagagtgttctgccttgtgctgcctcccttcacctggagtgccacacccctctctctgccagttcagctcttcattcttcaaggcctgaccttgtctgacccttgtgcctctaaacccgtggccccacctctcttggttcctatgtcaggtgatgtttgtgtttttggttatgcccatctccatagccagaccaagcactctggaagccagggttgggtgcttatttatctgtttgccatgcagaaaatatcttgcacaaaattacctctgttaaggaatctgaagctgaatttagtttggctgagtcagggttgggttttttttaaggggctgtggggtgaaatgttgactggaagccacccacaaacacacacctgctggttaggaacccggctgtgggtggttctgagctgtttggcttcagttgacagtttctgattgccctgagcaccaggtctcatcttgcatctcatcctggcctggagaacattcagtttccttccaacccttcccacctttcccccactcccttggaggaactgaagttggggttgaggagagccagatggctggagtgggtatttgaaggtctttctgtcacctgttcagtgtggtctgccccacccctgctgaccaagactgactgaaatgtaaaataatacagaccatctcacactcagaaagctggcacatttttgaaagcccaagtgtgggtaagtgcgtggaacaacgataattcacactgctttatgagtagaaattgtgagaaatattgtgccaggcaatttgcaaaatcttggaaggttgtgtgcacttaaccacccagcaactactcctggatgcatcctagagaagtgccatgtgaacagagaatgattttaagacttcactgaagtattgtttaggtagcaagattgggaaaagcctgcatttcatcagcagaagaatggataaataaatgggttgtttttggtccttggaaagtgaatatgaaagagttacgtctcaacacagatagatgaaaaattatgctgagaaagttggtgaagctacatacaaggtacccttagtgtaaagttaagcatactgtgtacctgtgggcacgttacttcaacttgtttttcactttttctgtaaaatgggatagtagtggcaatctcacagggtgattgtgggtgggggggtggtcaatgaagtaatgcatgtaaaatgcttagaatagtgtctagcatgtaagccttgtggacatatagaaagtgttattgttttgcacagtaatctattttctgtggattcaaataatatgaaatgagtataaaatcatgtattggaacgatgtgtgcaagtcaccattctgccttcctaaggcaggagacctgatggatttggggagggtacatggggccttcagttgtgttttctttgtttttttctaaaaattgatgcagaggcatcacaatgttaagatttttacagggtagtgtggtgggtactttttaactgtttgcttaaagtgtttcaaagtaaaaatatttcttaagcatagtctctgacatcttatgactttatagaaatccctgccaggtacatgatgttacttagagtgagccacctaatctttcaaggcttccatttcctcacctgcaaaaattgggagtgtcagaggcgtttgaaccagagtgactccatcttgaatagggaactgggtaaaataaggctgagacctactgggctgcattcccaggaggttaggcattccaagtcatgggatgagataggaggtcagcacaagatacagtcataaagaccttgccaataaaacagcatgtggtaaagaagccggtcaaaaccaagatggcaatgaaagtgacctctggttgtcctcactgctgtaattatactgtaattataatgcattagcatgctaacagacactcccaccagtgccatgacagtttacaaacgccatggcaggcctggcacgatggctcatgcctgtaatcccagcactttgggaggccaaggcgggcggattatgaggtcaggagattgagaccagcctggccaacatggtgaaaccctgtctctactaaaaaatacaaaaattagctgggcatggtggcacgtgcctgtaatcccagctacttgagaggctgaggcaggagaatctctagatcccgggagttggaggttgcagtgagccaagatggtgccactgcactccagcctgggtgacagagcaagactctgtctcaaaaaaaaaaaaaaaaaa

SEQ ID NO: 1493 - DNA, 2346 bp, Homo sapiens
ccttcgcgccctgggccatctccctcccacctccctccgcggagcagccagacagcgagggccccggccgggggcaggggggacgccccgtccggggcacccccccggctctgagccgcccgcggggccggcctcggcccggagcggaggaaggagtcgccgaggagcagcctgaggccccagagtctgagacgagccgccgccgcccccgccactgcggggaggagggggaggaggagcgggaggagggacgagctggtcgggagaagaggaaaaaaacttttgagacttttccgttgccgctgggagccggaggcgcggggacctcttggcgcgacgctgccccgcgaggaggcaggacttggggaccccagaccgcctccctttgccgccggggacgcttgctccctccctgccccctacacggcgtccctcaggcgcccccattccggaccagccctcgggagtcgccgacccggcctcccgcaaagacttttccccagacctcgggcgcaccccctgcacgccgccttcatccccggcctgtctcctgagcccccgcgcatcctagaccctttctcctccaggagacggatctctctccgacctgccacagatcccctattcaagaccacccaccttctggtaccagatcgcgcccatctaggttatttccgtgggatactgagacacccccggtccaagcctcccctccaccactgcgcccttctccctgaggacctcagctttccctcgaggccctcctaccttttgccgggagacccccagcccctgcaggggcggggcctccccaccacaccagccctgttcgcgctctcggcagtgccggggggcgccgcctcccccatgccgccctccgggctgcggctgctgccgctgctgctaccgctgctgtggctactggtgctgacgcctggccggccggccgcgggactatccacctgcaagactatcgacatggagctggtgaagcggaagcgcatcgaggccatccgcggccagatcctgtccaagctgcggctcgccagccccccgagccagggggaggtgccgcccggcccgctgcccgaggccgtgctcgccctgtacaacagcacccgcgaccgggtggccggggagagtgcagaaccggagcccgagcctgaggccgactactacgccaaggaggtcacccgcgtgctaatggtggaaacccacaacgaaatctatgacaagttcaagcagagtacacacagcatatatatgttcttcaacacatcagagctccgagaagcggtacctgaacccgtgttgctctcccgggcagagctgcgtctgctgaggctcaagttaaaagtggagcagcacgtggagctgtaccagaaatacagcaacaattcctggcgatacctcagcaaccggctgctggcacccagcgactcgccagagtggttatcttttgatgtcaccggagttgtgcggcagtggttgagccgtggaggggaaattgagggctttcgccttagcgcccactgctcctgtgacagcagggataacacactgcaagtggacatcaacgggttcactaccggccgccgaggtgacctggccaccattcatggcatgaaccggcctttcctgcttctcatggccaccccgctggagagggcccagcatctgcaaagctcccggcaccgccgagccctggacaccaactattgcttcagctccacggagaagaactgctgcgtgcggcagctgtacattgacttccgcaaggacctcggctggaagtggatccacgagcccaagggctaccatgccaacttctgcctcgggccctgcccctacatttggagcctggacacgcagtacagcaaggtcctggccctgtacaaccagcataacccgggcgcctcggcggcgccgtgctgcgtgccgcaggcgctggagccgctgcccatcgtgtactacgtgggccgcaagcccaaggtggagcagctgtccaacatgatcgtgcgctcctgcaagtgcagctgaggtcccgccccgccccgccccgccccggcaggcccggccccaccccgccccgcccccgctgccttgcccatgggggctgtatttaaggacacccgtgccccaagcccacctggggccccattaaagatggagagaggactgcggatctctgtgtcattgggcgcctgcctggggtctccatccctgacgttcccccactcccactccctctctctccctctctgcctcctcctgcctgtctgcactattcctttgcccggcatcaaggcacaggggaccagtggggaacactactgtagttagatc

SEQ ID NO: 1494 - DNA, 2240 bp, Homo sapiens
gcgcggtggccccgcctccccgccgcccggaaagcgggctgcggccccctcccaaaacccggggaagtggattctacgctccgctccgctccgcaccaccaaccccgggccgcagtcctgacgagcgggtcagggcttgtcgggcggaagcctggcctggagcctggaagggggagacggcccgagcgggagcgggagcggacgcggcctcagtcctgcgcggaatattgaaggatgtttgttccaagatctctaaaaatcaagaggaatgctaatgatgatggcaaaagttgtgtggctaagataattaaaccagacccagaagaccttcagttggacaaaagcagagatgttcccgttgatgctgtagctacagaagcagccacaatagacaggcacatcagcgaatcatgccctttccccagcccaggtggccagttggcagaggttcattcagtaagtcccgagcagggtgcgaaggacagccatccttctgaagagcccgttaagtcattttccaaaacacagcgctgggcagaaccaggggaacccatctgtgttgtctgtggtcgttatggagagtatatctgtgataagacagatgaagatgtgtgtagtttggagtgtaaagcgaaacatcttctacaagttaaggaaaaggaagagaaatcaaaactcagcaatccacagaaggctgattctgagccagagtctccactgaatgcttcctatgtctacaaagagcacccctttattttgaaccttcaggaagaccagattgaaaatcttaaacagcagctgggaattttagttcaagggcaagaagtcaccaggcccattattgactttgaacattgtagtctccctgaggtcttaaatcacaacttgaagaaatcaggctatgaggtgccaactcccattcaaatgcagatgattcctgtgggacttctgggaagagacattctggccagtgcagatactggctcaggaaaaacagctgcttttcttcttcctgttatcatgcgagctttattcgagagcaaaactccatctgcgctcattcttacaccaaccagagagttagccattcagatagagagacaagctaaagaattgatgagtggcctgccacgcatgaaaactgtgcttcttgtagggggcttacccttacccccacagctttatcgtctgcaacaacatgttaaggttatcatagcaacccctgggcgacttctggatataataaagcagagctctgtagaactctgtggtgtaaagattgtggtagtagatgaagctgataccatgttaaagatgggttttcaacaacaagtgcttgacattttggaaaacattcctaatgattgtcagaccattttggtttcagccacaattccaactagcatagaacagctagcaagccagcttctgcataatcctgtgagaattatcactggagaaaagaacctaccttgtgccaatgtacgtcagattattttgtgggtagaagacccagccaaaaagaaaaaattatttgaaattttaaatgataagaaactctttaagcctccagtgttagtatttgtggactgcaaactaggagcagatcttttgagtgaagccgttcagaaaatcacagggctgaaaagaatatctatacattcggagaagtcgcaaatagaaaggaaaaacatattgaagggattacttgaaggagactatgaagttgtagtgagcacaggagtcttgggacgaggcctagacttgatcagtgtcaggctggttgtcaattttgatatgccttcaagtatggatgagtatgtccatcagattggaagagtaggaagattaggtcaaaatggaacagcgattactttcatcaataataattcaaaaagactcttctgggatattgcaaaacgagtaaagcccacaggatccattcttccccctcagttattaaattccccataccttcatgaccagaagagaaaggaacaacagaaagataaacagacacagaatgatctggttacaggagctaatcttatggatattatcagaaaacatgataaaagtaattctcagaaatgattttctctgccacttgaatatttttttttattgtatatagtcagcaaaaaattatggtttgcataaatggaaatgtacatgaattttaaaaattttaagatatttttaatttaataaaatttatataaccaaaaaaaaaaaaaaaa

SEQ ID NO: 1495 - DNA, 2905 bp, Homo sapiens
gggggctccgctccgcaccaccaaccccgggccgcagtcctgacgagcgggtcagggcttgtcgggcggaagcctggcctggagcctggaagggggagacggcccgagcgggagcgggagcggacgcggcctcagtcctgcgcggaatattgaaggatgtttgttccaagatctctaaaaatcaagaggaatgctaatgatgatggcaaaagttgtgtggctaagataattaaaccagacccagaagaccttcagttggacaaaagcagagatgttcccgttgatgctgtagctacagaagcagccacaatagacaggcacatcagcgaatcatgccctttccccagcccaggtggccagttggcagaggttcattcagtaagtcccgagcagggtgcgaaggacagccatccttctgaagagcccgttaagtcattttccaaaacacagcgctgggcagaaccaggggaacccatctgtgttgtctgtggtcgttatggagagtatatctgtgataagacagatgaagatgtgtgtagtttggagtgtaaagcgaaacatcttctacaagttaaggaaaaggaagagaaatcaaaactcagcaatccacagaaggctgattctgagccagagtctccactgaatgcttcctatgtctacaaagagcacccctttattttgaaccttcaggaagaccagattgaaaatcttaaacagcagctgggaattttagttcaagggcaagaagtcaccaggcccattattgactttgaacattgtagtctccctgaggtcttaaatcacaacttgaagaaatcaggctatgaggtgccaactcccattcaaatgcagatgattcctgtgggacttctgggaagagacattctggccagtgcagatactggctcaggaaaaacagctgcttttcttcttcctgttatcatgcgagctttattcgagagcaaaactccatctgcgctcattcttacaccaaccagagagttagccattcagatagagagacaagctaaagaattgatgagtggcctgccacgcatgaaaactgtgcttcttgtagggggcttacccttacccccacagctttatcgtctgcaacaacatgttaaggttatcatagcaacccctgggcgacttctggatataataaagcagagctctgtagaactctgtggtgtaaagattgtggtagtagatgaagctgataccatgttaaagatgggttttcaacaacaagtgcttgacattttggaaaacattcctaatgattgtcagaccattttggtttcagccacaattccaactagcatagaacagctagcaagccagcttctgcataatcctgtgagaattatcactggagaaaagaacctaccttgtgccaatgtacgtcagattattttgtgggtagaagacccagccaaaaagaaaaaattatttgaaattttaaatgataagaaactctttaagcctccagtgttagtatttgtggactgcaaactaggagcagatcttttgagtgaagccgttcagaaaatcacagggctgaaaagcatatctatacattcggagaagtcgcaaatagaaaggaaaaacatattgaagggattacttgaaggagactatgaagttgtagtgagcacaggagtcttgggacgaggcctagacttgatcagtgtcaggctggttgtcaattttgatatgccttcaagtatggatgagtatgtccatcaggaaaatacctacaagtctacttggaggaatccccagcattttcaacaggatgtcagaatgaccttgggctatgttggcaaagcacaatgggaagaagacaaccaattgaaggtcaaactaggccttaaaaaaaattgttcttcctaaatgaaactttatgtaagacccaagcttcctttatgtaaaaataggatactcactaggctttggggctgacaatggtttttaaatcttgctaatcttccctggaatgaaaccagcatgactcaaagagaaaaagagagtctataatattttctaatccctgagttcttttctttatatattaaaaaggattattaggctgggtgtggtggctcacgcctgtaatcccagcactttgggaggccgaggggagtggatcacctgagttcgagaccagcctaaccaacatggagaaaccctgtctctactaaaaatacaaaattagccaggcgtggtggcgcatgcctgtaatcccagctactcaggaggctacagcaggagaattgcttgaactcgggaggcagagccaagatcgcaccactgcactccagcctgggcaacaagagtgaaactctgtctcaaaataatattaatgataataataataataataatagggattacttgcataattgttcttttaaaattattggcagtattgctgaatgtatttagattttttcaccaagtgacaacaactgaattcataaagattcatcaacaagacctgataaaaaaaaatgtaagcatattatagtggatacttccaagactcttggtctaacatgtattagaaagcagaaggagcccaggcacaggggctcccgccggtaatcccaaagctttgggaagccaaggcaggtggatcgcttgagctcaggagttagagaccagcctgggcaacatggtgaaatcccgtcaccacaaaaaaatgcaaaaattaactgggcgtggtggcatgcacctgtagtcccagctactctggaggctgaggtgaggggaatcacctgagccgggggaatcacctgagcccagggaagttgaggctgctgtgagccatggtcatgacactgccctccagcctggacaacagattgagaccctgtctcaaaaaaaaaaaaaaaaaaaa

SEQ ID NO: 1496 - DNA, 1127 bp, Homo sapiens
ttaaagagggctgctcaactgcaaggacgctgtaagcaggaagagaagccacagcgcttcagaaaagagtgggacagggacaagcatatctaagaggctgaacatgaatccacagatcagaaacccgatgaaggcaatgtatccaggcacattctacttccaatttaaaaacctatgggaagccaacgatcggaacgaaacttggctgtgcttcaccgtggaaggtataaagcgccgctcagttgtctcctggaagacgggcgtcttccgaaaccaggtggattctgagacccattgtcatgcagaaaggtgcttcctctcttggttctgcgacgacatactgtctcctaacacaaagtaccaggtcacctggtacacatcttggagcccttgcccagactgtgcaggggaggtggccgagttcctggccaggcacagcaacgtgaatctcaccatcttcaccgcccgcctctactacttccagtatccatgttaccaggaggggctccgcagcctgagtcaggaaggggtcgctgtggagatcatggactatgaagattttaaatattgttgggaaaactttgtgtacaatgataatgagccattcaagccttggaagggattaaaaaccaactttcgacttctgaaaagaaggctacgggagagtctccagtgaggggtctccctgggcctcatggtctgtctcctctagcctcctgctcatgctgcacgggcctcccctccaccctggacccgctctgtttctgcctggtcatcctgagcccctcctggcctcagggccattccacagtgctcccctgcctcaccgcttcctcctcgctcttccagactcttcctgcagaggctcctttctgcctccatggctatccatccacccccacagaccccgttcctccagcctgcgtgcccctaacctggcttttcccatctccccagcataaccaaatcttactaaactcatcctaggctgggcatggtgactcacgcctgtaatcccccagcaatttgggaggcaaaggtgggagaatcgcgtgagcccaggagttccagaccaggctgggtcacatgacaaagccccatctctacaaaaaaaaaaaaaaaaaaaa

SEQ ID NO: 1497 - DNA, 710 bp, Homo sapiens
ggtactcgtcttggtgagagcgtgagctgctgagatttgggagtctgcgctaggcccgcttggagttctgagccgatggaagagttcactcatgtttgcacccgcggtgatgcgtgcttttcgcaagaacaagactctcggctatggagtccccatgttgttgctgattgttggaggttcttttggtcttcgtgagttttctcaaatccgatatgatgctgtgaagagtaaaatggatcctgagcttgaaaaaaaactgaaagagaataaaatatctttagagtcggaatatgagaaaatcaaagactccaagtttgatgactggaagaatattcgaggacccaggccttgggaagatcctgacctcctccaaggaagaaatccagaaagccttaagactaagacaacttgactctgctgattcttttttcctttttttttttttaaataaaaatactattaactgggacttcctaatatatacttctatcaagtggaaaggaaattccaggcccatggaaacttggatatgggtaatttgatgacaaataatcttcactaaaggtcatgtacaggtttttatacttcccagctattccatctgtggatgaaagtaaacaatgttggccacgtatattttacacctcgaaataaaaaatgtgaatactgctccaaaaaaaaaaaaagtggcgagctttccctaggggggt

SEQ ID NO: 1498 - DNA, 1013 bp, Homo sapiens
gacaggcatcccccaggtgggaggaggggctgtcctggctctgacctggatatcagatccagagctgagggggaggtgcagggtcaggaggggaggggttctgttctgagtttcccctggccaaggctgcagacaagggacgcagacaatcggcacattgtgagcaggggctgcaggatggaaccagcaagctgctgtgctgagcgccccaaacctgggcctacaggggtgaagaccaagccctcctgcgggggctggagagccgtgggcctgctcctgctgctgctgctgctggtgctggccgctgtggggattgtggctggagggcttcttggctctgctcagggccctcccaagccaaggctgcagacgctgcgaatgaccctcccgagcccccacatgccccggcccaaccaaaccatcctggtggacgtggcccggaacgcggcgaccatcacagtgaccccacctcagagcaaccacagctgggcggtgctgttcgacgggcagagcggctgcatctgttaccgccctgaggagcaccaggtctgcttcctccgcctgatggaggacagtgatcgggagaccctgcggctgctggtggatacctccaaggtccaagaggcttgggtccccagccaggacacccaccacacccaggagctgctggcagtgcaggggagcctcgaagtggaccccgcccaggcgggggctttggtgcagcgcctgtgcatgaggacccccatctactgggcccggcgagcagaggggccccggagacagcggctgatttatctctgcatcgacatctgcttcccgagcaacatctgcgtgtcggtctgcttttattacctcccagactgagcccccgacctggcccagcctggcccgtccccaatccagtgggctggccaggccacctgcaccagggaggacagctgctggcagggactaataaacccttccacctggcaaaaaaaaaaaaaaaaaaaaaaaaaaaaaaaaaaaaaaaa

SEQ ID NO: 1499 - DNA, 1678 bp, Homo sapiens
ggaagtgctttctttgcccgccgttcgccaaacgaagtcgtggaggtggcgaaacgaggaggagataacgcggccttgggctctggtgtctcccagtctgctaaagccctaaggccatcaccatggacttccagcatcgccccgggggcaagaccgggagcgggggcgtggcctcctcctccgagagcaaccgtgaccgcagggagcgcctccggcagctggccctggagaccatcgacatcaacaaggacccgtacttcatgaagaaccacctgggctcctatgaatgcaaactctgcctgacacttcacaacaatgaggggagctacctggcacatacgcaggggaagaagcaccagaccaacctggcccggcgagcagccaaggaggccaaggaggcccctgcccagcccgcgcctgagaaggtcaaggtggaggtgaagaagtttgtgaagatcggccgcccgggctacaaagtgaccaagcagagagactcggagatgggccagcagagcctcctcttccagattgactaccctgagatcgccgagggcatcatgccacgtcaccgcttcatgtctgcgtacgagcagaggatcgagcctccggaccggcgctggcagtacctgctcatggccgccgagccctacgagaccattgccttcaaggtgccgagcagagagatcgacaaggcggagggcaagttctggacacactggaaccgggagaccaagcagttcttcctccagttccactttaagatggagaagcccccggctccacccagcctccctgctggcccccctggggtgaagcggcctccacccccgctgatgaacggtctgccccctcggccaccgctgcctgagtctttgccaccgcccccgccaggaggcctgcctctgccacccatgccccccacagggcctgcgccctcagggcccccgggaccaccccagctacccccgccagctccaggggtccaccccccggccccagtggtgcatccccctgcatctggggtccatcccccagctcctggcgtccaccccccagctcctggcgtccatcccccagcccctggggtccacccaccaacctctggggtccaccccccagctcctggagtccaccctccagcccccggggttcacccaccagcccccggagtccacccaccagcccctggggttcacccaccagccccaggggtccatcctcccccatcagcgggggttcacccccaggccccgggggtgcacccagcagcccccgccgttcaccctcaggccccaggggtgcacccaccagccccagggatgcaccctcaggccccgggggtccacccccaacctcccggggtccatccgtcggctcctggggtccaccctcagcctccgggagttcacccctcaaatcctggggtgcaccccccaactcccatgcccccaatgctgaggcccccacttccctccgaaggcccagggaacatacctccccctcccccaaccaactgagaagctgctccctcccccagcaagcccagcgccaggtgctcttgccttttcccactgagagaaggctgctcttttgtactgccccccgctcattaaacagcctcccccagccctgagtgcactgatgtccgcaaaaaaaaaaaaaaaaaaaaaaaaaaaaa

SEQ ID NO: 1500 - DNA, 1334 bp, Homo sapiens
gtgggaaaagatggcggctgccgcacaatcccgggttgtccgggtcctgtcaatgtcacgttctgccattactgcaatagccacatctgtgtgtcacggcccaccctgtcgccagcttcatcatgccctcatgcctcatgggaaaggtggacgttcctcagtcagtgggattgtggccactgtgtttggagcaacaggattcctggggcgatatgttgtcaaccaccttggacgcatggggtcacaggtaatcataccctatcggtgtgataaatatgacatcatgcaccttcgtcccatgggtgacctgggccagcttctgtttctggaatgggacgcgagagataaagattctatccgacgagtagtacaacacagcaatgtggtcatcaatcttattggacgagactgggaaaccaaaaactttgattttgaggatgtttttgtgaagattccccaagcaattgctcaactgtccaaggaagctggagttgaaaaattcattcatgtttcacatctgaatgcgaatattaaaagctcttctagatatttgagaaataaggctgttggagagaaagtagtgagagatgcatttccggaagccattatcgtaaagccgtcggacatctttggaagagaggatagattccttaattcttttgcaagtatgcatcggtttggtcctataccccttggttccttgggctggaagacagttaaacaaccagtatatgtcgtagatgtatccaaaggaattgttaatgcagttaaggatcctgatgccaatgggaaatcctttgctttcgttggtcccagtcggtacctccttttccacctggtgaagtacatctttgctgtggctcacagattgttcctcccattccccttgccgctttttgcctatcgatgggtagcaagagtctttgaaataagcccatttgagccctggataacaagggataaagtggagcggatgcacatcacagacatgaaattgcctcacctgcctggcttagaagaccttggtattcaggcaacaccactggaactcaaggccattgaggtgctgcggcgtcatcgcacttaccgctggctgtctgctgaaattgaggatgtgaagccggccaagaccgtcaacatttagtgcctcctgagcagctcttggttttggcgtcttttgggtcggcccatgtggtttgagcacccagccaggcggtctctttagaggatcctgtacacagttccactattaaaacatttcaggttgaaaaaaaaaaaaaaaaaaaaaaaaaaaaaaaaaaaaaaaaaaaaaaaaaaaaaaaaaaaaaaaaaaa

SEQ ID NO: 1501 - DNA, 3840 bp, Homo sapiens
gcgccggggccggcgatgagcgcgaggagccggcatgagcgcagacagcagccctctcgtgggcagcacgcccaccggttatgggaccctgacgatagggacatcaatagatcccctcagctcctcagtttcatccgtgaggctcagcggctactgtggcagtccatggagggtcatcggctatcacgtcgtggtctggatgatggctgggatccctttgctgctcttccgttggaagcccctgtggggggtgcggctgcggctccggccctgcaacctggcccacgccgaaacactcgttatcgaaataagagacaaagaggatagttcctggcagctcttcactgtccaggtgcagactgaggccatcggcgagggcagcctggagccgtccccacagtcccaggcagaggatggccggagccaggcggcagttggggcggtaccagagggtgcctggaaggatacggcccagctccacaagagcgaggaggcggtgagtgtcggacagaagcgggtgctgcggtattacctcttccagggccagcgctatatctggatcgagacccagcaagccttctaccaggtcagcctcctggaccatggccgctcttgtgacgacgtccaccgctcccgccatggcctcagcctccaggaccaaatggtgaggaaggccatttacggccccaacgtgatcagcataccggtcaagtcctacccccagctgctggtggacgaggcactgaacccctactatgggttccaggccttcagcatcgcgctgtggctggctgaccactactactggtacgccctgtgcatcttcctcatttcctccatctccatctgcctgtcgctgtacaagaccagaaagcaaagccagactctaagggacatggtcaagttgtccatgcgggtgtgcgtgtgccggccagggggagaggaagagtgggtggactccagtgagctagtgcccggagactgcctggtgctgccccaggagggtgggctgatgccctgtgatgccgccctggtggccggcgagtgcatggtgaatgagagctctctgacaggagagagcattccagtgctgaagacggcactgccggaggggctggggccctactgtgcagagacacaccggcggcacacactcttctgcgggaccctcatcttgcaggcccgggcctatgtgggaccgcacgtcctggcagtggtgacccgcacagggttctgcacggcaaaagggggcctggtgagctccatcttgcacccccggcccatcaacttcaagttctataaacacagcatgaagtttgtggctgccctctctgtcctggctctcctcggcaccatctacagcatcttcatcctctaccgaaaccgggtgcctctgaatgagattgtaatccgggctctcgacctggtgaccgtggtggtgccacctgccctgcctgctgccatgactgtgtgcacgctctacgcccagagccgactgcggagacagggcattttctgcatccacccactgcgcatcaacctggggggcaagctgcagctggtgtgtttcgacaagacgggcaccctcactgaggacggcttagacgtgatgggggtggtgcccctgaaggggcaggcattcctgcccctggtcccagagcctcgccgcctgcctgtggggcccctgctccgagcactggccacctgccatgccctcagccggctccaggacacccccgtgggcgaccccatggacttgaagatggtggagtctactggctgggtcctggaggaagagccggctgcagactcagcatttgggacccaggtcttggcagtgatgagacccccactttgggagccccagctgcaggcaatggaggagcccccggtgccagtcagcgtcctccaccgcttccccttctcttcggctctgcagcgcatgagtgtggtggtggcgtggccaggggccactcagcccgaggcctacgtcaaaggctccccggagctggtggcagggctctgcaaccccgagacagtgcccaccgacttcgcccagatgctgcagagctatacagctgctggctaccgtgtcgtggccctggccagcaagccactgcccactgtgcccagcctggaggcagcccagcaactgacgagggacactgtggaaggagacctgagcctcctggggctgctggtcatgaggaacctactgaagccgcagacaacgccagttatccaggctctgcgaaggacccgcatccgcgccgtcatggtgacaggggacaacctgcagacagcggtgactgtggcccggggctgtggcatggtggccccccaggagcatctgatcatcgtccacgccacccaccctgagcggggtcagcctgcctctctcgagttcctgccgatggagtcccccacagccgtgaatggcgttaaggatcctgaccaggctgcaagctacaccgtggagccagacccccgatccaggcacctggccctcagcgggcccacctttggtatcattgtgaagcacttccccaagctgctgcccaaggtcctggtccagggcactgtctttgcccgcatggcccctgagcagaagacagagctggtgtgcgagctacagaagcttcagtactgcgtgggcatgtgcggagacggcgccaatgactgtggggccctgaaggcggctgatgtcggcatctcgctgtcccaggcagaagcctcagtggtctcacccttcacctcgagcatggccagtattgagtgcgtgcccatggtcatcagggaggggcgctgttcccttgacacttcgttcagcgtcttcaagtacatggctctgtacagcctgacccagttcatctccgtcctgatcctctacacgatcaacaccaacctgggtgacctgcagttcctggccatcgacctggtcatcaccaccacagtggcagtgctcatgagccgcacggggccagcgctggtcctgggacgggtgcggccaccgggggcgctgctcagcgtgcccgtgctcagcagcctgctgctgcagatggtcctggtgaccggcgtgcagctagggggctacttcctgaccctggcccagccatggttcgtgcctctgaacaggacagtggccgcaccagacaacctgcccaactacgagaacaccgtggtcttctctctgtccagcttccagtacctcatcctggctgcagccgtgtccaagggggcgcccttccgccggccgctctacaccaatgtgcccttcctggtggccctggcgctcctgagctccgtcctggtgggccttgtcctggtccccggcctcctgcaggggccgctggcgctgaggaacatcactgacaccggcttcaagctgctgctgctgggtctggtcaccctcaacttcgtgggggccttcatgctggagagcgtgctagaccagtgcctccccgcctgcctgcgccgcctccggcccaagcgggcctccaagaagcgcttcaagcagctggaacgagagctggccgagcagccctggccgccgctgcccgccggccccctgaggtagtgcaggcccacgggcaccccagacactggaactccctgcctctgagccaccaactggacccctctccagcaacaccaccgccaccacctcccacatccctgaggttggcgactgtctacactcctcccccgagaccacccccaccctggggaagcgttgactactgtcccctaccttggaccatcccgcgtaggggtggcagcccccagctcccctcagtgctgctgtcagtgtagcaaataaagtcatgatattttcctggc

SEQ ID NO: 1502 - DNA, 2765 bp, Homo sapiens
ctgggtttcccgggagatcccaggcggtgacagagtggagccatggctagaggcaggaagatgtccaagccccgcgcggtggaggcggcggcggcggcggcggcggtggcagcgacggccccgggcccggagatggtggagcggaggggcccggggaggccccgcaccgacggggagaacgtatttaccgggcagtcaaagatctattcctacatgagcccgaacaaatgctctggaatgcgtttcccccttcaggaagagaactcagttacacatcacgaagtcaaatgccaggggaaaccattagccggaatctacaggaaacgagaagagaaaagaaatgctgggaacgcagtacggagcgccatgaagtccgaggaacagaagatcaaagacgccaggaaaggtcccctggtaccttttccaaaccaaaaatctgaagcagcagaacctccaaaaactccaccctcatcttgtgattccaccaatgcagccatcgccaagcaagccctgaaaaagcccatcaagggcaaacaggccccccgaaaaaaagctcaaggaaaaacgcaacagaatcgcaaacttacggatttctaccctgtccgaaggagctccaggaagagcaaagccgagctgcagtctgaagaaaggaaaagaatagatgaattgattgaaagtgggaaggaagaaggaatgaagattgacctcatcgatggcaaaggcaggggtgtgattgccaccaagcagttctcccggggtgactttgtggtggaataccacggggacctcatcgagatcaccgacgccaagaaacgggaggctctgtacgcacaggacccttccacgggctgctacatgtactattttcagtatctgagcaaaacctactgcgtggatgcaactagagagacaaatcgcctaggaagactgatcaatcacagcaaatgtgggaactgccaaaccaaactgcacgacatcgacggcgtacctcacctcatcctcatcgcctcccgagacatcgcggctggggaggagctcctgtatgactatggggaccgcagcaaggcttccattgaagcccacccgtggctgaagcattaaccggtgggccccgtgccctccccgccccactttcccttcttcaaaggacaaagtgccctcaaagggaattgaattttttttttacacacttaatcttagcggattacttcagatgtttttaaaaagtatattaagatgccttttcactgtagtatttaaatatctgttacaggtttccaaggtggacttgaacagatggccttatattaccaaaacttttatattctagttgtttttgtactttttttgcatacaagccgaacgtttgtgcttcccgtgcatgcagtcaaagactcagcacaggttttagaggaaatagtcaaacatgaactaggaagccaggtgagtctcctttctccagtggaagagccgggaccttccccctgcacccccgacatccagggacggggtgtgaggaagacgctgcctcccaatggcctggacgggatgtttccaagctcttgttcccctaacgtctcaacaggcgctcactgaagtgtatgaatattttttaaaaaggtttttgcagtaagctagtcttcccctctgctttctcgaaagcttactgagccctgggccccaagcacgggccgggcatagatttcctcttccacaagctgccgcttttctgggcaccttgaagcatcagggcgtgaaatcaaactagatgtgggcagggagagggttgcttacctgccctgctggggcagggtttcctgaaactgggttaattctttatagaaatgtgaacactgaatttattttaaaaaataataataaaaatttaaaaaaattaaaaataaaaaaaaccacagaaaacaactttacatgtatataggtcttgaagtgagtgaagtggctgcttttttttttttttttttttgcttttttttgctttttgtagaagagattgagaatggtactctaatcaaaaataaagttttgtagtgggaccagaaattacttacctgacatccacccccattccccctcatcctgctggggttgaaagttccagacctgctgtcgaggccttgtgtttgtcagacacccagtgtcctcctgcaaggacgcaactgtgagctgaggtgtgagcctaggagcccaggacccctgaccccggccgctgctgccagcctcagaaaggcacccaggtgtgcaggggagcacacagggcccggcagcccccaggaatcaaggatagggctaaggttttcaccttaactgtgaaggcaggaggaataggtgactgcttcctcccgcccttcacagaactgattctcacacactgtcccttcagtccagggggccggggctcaggagccatgacctggtgtctcctgcccaccctggtcccaggtaaatgtgaatggagacaggtatgagaggctgtcctcgtctttgattcccccccaaccccacctcgggcctcacgacggtgctacctaagaaagtcttccctcccaccccccgctagcctggtcagtggtcagcaaattggaagaggatccgatgggagtgtaaatgtgagacacaatgtcttgattatacctgtttgtggtttagctttgtatttaaacaaggaaataaacttgaaaattatttgtcatcataaaaatgaaacaaattaaaatatttattgccaggcaaaaaaaaaaaaaaaa

SEQ ID NO: 1503 - DNA, 5249 bp, Homo sapiens
cttccctccccgactgtgcgccgcggctggctcgggttcccgggccgacatgggcgccgccgcgtgggcacggccgctgagcgtgtctttcctgctgctgcttctgccgctcccggggatgcctgcgggctcctgggacccggccggttacctgctctactgcccctgcatggggcgctttgggaaccaggccgatcacttcttgggctctctggcatttgcaaagctgctaaaccgtaccttggctgtccctccttggattgagtaccagcatcacaagcctcctttcaccaacctccatgtgtcctaccagaagtacttcaagctggagcccctccaggcttaccatcgggtcatcagcttggaggatttcatggagaagctggcacccacccactggccccctgagaagcgggtggcatactgctttgaggtggcagcccagcgaagcccagataagaagacgtgccccatgaaggaaggaaacccctttggcccattctgggatcagtttcatgtgagtttcaacaagtcggagctttttacaggcatttccttcagtgcttcctacagagaacaatggagccagagattttctccaaaggaacatccggtgcttgccctgccaggagccccagcccagttccccgtcctagaggaacacaggccactacagaagtacatggtatggtcagacgaaatggtgaagacgggagaggcccagattcatgcccaccttgtccggccctatgtgggcattcatctgcgcattggctctgactggaagaacgcctgtgccatgctgaaggacgggactgcaggctcgcacttcatggcctctccgcagtgtgtgggctacagccgcagcacagcggcccccctcacgatgactatgtgcctgcctgacctgaaggagatccagagggctgtgaagctctgggtgaggtcgctggatgcccagtcggtctacgttgctactgattccgagagttatgtgcctgagctccaacagctcttcaaagggaaggtgaaggtggtgagcctgaagcctgaggtggcccaggtcgacctgtacatcctcggccaagccgaccactttattggcaactgtgtctcctccttcactgcctttgtgaagcgggagcgggacctccaggggaggccgtcttctttcttcggcatggacaggccccctaagctgcgggacgagttctgattctggccggagcaccagaccctctgatcctggagggaccagagtctgagctggtccttccagccaggcctggcagccagaggtgctccgggattgcaaactcctcttctcacctgccaaagatggagaagagtgccagggacccctcaaggagggagacgctccatatcccagggcataggacttgcaggttcctaggagcaggagcatctcccatcgcacgtgctttctgctcttctgggaatttctcacactggcaaagcagtccagcctccgtcttctggtccactctgctctgagcagcctgggatgctgaactcttcagagagatttttttatagagagatttctataattttgatacaaggtcatgactatcctagaactctctgtggtttttgaaaatcattgaattctattaatgtaggtacctaaagtgaccttaactgaatgtggatgaggctggggctggtgtgggtcttttggctgcttttcaaggtgtcccccaatgtggccctcaagagccatccccactgcctggccagagccattgttgtcccctacttcctaggccatttctggggcttgggggatgaatgctgtcctgtgctgtaaacactatgcaaatggaagttatcggttgtggtgctgtgcagcgctctgtgggcgactaagtgccactcacgcagcatgttcctggcaaggagcacataccatcaagccacactatcatggtattgttctcacagtcttttggtggttgatggccactgcaaacctggcaccatcagatctcttctgatctcttgccccagtggggcctggttggtagaatgttggcattcggttgatatccaaagcctgttctcccagccgtcctcctgcagctggagccttcaggccgtattctcacgagggaacgtttgccaaggctctgacctcacagaagatgcccagggcccagaagccatcagaattatcagtggagaagcaccttttgactcttcccttccaatgtaatctctgccaacaccatgaggcttaaggtgctctaagtcatgagtgttttggtctcaaatgctgcagttttaataatctgtgactcctgagagcccatggttttttgaccttgtggttctaaaattccttgtctgacccctgtagatcttttccttgccatgtcacctcccttggcctttgatcctggaaaggtggcagagcctccactgagccaggcccagagctccttgcagtgccttcttccttgtttacctgtgggaggaaacactttttttgtcaggggcagcctggttcagagctcagaggtcacactgtatcaaagatctcaaacagcaaagtcagcatttgctgtatagagctgccacccaactctaagcaggagaaactgtacagaaagggctttgctatttttcccttttgggaaaacaatgaagtgttttaagtcctgggtggactgagagatggtttgcctgtccagacttgctctcaagcctcatccagagaaggagctgcagatgagggagcccgtacactccctgccaccactaggttgtaagcctgtagctggctggctgatttcattttggaattcatttgccatccacagccttacactaggcacacactttagagtctggggctccagtggggcccgcctaattttttttccccccaagacagggccttgctctgtctcccaggctggagtgcagtggcatgatcatggcttactgcagccttgatctcccaggctcaagcgatccttctgcctcagcctctctggtagctgagactgcatgcccagctccaaatcaccttgattcatatcagcagtaataatcacttgtgttctgaaagaaagggcaccagaagttctagcaaaattcagttgtgttctgtgagctagcactttttcctctgacccaattttcttacctataaaatggtgataaaaaccgacaggttgttcaaaggcccagatcagctaaagcatgtatataagagcacgttgtaaacttgaaagagacaaaggcacaaatgtggctgttgattaatttgactgcttctcgttgctcgtcacctccatgccaggcactgtgcttgctaattgctttatgggggcattctcttatttattccccagccctgggaaataggagctgtcattatccttctctttctgcacaaggaaaaattaatgccctgagaattgtcataattttcccaaggctgcccagctggtggtgttaagccagaatttgacctcccagagccagtttccattagctgccatgctctgctgcctctaattcacagaatgcactttctaccctgtgtgccatggagacctcctatggaaaaatgatcagccaccttaccttctactgggtacctgctgtgagtctgcctatgccagaaggattaaggaggggaggttacccaagaaacaaagcctacatgccgcttacagcccccgttggatggttgctcagtacaacagtcttgcattcagcaggtgtttgttcatcacctactatgtgtcaggctctatgctaggtactggggatacaggagagaatcaagcgtaaagtctttgttctcaaggaatttgcattctagaaagtagaagatgtaataaatgtactgtgggacatgttaataagtgctataaagaaatataaagggtttgggagcaaaaagagggagtggatctattttagatgagcccaggtaagacctctctgaagagctgtcatgaaggagggagggagcacattcctggcagagaaaacagcacgtgcaaaggccccgagactggagtgtgttcctgaagagcagccaggaggccagcatggctggagaggcaggcataggcagggaaccgagcagcaggtcagagcaggcgagctgacattctgcagcctggacggccatggcaggaagcttttagttggagagatacaggaagcctcctagggttctgagcagaagaggggcatgagctgattcacattctgaaggacctctctagctggccagtgctgaggaggttggagagagaaagggtgaaagcagagagaccagtgcagggctgttaacagggttgcaggcgagagactggggtgctgggctcccctagactaggactccagtgccctcctctcccaagagacaaaggccattgcattgaaggaggtgggaaatgattagattctgaacatatgtaattatttttcagtctttttcaaagatacaaatatttacatagttttaatcatgtaatatatacaatttaatgtcctagtgttttacttaatagtgtatcatgttttccctgttggtatgtagcctggataaatgctcttaattataaaaaattctgtcgaggagtgttccatagtttattgttttcctattatgagaatttaggccaagtgtggtggctcatgcctgtaatcccagcactttgcgaggccgaggtgggcagatcacttgaggtgaggagttcaagaccagcctggccaacatggtgaattatctctactaaaaatacaaaaaaataataataatagccaggcgtggtggcacatgcctgtattcccagctgcttgggaggctgaggcaggagaatggcttgaacctgggaggtggaggttgcagtgagccgagatggtgccactgcattccagcctgggcaacagagcgagactccatctcaaaaaaaaggagacttcatgtgcccccaatttttcactattgttatttgaaaaaatatttttatttgtaagagtttttctttatttaaaatgttcattaataaagttgttggacgggaagcaaaaaaaaaaagttgtttaagataaattcccagaagtgaatttgttagatcaaacacttaaaactttttgttatggaagaattcaaatataaataaaaaattgtgagtaataaaatgaactcacagtttcaacaatgacccacaaaaaaaaaaaaaaaaaaaaaaaaaaaaaaa

SEQ ID NO: 1504 - DNA, 1524 bp, Homo sapiens
cttccctccccgactgtgcgccgcggctggctcgggttcccgggccgacatgggcgccgccgcgtgggcacggccgctgagcgtgtctttcctgctgctgcttctgccgctcccggggatgcctgcgggctcctgggacccggccggttacctgctctactgcccctgcatggggcgctttgggaaccaggccgatcacttcttgggctctctggcatttgcaaagctgctaaaccgtaccttggctgtccctccttggattgagtaccagcatcacaagcctcctttcaccaacctccatgtgtcctaccagaagtacttcaagctggagcccctccaggcttaccatcgggtcatcagcttggaggatttcatggagaagctggcacccacccactggccccctgagaagcgggtggcatactgctttgaggtggcagcccagcgaagcccagataagaagacgtgccccatgaaggaaggaaacccctttggcccattctgggatcagtttcatgtgagtttcaacaagtcggagctttttacaggcatttccttcagtgcttcctacagagaacaatggagccagaggcgtgagaatcactcctgtgttaccttactcttcccaaggtgaaactggaagcagcttctagagaacagcttcaggtgcagaccgagaaatgacgtcatcctgataattattggacgtgtttattaattgcaccccattagcccctgtttttaaaaaatataggttagcaggacgtgggcacaggccgtgaaacatttatagggcgcctgtcacgtgtgagacatagtaatcagaggccaatggtgatgtgtgaaaatgaggatgaccagctctggttttctaggagctatggtctcataatgacaataatcagcatagtgtacttgtccttaatgttatagcatggcaggaaagaccatgggcttagaaggcagacattggttaggaggtgcagggaacatactaattcatgtgcggtcaaagcacttggcatttaatagggcaaaggtaaacagatgtagagaaatgagtctcatgcctgtaatcccagcactttgggaggccaaggtgggtggatcacttgagcctaagagatcaaggctgcagtgagccatgatggtacccctgcactccagcccaggttacagagcaagggcctgtctcagcaaaacaaaacaagcacaggccaaggagtgagatagccagcgctgatggtatctgcctcgtagtgcatgaagtgcatgtcatacactaagcagccagccagtgttggctgtcagtgttattactcacatgctttattttatttaagactttgagatagttcatgaagtgggtattattatcaatttccattttataggtgaggaaactgagcccagtgaagttaaataacttcccaaggtcattgagctgttgagtggacagctcaggtctgtttgtaaatctttaataaataacaacagctaagattcaaaaaaaaaaaaaaaaaa

SEQ ID NO: 1505 - DNA, 8015 bp, Homo sapiens
catcagccgctctccctgactaggggtagctagcggcctccctcctttgggttctgtatccctacttccattaccctcggctcctcccactcctcgggggctccgtgctttccgcgggtctgtccgggggctccggaccctcggcgcagctgagttgatggcttccggagaactggcatagccgcagaatatgagtagtgtcccaagaagagtgctttgcctttggcacaaggatcagaataaaggtgaattgctattacatagggtttttcggtaaaagtcactgaaaattatttgccatacagtaaccagagacctccaactaggggcccccaaactgtatcctgcctgtagccagaagcaatttttaaagaaaatatgtctcctctgaagatacatggtcctatcagaattcgaagtatgcagactgggattacaaagtggaaagaaggatcctttgaaattgtagaaaaagagaataaagtcagcctagtagttcactacaatactggaggaattccaaggatatttcagctaagtcataacattaaaaatgtggtgcttcgacccagtggagcgaaacaaagccgcctaatgttaactctgcaagataacagcttcttgtctattgacaaagtaccaagtaaggatgcagaggaaatgaggttgtttctagatgcagtccatcaaaacagacttcctgcagccatgaaaccgtctcaggggtctggtagttttggagccattctgggcagcaggacctcacagaaggaaaccagcaggcagctttcttactcagacaatcaggcttctgcaaaaagaggaagtttggaaactaaagatgatattccatttcgaaaagttcttggtaatccgggtagaggatcgattaagactgtagcaggaagtggaatagctcggacgattccttctttgacatctacttcaacacctcttagatcagggttgctagaaaatcgtactgaaaagaggaaaagaatgatatcaactggctcagaattgaatgaagattaccctaaggaaaatgattcatcatcgaacaacaaggccatgacagatccctccagaaagtatttaaccagcagtagagaaaagcagctgagtttgaaacagtcagaagagaataggacatcagggcttttacctttacagtcatcatccttttatggtagcagagctggatccaaggaacactcttctggtggcactaacttagacaggactaatgtttcaagccagactccctctgccaaaagaagtttgggatttcttcctcagccagttcctctttctgttaaaaaactgaggtgtaaccaggattacactggctggaataaaccaagagtgcccctttcctctcaccaacagcagcaactgcagggcttctccaagttgggaaatacctgctatatgaatgctattctacaatctctattttcactccagtcatttgcaaatgacttgcttaaacaaggtatcccatggaagaaaattccactcaatgcacttatcagacgctttgcacacttgcttgttaaaaaagatatctgtaattcagagaccaaaaaggatttactcaagaaggttaaaaatgccatttcagctacagcagagagattctctggttatatgcagaatgatgctcatgaatttttaagtcagtgtttggaccagctgaaagaagatatggaaaaattaaataaaacttggaagactgaacctgtttctggagaagaaaattcaccagatatttcagctaccagagcatacacttgccctgttattactaatttggagtttgaggttcagcactccatcatttgtaaagcatgtggggagattatccccaaaagagaacagtttaatgacctctctattgaccttcctcgtaggaaaaaaccactccctcctcgttcaattcaagattctcttgatcttttctttagggccgaagaactggagtattcttgtgagaagtgtggtgggaagtgtgctcttgtcaggcacaaatttaacaggcttcctagggtcctcattctccatttgaaacgatatagcttcaatgtggctctctcgcttaacaataagattgggcagcaagtcatcattccaagatacctgaccctgtcatctcattgcactgaaaatacaaaaccaccttttacccttggttggagtgcacatatggcaatttctagaccattgaaagcctctcaaatggtgaattcctgcatcaccagcccttctacaccttcaaagaaattcaccttcaaatccaagagctccttggctttatgccttgattcagacagtgaggatgagctaaaacgttctgtggccctcagccagagactttgtgaaatgttaggcaacgaacagcagcaggaagacctggaaaaagattcaaaattatgcccaatagagcctgacaagtctgaattggaaaactcaggatttgacagaatgagcgaagaagagcttctagcagctgtcttggagataagtaagagagatgcttcaccatctctgagtcatgaagatgatgatgagccaactagcagcccagataccggatttgcagaagatgatattcaagaaatgccagaaaatccagacactatggaaactgagaagcccaaaacaatcacagagctggatcctgccagttttactgagataactaaagactgtgatgagaataaagaaaacaaaactccagaaggatctcagggagaagttgattggctccagcagtatgatatggagcgtgaaagggaagagcaagagcttcagcaggcactggctcagagccttcaagagcaagaggcttgggaacagaaagaagatgatgacctcaaaagagctaccgagttaagtcttcaagagtttaacaactcctttgtggatgcattgggttctgatgaggactctggaaatgaggatgtttttgatatggagtacacagaagctgaagctgaggaactgaaaagaaatgctgagacaggaaatctgcctcattcgtaccggctcatcagtgttgtcagtcacattggtagcacttcttcttcagatcattacattagtgatgtatatgacattaagaagcaagcgtggtttacttacaatgacctggaggtatcaaaaatccaagaggctgccgtgcagagtgatcgagatcggagtggctacatcttcttttatatgcacaaggagatctttgatgagctgctggaaacagaaaagaactctcagtcacttagcacggaagtggggaagactacccgtcaggcctcgtgaggaacaaactcctgggttggcagcatgcactgcatatttgttactgctgcccacctcacctttcctctgctgaaggagaatttggaattctacttgatgcgggagcaacaaacagctcagggccaaaccaaaagacaaaaattggagtaacgtagaatgctccatgctattttatggaaactttggtctcacatccgtagctgattatcctctttttctcctatgagtggcacttcttttgtcttaggaatacatgttgtaaatatatatctgtgtatgtgtgtatacacacacacagacacacacacacacacacgggatgaatggagccttaaagagttaggatgagccaccagaatatgcctgctcaaaattaatagcacagcagtttggagaagaaatgaaggtgtcaaagagtccattcacctgagaaatgtgtgaagacatacttatcagttggcttttagcttttatgttccttgagtagtttcactcaagtctgtaaccttttgtgttccttattagtaaaattcactggaaagccagctcttcatgttacactaatgacagtttgttctctttgcaagagaggggcattactgtcacctgacttgaggagctgttttgttgttgttgttgtctgcaaatttcatgaatttgtgatgtctttgctgtttacatgcagtcccaagaaatggattgttggtgctttggaatatgttacagtcccacatttgatatttcttatatactttgttttctctaaggagatttcttcacacagtatgttcatcatatatcatcatcattattatggtggtaaagatagaatcttttttcttttttgtcattctgccatggagcagcattaccctaatggattgcaaccaaaactttaaacaagtagaaagataatatttctccaattgggactccccagcaggaatacttagggataaggaagaatgctagcatctctgtctctcaaacatagggaggataagaagagtgttcttctggtaaagctaaaattctggaccactgaagctaaaagccctattgcaagtatgaaattaagtacttgagctataggacaaaccttgggcatttaaccatttactgtctggctttgcccttaaaatagggttgcaattaaaatgtgattggcttaggtaatcccaaaaactaacaaataacaaaggtgcataatttatttatctactttttaggtgctctgagttgaggcaaagtagagcggcaacattaagtgctatgctagtcacttagctgacgtaaccagcttggttaagcagcttatgaaaccatataaagaattcttttgaggatggaattctgtccacaaaataattttgtgagcccagatatcattaggatcacacagagttaaatatagaaaaatgaaaccatcattatattctttcgtgttttttcttttattataaacaaggggattattctttagttctcagaggtagggacaaaaccacatcaggttttcagaaggaaaaaacatttaaaaacccaccatcacatgagagaatcacttgaacccaggaggcagaggttgcagtgagctgagatcgcatcattgcactgcagtctgagtgacagagtgagactccatctcattaaaaaaaacgaaaacaaaaacaaaaaaaacacaaaccatcatcacagaagatgcaacatcttttctgaaagattgccttaagagagctccagtcctactcttggaacttggatgtattctaatgtagtaaactattctaagttttcattctttgaattataaatggcctcagcagttttgctcaactactgataaatgctttgcctcctaccatctacctatataccttattgtaatgaatgttccaaaatggtagagtggtagaaaacgccagagtagtttagagcagaggaaaatatttgttttaaaactagctttaaagttttgtttcatttctaccaggagcctctttggtttggtttgattttgcttggaaataattggttttcttataaatgagtgaagcggtgataaaattctttggctagttattaattcttttacgtgtctttgcatttgagaggcactgttaaaaattattgggaaagatttaaagtgcaggctgcaattaaaacatggagaaaagtagaaataatgccataagtctagattgcctcatgaagcagcctcatttgaattgctttcatagctttcatgtgtgtatggtttagaagtacacttacctcagaaacctgatttgatcttcatgtcttgggcaggagttgttgaaaataggttattggaatatataagttatctcactgctcatgtacttgcatgtttgggactcaaattttacttgatgtctgtccattcttgtggccctatcagccttctccttcctttactcctttaatctacttctttgactaccagtggagatttcagctggactatgttgatggggtttgttgttgtttttgagctggctgtatatattttaaaattataaatagataatatattattttttgcacattgtgatcagtttgcccagaattggggatggggcagttagcatgttggggccaggaagggacaagttagataaggactgagtgcttccgttgcaggcagtttgcacaatacctaattaaccttcctattgaaaataccaaatgtgtggttacattactttaaatgacattgaattggaacttgatggcaattagttctagatacaaccttttgatctttgttggaattttaagggaaaaatgaactaaacttcatatttgttgattttaatcacctaatagtactgaaggttggaaagttgcatgtggctggatgctgttaatttctttaatagccatgactataatttaagcctatgagaagatagactgtttcgtagggatatatttacatgtgtgtgcacactcatgagttttgtctcagcaggatagaataagcaaatccatgaactggtcttctattaatactttgattctaaaaattatttgtttacttgctatggtctgttcattctgggcctaaccctaaaggctcaataacaaatacaacaaatgtaaatatgtttacattttaagacatatgcagtggttcttacagatcagttaattaactccagaaagcaaatgttagactacacatttatttttctccttgatcaagtgtaaaattctgaaacagaggctttaaaatttaaaacctcagcaaaataatccatgaatttactgattcttctgtatcgtgtgtagttaccattatgtaactatacacacatacagctatggatatagttgtataatgaaaattatctgcaaacacctaaattaaagagaaaaaaaagtagtttgtaaactcatttgtgatctactgaaaagaggttatattaaagcaaattaaaatattttccttctctgtcctctgaaatgactgcagtagatactcttagttatcccatttagggtggttggagggcctttttaatttaattgaccccccgaggtggtcttttgttttaaacagggggcaacagctggatctccaagtacatatggattttgtatatataggagatttttagaaaaatcaacaacctaacaccagattcaagtcacataaaagtgttccaataaaatggatggatgtctttttcctccccattttgctttatactgagtaatgcactcttgcaagtgtatacaaaaactaaatagacttctgccctccaacatctttttattgcattacttcaaaatcctaattttgtctctactgatatgtcttattaacatctgaaaaaatatatattttttattggaaaattctaatttgttaggccttgaaagttttgtgacaattattttgctgtgtttaaccacaatcattcaccttatggcatgctttgattactagacttcaggcagtctcattcattgtatcatacttacacacaattagtaagttgtctccatgtgtgctatatgtctgaggtgtatggagtttttatttaaaaagtgtgccagtctgaatataagcatttgattttgtaacattggacttttcttaaaagtacagaggttcaaagtataggtatgtccattggcataagaatagagtgggtgagggtctggaccaggttccaggttggtccagtcagatgccagaacaaagaagaacagtcaactaaactggtctacttcaaaaatagtgggcctgtgtgaagaatgagaccacatgtgggtgtgcacacctcttgtccccaggtttccctccctttgagcttttctttccctccctaacttctctggcctattgtcattgttgtttctttaaacttaaggagagaaaaacaaaaatgagattcctacactttgcctaattgagccactaccaggttttctggcagctgtggccacattatttgtgagatgattttttttctttatgttcagagtgacttttgattctgattctttatgttttgtatggagcggcacttttatctgtgttttagcagaactgttcctctgtatcctttacggtttttctttgtttttgtttcctttttaaattatgcatagagtttttttgtgtgtatgaaattaaagcctttattaaccttcaaaaaaaaaaa

SEQ ID NO: 1506 - DNA, 7859 bp, Homo sapiens
cgccaaatttctcccctgaagcagaggtggtagccaacggctccatgtctctgaggagcggcgggcggcggcgcgcggacccaggcgcggatggcgaggccagcagggatgatggcgccacttcctcagtttcggcactcaagcgcctggaacggagtcagtggacggataagatggatttgcggtttggttttgagcggctgaaggagcctggtgagaagacaggctggctcattaacatgcatcctaccgagattttagatgaagataagcgcttaggcagtgcagtggattactactttattcaagatgacggaagcagatttaaggtggctttgccctataaaccgtatttctacattgcgaccagaaagggttgtgagcgagaagtttcatcttttctctccaagaagtttcagggcaaaattgcaaaagtggagactgtccccaaagaggatctggacttgccaaatcacttggtgggtttgaagcgaaattacatcaggctgtccttccacactgtggaggatcttgtcaaagtgaggaaggagatctcccctgccgtgaagaagaacagggagcaggatcacgccagcgacgcgtacacagctctgctttccagtgttctgcagaggggcggtgtcattactgatgaagaggaaacctctaagaagatagctgaccagttggacaacattgtggacatgcgcgagtacgatgttccctaccacatccgcctctccattgacctgaagatccacgtggctcattggtacaatgtcagataccgaggaaatgcttttccggtagaaatcacccgccgagatgaccttgttgaacgacctgaccctgtggttttggcatttgacattgagacgaccaaactgcccctcaagtttcctgatgctgagacagaccagattatgatgatttcctacatgatcgatggccagggctacctcatcaccaacagggagattgtttcagaagatattgaagattttgagttcacccccaagccagaatatgaaggccccttttgtgtcttcaatgaacccgatgaggctcatctgatccaaaggtggtttgaacacgtccaggagaccaaacccaccatcatggtcacctacaacggggacttttttgactggccatttgtggaggcccgggcagcagtccacggtctgagcatgcagcaggagataggcttccagaaggacagccagggggagtacaaggcgccccagtgcatccacatggactgcctcaggtgggtgaagagggacagttaccttcctgtgggcagtcataatctcaaggcggccgccaaggccaagctaggctatgatcccgtggagctagacccggaggacatgtgccggatggccacggagcagccccagactctggccacgtattctgtgtcagatgctgtcgccacttactacctgtacatgaagtacgtccacccattcatctttgctctgtgcaccattattcccatggagcccgacgaggtgctgcggaagggctctggcactctgtgtgaggccttgctgatggtgcaggccttccacgccaacatcatcttccccaacaagcaagagcaggagttcaataagctgacggacgacggacacgtgctggactctgagacctacgtcgggggccacgtggaggccctcgagtctggggttttccgcagcgatatcccttgccggtttaggatgaatcctgccgcctttgacttcctgctgcagcgggttgagaagaccttgcgccacgcccttgaggaagaggagaaagtgcctgtggagcaagtcaccaactttgaagaggtgtgtgatgagattaagagcaagcttgcctccctgaaggacgttcccagccgcatcgagtgtccactcatctaccacctggacgtgggggccatgtaccccaacatcatcctgaccaaccgcctgcagccctctgccatggtggacgaagccacctgtgctgcctgtgacttcaataagcctggagcaaactgccagcggaagatggcctggcagtggaggggcgagttcatgccagccagtcgcagcgaataccatcggatccagcaccagctggagtcagagaagttcccccccttgttcccagaggggccagctcgggcctttcatgaactgtcccgcgaggaacaggcgaaatacgagaagagaaggctggcggattactgccggaaagcctacaagaagatccacatcaccaaggtggaagagcgtctcaccaccatctgccagcgggaaaactccttctacgtggacaccgtgcgtgccttccgggacaggcgttacgagttcaaagggctccacaaggtgtggaaaaagaagctctcggcggccgtggaggtgggcgacgcggctgaggtgaagcgctgcaagaacatggaggtgctgtatgactcgctgcagctggcccacaagtgcatcctgaactccttctatggctatgtcatgcgcaagggggctcgctggtactccatggagatggctggcatcgtctgcttcacaggggccaacatcatcacccaggcacgggagctgatcgagcagattgggaggcccttagagctggacacagatggtatatggtgcgtcctgcccaacagcttcccagaaaattttgtcttcaagacgaccaatgtgaagaagcccaaagtgaccatctcctacccaggcgccatgttgaacatcatggtcaaggaaggcttcaccaatgaccagtaccaggagctggctgagccgtcctcactcacctacgtcacccgctcagagaacagcatcttttttgaggttgatgggccctaccttgccatgattcttccagcctccaaggaagaaggcaagaaattgaagaagaggtatgctgtgttcaatgaagacggttctctggctgagctcaagggctttgaggtcaaacgccgcggggaactgcagctgattaagatcttccaatcctcggtgtttgaggccttcctcaagggcagcacgctggaagaggtgtatggctctgtagccaaggtggctgactactggctggacgtgctgtacagcaaggcagccaacatgcctgactctgagctattcgagctcatctctgagaaccgttccatgtctcggaagctggaagattacggggagcagaagtctacgtccatcagcacagcaaagcgcctggccgagttcctgggagaccagatggtcaaggatgcagggctgagttgccgctacatcatctcccgcaagcccgagggctcccctgtcacggagagggccatcccacttgccattttccaagcagagcccacggtgaggaagcactttctccggaaatggctcaagagctcttcccttcaagactttgatattcgagcaattctggattgggactactacattgagcggctgggaagcgccatccagaagatcatcaccatccctgcggccctgcagcaggtaaagaacccagtgccacgtgtcaaacaccccgactggctgcacaaaaaactgctggagaagaatgatgtctacaagcagaagaagatcagtgagctcttcaccctggagggcaggagacaggtcacgatggccgaggcctcagaagacagtccgaggccaagtgctcctgacatggaggacttcggcctcgtaaagctgcctcacccagcagcccctgtcactgtgaagaggaagcgagttctttgggagagccaggaggagtcccaggacctcacgccgactgtgccctggcaggaaatcttggggcagcctcccgccctgggaaccagccaggaggaatggcttgtctggctccggttccacaagaagaagtggcagctgcaggcccggcagcgcctcgcccgcaggaagaggcagcgtctggagtcggcagagggtgtgctcaggcccggggccatccgggatggtcctgccacggggctggggagcttcttgcgaagaactgcccgcagcatcctggaccttccgtggcagattgtgcagatcagcgagaccagccaggccggcctgttcaggctgtgggcgctcgttggcagtgacttgcactgcatcaggctgagcatcccccgtgtgttctacgtgaaccagcgagtcgctaaagcggaggagggtgcttcgtatcgcaaggtaaatcgggtccttcctcgctccaacatggtctacaatctctatgagtattcagtgccagaggacatgtaccaggaacacatcaacgagatcaacgctgagctgtcagcgccagacatcgagggcgtatatgagactcaggttccgttactgttccgggccctggtgcacctgggctgtgtgtgtgtggtcaataaacagctggtgaggcacctttcaggctgggaagcagagacctttgctcttgagcacctggagatgcgctctctggcccagttcagctacctggaaccagggagtatccgccatatctacctgtaccaccacgcacaggcccacaaagcgctcttcgggatcttcatcccctcacagcgcagggcatccgtctttgtgctggacactgtgcgcagcaaccagatgcccagccttggcgccctgtactcagcagagcacggcctcctcctggagaaggtgggccctgagctcctgccaccccccaaacacaccttcgaagttcgggcagaaactgacctgaagaccatctgcagagccatccagcgattcctgctcgcctacaaggaggagcgccgggggcccacactcatcgctgttcagtccagctgggagctgaagaggctggccagtgaaattcctgtcttggaggaattcccactggtgcctatctgtgtggctgacaagatcaactatggggtcctggactggcagcgccatggagcccggcgcatgatccgtcactacctcaacctggacacctgcctgtcgcaggccttcgagatgagcaggtactttcacattcccattgggaacctaccagaggacatctccacattcggctccgacctcttctttgcccgccacctccagcgccacaaccacctgctctggctgtcccctacagcccgccctgacctgggtggaaaggaggctgatgacaactgtcttgtcatggagttcgatgaccaagccactgttgagatcaacagttcaggctgttactccacagtgtgtgtggagctggaccttcagaacctggccgtcaacaccattctccagtctcaccatgtcaacgacatggagggggccgacagcatggggatcagcttcgacgtgatccagcaggcctccctggaggacatgatcacgggtggtcaggctgccagtgccccggccagctacgatgagacagccctgtgctctaacaccttcaggatcctgaagagcatggtcgtgggctgggtgaaggagatcacccagtaccacaacatctatgcagacaaccaggtgatgcacttctaccgctggcttcggtcgccatcctctctgcttcatgaccctgccctgcaccgcacactccacaacatgatgaagaagctcttcctgcagctcatcgctgagttcaagcgcctggggtcatcagtcatctacgccaacttcaaccgcatcatcctctgtacaaagaagcgccgtgtggaagatgccatcgcttacgtggagtacatcaccagcagcatccattcaaaggagaccttccattctctgacaatttctttctctcgatgctgggaatttcttctctggatggatccatctaactatggcggaatcaaaggaaaagtttcatctcgtattcactgtggactgcaagactcccagaaagcagggggagcagaggatgagcaggaaaatgaggacgatgaggaggaaagagatggggaggaggaggaagaggcggaggaatccaacgtggaggatttactggaaaacaactggaacattttgcagtttttgccacaggcagcctcctgccagaactacttcctcatgattgtttcagcgtacatcgtggccgtgtaccactgcatgaaggacgggctgaggcgcagtgctccagggagcacccccgtgaggaggaggggggccagccagctctcccaggaggccgagggggcggtcggagcccttcccggaatgatcaccttctctcaggattatgtcgcaaatgagctcactcagagcttcttcaccatcactcagaagattcagaagaaagtcacaggctctcggaactccactgagctctcagagatgtttcctgtcctccccggttcccacttgctgctcaataaccctgccctggagttcatcaaatacgtgtgcaaggtgctgtccctggacaccaacatcacaaaccaggtgaataagctgaaccgagacctgcttcgcctggtggatgtcggcgagttctccgaggaggcccagttccgagacccctgccgctcctacgtgcttcctgaggtcatctgccgcagctgtaacttctgccgcgacctggacctgtgtaaagactcttccttctcagaggatggggcggtcctgcctcagtggctctgctccaactgtcaggcgccctacgactcctctgccatcgagatgacgctggtggaagttctacagaagaagctgatggccttcaccctgcaggacctggtctgcctgaagtgccgcggggtgaaggagaccagcatgcctgtgtactgcagctgcgcgggagacttcgccctcaccatccacacccaggtcttcatggaacagatcggaatattccggaacattgcccagcactacggcatgtcgtacctcctggagaccctggagtggctgctgcagaagaacccacagctgggccattagccagccccgggccccgggtgcctctgcgtccgtgccaggcctcctgatgccaaggccacatccccgtgcttccagtgaccagaccactgaccaccctgactgtccaaacctgtgaccccaggccagggaacggggaggaaaccaaagaaaaccattttcagggagctcagacgtcacaggagggagcgggagcaggatgtggccctggcctcgccagagcacctgaagaagcaggccgtgagcgaggctgcgagtgccctgggcgccgtttctcacgcagtgaatgcttttccaggcctctgttgcttcctgcaccacacctggtggggtgggagcgtcctctaggtgcccctagttctttgtcctgcctcccagagggaggaaaagcccctgggggcttctggctccctgagattgggctctgagacgagacgggttcccaaggccctggtggggctggagtctcacctgtttgcatggagaaatgggctggccccacagcctcacaggagcagtttgtgggctggtttccccaggaatccagaccctaacccgtgagaatctggattttggcttgtgagccctgcttatttggagccgggtctagagggaaccctctatcagcctcaggaaaacaagacctctgtgcacctcacttttggctcactgcagcccttgtccttcacctccacacaggaccagctggaagcagaaagaagaaaggccaatttcacagggcaccaaacaagtatgaaatgtaaatcagaaatgcagacaccccagacgagagcctcacaggagggagggggccccacaggctccccaggaggctcgtgtctttggcccagagccagccttagtttgtccctgccatctactgtctgaggccatcgctgctacactttgtttttatttgtatttcatactgaagtttcaaaaaaaaaaaaaaaaaaa

SEQ ID NO: 1507 - DNA, 2501 bp, Homo sapiens
cgtggttcttttgcaagctctggattctctggagtttgaatgtttccagtattggaaccccaccaagtaggactgatcaggtcttacaattctaaaaccatgacctgtaactggggaagacctttgaagttctgtccaacaaagtatatgaagtttcaggaattagtgacattcagggatgtggccatagacttctctcggcaggagtgggaatacctggaccctaatcagagggacttatacagggatgtgatgttggagaactatagaaacctggtatcactgggaggacattccatttctaaaccagttgtggttgatttactggagcgaggaaaagagccctggatgattttgagggaagaaacacagttcacagagatgggggtctcactgggttgctcagctggtctctaactcctgggctcaagcagtcctcctgcattggcttcccaaagtgctgaaaatacagatggagtcttgctctgtcgcacaggctggagtgcagtggcccgatctcagctcactgcaacctccgcctcccaggttcaagcaattctcctgccacagcctccaagtagctgggattacagatttggatttacagtgtgagataatcagctacatagaagtacccacttatgaaacagatatatcctctacacaacttcagagcatatataagagagagaaactctatgaatgtaagaaatgtcagaagaaatttagtagtggttatcaacttattctacatcacaggtttcatgtcattgagagaccctatgaatgcaaagagtgtgggaagaactttcgtagtggctatcaacttactctacatcaaagatttcatactggtgagaaaccctatgaatgtacagaatgtgggaagaactttagaagtggttatcagctgactgtgcatcagagatttcatactggtgagaaaacctatgaatgtaggcagtgtgggaaggcctttatatatgcctcacacattgttcaacatgagagaattcacactggtgggaagccgtatgaatgtcaggagtgtgggagggcctttagtcaaggtggacatcttagaattcatcagagagttcatactggcgaaaaaccatataaatgtaaggaatgtgggaagacttttagtaggcgctcaaatcttgttgaacatgggcagtttcatactgatgagaagccatacatatgtgagaaatgtggaaaggcctttagaagaggtcaccagcttactgtacatcagagagttcacactggtaaaaagccatatgagtgtaaagaatgtgggaagggctataccactgcctcatactttcttctacatcagagaattcataaaggtggaaaaccctatgaatgtaaggagtgtaagaaaacctttactttgtatagaaatcttactcggcatcagaatattcatactggtgagaaactttttgaatgcaagcaatgtgggaagacctatactactggttcaaaactctttcaacatcagaaaactcatactggcgagaaaccctatgaatgcaaggaatgcggaaaggcctttagcttgtatggctaccttaaacaacatcagaaaattcatactggcatgaaacactttgaatgtaaggagtgtaaaaaaacctttactttgtatagaaatcttactcgacatcagaatattcacactggtaagaaactttttgaatgtcaggaatgtgggaaggcctatagtactggctcaaaccttattcaacatcggaaaactcatactggtgagaaaccctataaatgtaaggaatgtggcaagacctttagcttgcatggatatcttaatcaacatcagaaaattcatactggtgtgaaaccctatgaatgtaaggtatgtagaaaaacctttactttctatagaaatcttactctacatcaaagtattcatactgatgagaaaccttttgaatgtaaggaatgtgggaagacctttagacgtagttcacaccttactgcacatcagagcattcatgctgataaaaaaccctatgaatgtaaagaatgtggaaaggcctttaaaatgtatggctaccttacccaacatcagaaaattcatactggtggaaaaccttatgaatgtaaagaatgtgggaaggccttcagtcgtgcttcaaaccttgttcaacatgagagaattcatactggtgagaaaccctatgtgtgtaagcagtgtgggaaaaccttcagatatggttcagcccttaaagcccatcagagaattcataggagcataaaagtgtaagaccgtaaagagtatgagcgcgccattcatcatcagacagcccacactggtgagaaatgatggaatgttagtcttataggtatggctttagcaattgagagagttcaaaatgcagatcttgccacattagaaagcattcaatgtcagtcctgttttaatggaatatctgactattcaatggtaaattaagaaaaaaaaaaaaaaa

SEQ ID NO: 1508 - DNA, 1889 bp, Homo sapiens
ccgggtggatggagttggaggggcggggtgctggcggtgtggcgggggggcaggcggcagggcccgggcggagccccggggagtcggcgctgctggacgggtggctgcagcggggcgtgggccggggggccggcggcggggaggccggggcctgcaggcccccggtacgacaagatccggactccggcccggactacgaggcgctgccggctggagccactgtcaccacgcacatggtggcaggcgccgtggcagggatcctggagcactgcgtgatgtaccccatcgactgcgtcaagacccggatgcagagtctacagcctgacccagctgcccgctatcgcaatgtgttggaggccctctggaggattataagaacggagggcctatggaggcccatgagggggctgaacgtcacagcaacaggcgcagggcctgcccacgccctttattttgcctgctacgaaaagttaaaaaagacattgagtgatgtaatccaccctgggggcaatagccatattgccaatggtattgagccttcctgtgctggttcccccactttcccaactctttgggctttgctgctgtcagtgctttccagtctcagcatggtttggagctgaagctttgggctgggataggccactggtggcaggtgatgtgctggcatccctaggcagcagtgtatctgcttcctgtctggggtgtgagctgcatttattctcagaatgatctttattgataagacttgagctggccttcctatcatggatgtggaatacattagtgaccttacaaagttggtgggaacagatactttaccttcttaaacaggagtttaggagcagtgggtccccatcttttggactagctcttaacgttacttttccccgctgtagtgtagcacagccactccccttcactgggggacctcagtgagttggtcagctctcttggccttacatgtggcagttgttttcttgtttgcaggtgcggccgggtgtgtggcaacattacttcatgatgcagccatgaaccctgcggaagtggtcaagcagaggatgcagatgtacaactcaccataccaccgggtgacagactgtgtacgggcagtgtggcaaaatgaaggggccggggccttttaccgcagctacaccacccagctgaccatgaacgttcctttccaagccattcacttcatgacctatgaattcctgcaggagcactttaacccccagagacggtacaacccaagctcccacgtcctctctggagcttgcgcaggagctgtagctgccgcagccacaaccccactggacgtttgcaaaacactgctcaacacccaggagtccttggctttgaactcacacattacaggacatatcacaggcatggctagtgccttcaggacggtatatcaagtaggtggggtgaccgcctatttccgaggggtgcaggccagagtaatttaccagatcccctccacagccatcgcatggtctgtgtatgagttcttcaaatacctaatcactaaaaggcaagaagagtggagggctggcaagtgaagtagcactgaacgaagccaggggttcagatgacactgctgcatcctggtcacattctctgtctcctggaatgctcccacctcaagtggagttagaaggaaggtagaggggctctcccccaggattttggtgttttgactaacaccagttcctgccaacctctgttgccaccacctttccttccaggccctaagcacgtgcagcaaagcacaccacagcacctttgataacctctctccatcctgggcctgatgacctgctctagactgttatagagggataagcagctcattcccctggttcctaataaaaagcctttaaatt

SEQ ID NO: 1509 - DNA, 527 bp, Homo sapiens
acgcttgatccccggccgcggggccaggaagtcggagtttgagccccggaggcagagcggctgccatggccaagtacctggcccagatcattgtgatgggcgtgcaggtggtgggcagggcctttgcacgggccttgcggcaggagtttgcagccagccgggccgcagctgatgcccgaggacgcgctggacaccggtctgcagccgcttccaacctctccggcctcagcctccaggaggcacagcagattctcaacgtgtccaagctgagccctgaggaggtccagaagaactatgaacacttatttaaggtgaatgataaatccgtgggtggctccttctacctgcagtcaaaggtggtccgcgcaaaggagcgcctggatgaggaactcaaaatccaggcccaggaggacagagaaaaagggcagatgccccatacgtgactgctcggctccccccgcccaccccgccgcctctaatttatagcttggtaataaatttcttttctgcaaaaaaaaaaaaaaaaa

SEQ ID NO: 1510 - DNA, 1621 bp, Homo sapiens
gccgggcctcggagccgggactcgcgggcggcgggcgggggcgtcgctgcgcggctggccggtgaggccgcggcatggggcgagtgcagctcttcgagatcagcctgagccacggccgcgtcgtctacagccccggggagccgttggctgggaccgtgcgcgtgcgcctgggggcaccgctgccgttccgagccatccgggtgacctgcataggttcctgcggggtctccaacaaggctaatgacacagcgtgggtagtggaggagggttacttcaacagttccctgtcgctggcagacaaggggagcctgcccgctggagagcacagcttccccttccagttcctgcttcctgccactgcacccacgtcctttgagggtcctttcgggaagatcgtgcaccaggtgagggccgccatccacacgccacggttttccaaggatcacaagtgcagcctcgtgttctatatcttgagccccttgaacctgaacagcatcccagacattgagcaacccaacgtggcctctgccaccaagaagttctcctacaagctggtgaagacgggcagcgtggtcctcacagccagcactgatctccgcggctatgtggtggggcaggcactgcagctgcatgccgacgttgagaaccagtcaggcaaggacaccagccctgtggtggccagtctgctgcagaaagtgtcctataaggccaagcgctggatccacgacgtacggaccattgcggaggtggagggtgcgggcgtcaaggcctggcggcgggcgcagtggcacgagcagatcctggtgcctgccttgccccagtcggccctgccgggctgcagcctcatccacatcgactactacttacaggtctctctgaaggcgccggaagctactgtgaccctcccggtcttcattggcaatattgctgtgaaccatgccccagtgagcccccggccaggcctggggctgcctcctggggccccacccctggtggtgccttccgcaccaccccaggaggaggctgaggctgaggctgcggctggcggcccccacttcttggaccccgtcttcctctccaccaagagccattcgcagcggcagcccctgctggccaccttgagttctgtgcctggtgcgccggagccctgccctcaggatggcagccctgcctcacacccgctgcaccctcccttgtgcatttcaacaggtgccactgtcccctactttgcagagggctccggggggccagtgcccactaccagcaccttgattcttcctccagagtacagttcttggggctacccctatgaggccccaccgtcttatgagcagagctgcggcggcgtggaacccagcctgacccctgagagctgaccccgtgctgccttctccaggcaggcctggcctctgccctgggactggggcgcccagggcctcgtgccttctctcttggcctagcctggcccactcaggacctgcccagcctctgccagctcctctggcatccgccctcttctccctggggctggggtgggggtggcagggagctgggacctggagagacaactcctgtaaataaaacactttatttgtagaaaaaaaaaaaaaaaaaaaaaaaa

SEQ ID NO: 1511 - DNA, 9030 bp, Homo sapiens
gcttagtgctgagcacatccagtgggtaaagttccttaaaatgctctgcaaagaaattgggacttttcattaaatcagaaattttacttttttcccctcctgggagctaaagatattttagagaagaattaaccttttgcttctccagttgaacatttgtagcaataagtcatgcaaatagagctctccacctgcttctttctgtgccttttgcgattctgctttagtgccaccagaagatactacctgggtgcagtggaactgtcatgggactatatgcaaagtgatctcggtgagctgcctgtggacgcaagatttcctcctagagtgccaaaatcttttccattcaacacctcagtcgtgtacaaaaagactctgtttgtagaattcacggatcaccttttcaacatcgctaagccaaggccaccctggatgggtctgctaggtcctaccatccaggctgaggtttatgatacagtggtcattacacttaagaacatggcttcccatcctgtcagtcttcatgctgttggtgtatcctactggaaagcttctgagggagctgaatatgatgatcagaccagtcaaagggagaaagaagatgataaagtcttccctggtggaagccatacatatgtctggcaggtcctgaaagagaatggtccaatggcctctgacccactgtgccttacctactcatatctttctcatgtggacctggtaaaagacttgaattcaggcctcattggagccctactagtatgtagagaagggagtctggccaaggaaaagacacagaccttgcacaaatttatactactttttgctgtatttgatgaagggaaaagttggcactcagaaacaaagaactccttgatgcaggatagggatgctgcatctgctcgggcctggcctaaaatgcacacagtcaatggttatgtaaacaggtctctgccaggtctgattggatgccacaggaaatcagtctattggcatgtgattggaatgggcaccactcctgaagtgcactcaatattcctcgaaggtcacacatttcttgtgaggaaccatcgccaggcgtccttggaaatctcgccaataactttccttactgctcaaacactcttgatggaccttggacagtttctactgttttgtcatatctcttcccaccaacatgatggcatggaagcttatgtcaaagtagacagctgtccagaggaaccccaactacgaatgaaaaataatgaagaagcggaagactatgatgatgatcttactgattctgaaatggatgtggtcaggtttgatgatgacaactctccttcctttatccaaattcgctcagttgccaagaagcatcctaaaacttgggtacattacattgctgctgaagaggaggactgggactatgctcccttagtcctcgcccccgatgacagaagttataaaagtcaatatttgaacaatggccctcagcggattggtaggaagtacaaaaaagtccgatttatggcatacacagatgaaacctttaagactcgtgaagctattcagcatgaatcaggaatcttgggacctttactttatggggaagttggagacacactgttgattatatttaagaatcaagcaagcagaccatataacatctaccctcacggaatcactgatgtccgtcctttgtattcaaggagattaccaaaaggtgtaaaacatttgaaggattttccaattctgccaggagaaatattcaaatataaatggacagtgactgtagaagatgggccaactaaatcagatcctcggtgcctgacccgctattactctagtttcgttaatatggagagagatctagcttcaggactcattggccctctcctcatctgctacaaagaatctgtagatcaaagaggaaaccagataatgtcagacaagaggaatgtcatcctgttttctgtatttgatgagaaccgaagctggtacctcacagagaatatacaacgctttctccccaatccagctggagtgcagcttgaggatccagagttccaagcctccaacatcatgcacagcatcaatggctatgtttttgatagtttgcagttgtcagtttgtttgcatgaggtggcatactggtacattctaagcattggagcacagactgacttcctttctgtcttcttctctggatataccttcaaacacaaaatggtctatgaagacacactcaccctattcccattctcaggagaaactgtcttcatgtcgatggaaaacccaggtctatggattctggggtgccacaactcagactttcggaacagaggcatgaccgccttactgaaggtttctagttgtgacaagaacactggtgattattacgaggacagttatgaagatatttcagcatacttgctgagtaaaaacaatgccattgaaccaagaagcttctcccagaattcaagacaccctagcactaggcaaaagcaatttaatgccaccacaattccagaaaatgacatagagaagactgacccttggtttgcacacagaacacctatgcctaaaatacaaaatgtctcctctagtgatttgttgatgctcttgcgacagagtcctactccacatgggctatccttatctgatctccaagaagccaaatatgagactttttctgatgatccatcacctggagcaatagacagtaataacagcctgtctgaaatgacacacttcaggccacagctccatcacagtggggacatggtatttacccctgagtcaggcctccaattaagattaaatgagaaactggggacaactgcagcaacagagttgaagaaacttgatttcaaagtttctagtacatcaaataatctgatttcaacaattccatcagacaatttggcagcaggtactgataatacaagttccttaggacccccaagtatgccagttcattatgatagtcaattagataccactctatttggcaaaaagtcatctccccttactgagtctggtggacctctgagcttgagtgaagaaaataatgattcaaagttgttagaatcaggtttaatgaatagccaagaaagttcatggggaaaaaatgtatcgtcaacagagagtggtaggttatttaaagggaaaagagctcatggacctgctttgttgactaaagataatgccttattcaaagttagcatctctttgttaaagacaaacaaaacttccaataattcagcaactaatagaaagactcacattgatggcccatcattattaattgagaatagtccatcagtctggcaaaatatattagaaagtgacactgagtttaaaaaagtgacacctttgattcatgacagaatgcttatggacaaaaatgctacagctttgaggctaaatcatatgtcaaataaaactacttcatcaaaaaacatggaaatggtccaacagaaaaaagagggccccattccaccagatgcacaaaatccagatatgtcgttctttaagatgctattcttgccagaatcagcaaggtggatacaaaggactcatggaaagaactctctgaactctgggcaaggccccagtccaaagcaattagtatccttaggaccagaaaaatctgtggaaggtcagaatttcttgtctgagaaaaacaaagtggtagtaggaaagggtgaatttacaaaggacgtaggactcaaagagatggtttttccaagcagcagaaacctatttcttactaacttggataatttacatgaaaataatacacacaatcaagaaaaaaaaattcaggaagaaatagaaaagaaggaaacattaatccaagagaatgtagttttgcctcagatacatacagtgactggcactaagaatttcatgaagaaccttttcttactgagcactaggcaaaatgtagaaggttcatatgacggggcatatgctccagtacttcaagattttaggtcattaaatgattcaacaaatagaacaaagaaacacacagctcatttctcaaaaaaaggggaggaagaaaacttggaaggcttgggaaatcaaaccaagcaaattgtagagaaatatgcatgcaccacaaggatatctcctaatacaagccagcagaattttgtcacgcaacgtagtaagagagctttgaaacaattcagactcccactagaagaaacagaacttgaaaaaaggataattgtggatgacacctcaacccagtggtccaaaaacatgaaacatttgaccccgagcaccctcacacagatagactacaatgagaaggagaaaggggccattactcagtctcccttatcagattgccttacgaggagtcatagcatccctcaagcaaatagatctccattacccattgcaaaggtatcatcatttccatctattagacctatatatctgaccagggtcctattccaagacaactcttctcatcttccagcagcatcttatagaaagaaagattctggggtccaagaaagcagtcatttcttacaaggagccaaaaaaaataacctttctttagccattctaaccttggagatgactggtgatcaaagagaggttggctccctggggacaagtgccacaaattcagtcacatacaagaaagttgagaacactgttctcccgaaaccagacttgcccaaaacatctggcaaagttgaattgcttccaaaagttcacatttatcagaaggacctattccctacggaaactagcaatgggtctcctggccatctggatctcgtggaagggagccttcttcagggaacagagggagcgattaagtggaatgaagcaaacagacctggaaaagttccctttctgagagtagcaacagaaagctctgcaaagactccctccaagctattggatcctcttgcttgggataaccactatggtactcagataccaaaagaagagtggaaatcccaagagaagtcaccagaaaaaacagcttttaagaaaaaggataccattttgtccctgaacgcttgtgaaagcaatcatgcaatagcagcaataaatgagggacaaaataagcccgaaatagaagtcacctgggcaaagcaaggtaggactgaaaggctgtgctctcaaaacccaccagtcttgaaacgccatcaacgggaaataactcgtactactcttcagtcagatcaagaggaaattgactatgatgataccatatcagttgaaatgaagaaggaagattttgacatttatgatgaggatgaaaatcagagcccccgcagctttcaaaagaaaacacgacactattttattgctgcagtggagaggctctgggattatgggatgagtagctccccacatgttctaagaaacagggctcagagtggcagtgtccctcagttcaagaaagttgttttccaggaatttactgatggctcctttactcagcccttataccgtggagaactaaatgaacatttgggactcctggggccatatataagagcagaagttgaagataatatcatggtaactttcagaaatcaggcctctcgtccctattccttctattctagccttatttcttatgaggaagatcagaggcaaggagcagaacctagaaaaaactttgtcaagcctaatgaaaccaaaacttacttttggaaagtgcaacatcatatggcacccactaaagatgagtttgactgcaaagcctgggcttatttctctgatgttgacctggaaaaagatgtgcactcaggcctgattggaccccttctggtctgccacactaacacactgaaccctgctcatgggagacaagtgacagtacaggaatttgctctgtttttcaccatctttgatgagaccaaaagctggtacttcactgaaaatatggaaagaaactgcagggctccctgcaatatccagatggaagatcccacttttaaagagaattatcgcttccatgcaatcaatggctacataatggatacactacctggcttagtaatggctcaggatcaaaggattcgatggtatctgctcagcatgggcagcaatgaaaacatccattctattcatttcagtggacatgtgttcactgtacgaaaaaaagaggagtataaaatggcactgtacaatctctatccaggtgtttttgagacagtggaaatgttaccatccaaagctggaatttggcgggtggaatgccttattggcgagcatctacatgctgggatgagcacactttttctggtgtacagcaataagtgtcagactcccctgggaatggcttctggacacattagagattttcagattacagcttcaggacaatatggacagtgggccccaaagctggccagacttcattattccggatcaatcaatgcctggagcaccaaggagcccttttcttggatcaaggtggatctgttggcaccaatgattattcacggcatcaagacccagggtgcccgtcagaagttctccagcctctacatctctcagtttatcatcatgtatagtcttgatgggaagaagtggcagacttatcgaggaaattccactggaaccttaatggtcttctttggcaatgtggattcatctgggataaaacacaatatttttaaccctccaattattgctcgatacatccgtttgcacccaactcattatagcattcgcagcactcttcgcatggagttgatgggctgtgatttaaatagttgcagcatgccattgggaatggagagtaaagcaatatcagatgcacagattactgcttcatcctactttaccaatatgtttgccacctggtctccttcaaaagctcgacttcacctccaagggaggagtaatgcctggagacctcaggtgaataatccaaaagagtggctgcaagtggacttccagaagacaatgaaagtcacaggagtaactactcagggagtaaaatctctgcttaccagcatgtatgtgaaggagttcctcatctccagcagtcaagatggccatcagtggactctcttttttcagaatggcaaagtaaaggtttttcagggaaatcaagactccttcacacctgtggtgaactctctagacccaccgttactgactcgctaccttcgaattcacccccagagttgggtgcaccagattgccctgaggatggaggttctgggctgcgaggcacaggacctctactgagggtggccactgcagcacctgccactgccgtcacctctccctcctcagctccagggcagtgtccctccctggcttgccttctacctttgtgctaaatcctagcagacactgccttgaagcctcctgaattaactatcatcagtcctgcatttctttggtggggggccaggagggtgcatccaatttaacttaactcttacctattttctgcagctgctcccagattactccttccttccaatataactaggcaaaaagaagtgaggagaaacctgcatgaaagcattcttccctgaaaagttaggcctctcagagtcaccacttcctctgttgtagaaaaactatgtgatgaaactttgaaaaagatatttatgatgttaacatttcaggttaagcctcatacgtttaaaataaaactctcagttgtttattatcctgatcaagcatggaacaaagcatgtttcaggatcagatcaatacaatcttggagtcaaaaggcaaatcatttggacaatctgcaaaatggagagaatacaataactactacagtaaagtctgtttctgcttccttacacatagatataattatgttatttagtcattatgaggggcacattcttatctccaaaactagcattcttaaactgagaattatagatggggttcaagaatccctaagtcccctgaaattatataaggcattctgtataaatgcaaatgtgcatttttctgacgagtgtccatagatataaagccatttggtcttaattctgaccaataaaaaaataagtcaggaggatgcaattgttgaaagctttgaaataaaataacaatgtcttcttgaaatttgtgatggccaagaaagaaaatgatgatgacattaggcttctaaaggacatacatttaatatttctgtggaaatatgaggaaaatccatggttatctgagataggagatacaaactttgtaattctaataatgcactcagtttactctctccctctactaatttcctgctgaaaataacacaacaaaaatgtaacaggggaaattatataccgtgactgaaaactagagtcctacttacatagttgaaatatcaaggaggtcagaagaaaattggactggtgaaaacagaaaaaacactccagtctgccatatcaccacacaataggatcccccttcttgccctccacccccataagattgtgaagggtttactgctccttccatctgcctgaccccttcactatgactacacagaatctcctgatagtaaagggggctggaggcaaggataagttatagagcagttggaggaagcatccaaagattgcaacccagggcaaatggaaaacaggagatcctaatatgaaagaaaaatggatcccaatctgagaaaaggcaaaagaatggctacttttttctatgctggagtattttctaataatcctgcttgacccttatctgacctctttggaaactataacatagctgtcacagtatagtcacaatccacaaatgatgcaggtgcaaatggtttatagccctgtgaagttcttaaagtttagaggctaacttacagaaatgaataagttgttttgttttatagcccggtagaggagttaaccccaaaggtgatatggttttatttcctgttatgtttaacttgataatcttattttggcattcttttcccattgactatatacatctctatttctcaaatgttcatggaactagctcttttattttcctgctggtttcttcagtaatgagttaaataaaacattgacacataca

SEQ ID NO: 1512 - DNA, 2617 bp, Homo sapiens
gcgtccccctcggcgggctgccgccgtgcccgcgccggctccccagcccgagcctgccccttgccctgatgaggtgcaaagagcgggatcggaggcggggcctggccgggctgtgagcggcgtatgcaaatcgagggtctcggggatgcggatccaagaccctgggaaggtcttctttggcaatgtggattcatctgggataaaacacaatatttttaaccctccaattattgctcgatacatccgtttgcacccaactcattatagcattcgcagcactcttcgcatggagttgatgggctgtgatttaaatagttgcagcatgccattgggaatggagagtaaagcaatatcagatgcacagattactgcttcatcctactttaccaatatgtttgccacctggtctccttcaaaagctcgacttcacctccaagggaggagtaatgcctggagacctcaggtgaataatccaaaagagtggctgcaagtggacttccagaagacaatgaaagtcacaggagtaactactcagggagtaaaatctctgcttaccagcatgtatgtgaaggagttcctcatctccagcagtcaagatggccatcagtggactctcttttttcagaatggcaaagtaaaggtttttcagggaaatcaagactccttcacacctgtggtgaactctctagacccaccgttactgactcgctaccttcgaattcacccccagagttgggtgcaccagattgccctgaggatggaggttctgggctgcgaggcacaggacctctactgagggtggccactgcagcacctgccactgccgtcacctctccctcctcagctccagggcagtgtccctccctggcttgccttctacctttgtgctaaatcctagcagacactgccttgaagcctcctgaattaactatcatcagtcctgcatttctttggtggggggccaggagggtgcatccaatttaacttaactcttacctattttctgcagctgctcccagattactccttccttccaatataactaggcaaaaagaagtgaggagaaacctgcatgaaagcattcttccctgaaaagttaggcctctcagagtcaccacttcctctgttgtagaaaaactatgtgatgaaactttgaaaaagatatttatgatgttaacatttcaggttaagcctcatacgtttaaaataaaactctcagttgtttattatcctgatcaagcatggaacaaagcatgtttcaggatcagatcaatacaatcttggagtcaaaaggcaaatcatttggacaatctgcaaaatggagagaatacaataactactacagtaaagtctgtttctgcttccttacacatagatataattatgttatttagtcattatgaggggcacattcttatctccaaaactagcattcttaaactgagaattatagatggggttcaagaatccctaagtcccctgaaattatataaggcattctgtataaatgcaaatgtgcatttttctgacgagtgtccatagatataaagccatttggtcttaattctgaccaataaaaaaataagtcaggaggatgcaattgttgaaagctttgaaataaaataacaatgtcttcttgaaatttgtgatggccaagaaagaaaatgatgatgacattaggcttctaaaggacatacatttaatatttctgtggaaatatgaggaaaatccatggttatctgagataggagatacaaactttgtaattctaataatgcactcagtttactctctccctctactaatttcctgctgaaaataacacaacaaaaatgtaacaggggaaattatataccgtgactgaaaactagagtcctacttacatagttgaaatatcaaggaggtcagaagaaaattggactggtgaaaacagaaaaaacactccagtctgccatatcaccacacaataggatcccccttcttgccctccacccccataagattgtgaagggtttactgctccttccatctgcctgaccccttcactatgactacacagaatctcctgatagtaaagggggctggaggcaaggataagttatagagcagttggaggaagcatccaaagattgcaacccagggcaaatggaaaacaggagatcctaatatgaaagaaaaatggatcccaatctgagaaaaggcaaaagaatggctacttttttctatgctggagtattttctaataatcctgcttgacccttatctgacctctttggaaactataacatagctgtcacagtatagtcacaatccacaaatgatgcaggtgcaaatggtttatagccctgtgaagttcttaaagtttagaggctaacttacagaaatgaataagttgttttgttttatagcccggtagaggagttaaccccaaaggtgatatggttttatttcctgttatgtttaacttgataatcttattttggcattcttttcccattgactatatacatctctatttctcaaatgttcatggaactagctcttttattttcctgctggtttcttcagtaatgagttaaataaaacattgacacatacaaacaaaaaaaaaaaaaaa

SEQ ID NO: 1513 - DNA, 8974 bp, Homo sapiens
cggacgcccggcgagtggcggaaagcgagaccccggcgccgagtgaggtcggccaggctgctgccgacttccccgctggcccctttgttcccctcccggggccctgccggcggcggttcccggttgcccgcgccagagcctcaggccggctccttttgcccttgagaagggttcgctgccaggccttcgagttccgggcgcagctcccgggagagccggcgccctgcctggcccggcggcctcctctcgggcacgaaggcttgctgctgcttctccagaacttcccttcctcgtagacacagcaaagagacttttaaaaaaccatggcagatgtggacccagatacattgctggaatggctacagatgggacagggagatgaaagggacatgcaactaatagcccttgaacagctatgcatgctgcttttgatgtctgacaacgtggatcgttgttttgaaacatgtcctcctcgcactttcttaccagccctttgcaaaatttttcttgatgaaagtgctccagacaatgtattagaggtgacagcccgtgccataacatactacctggatgtatctgcggaatgtacccgaaggattgttggggtagatggagctataaaagcactttgtaatcgtttggttgtagttgaacttaacaacaggactagcagagacttagctgaacagtgtgtaaaggtattagaactgatatgtactcgtgagtcaggagcagtctttgaggctggtggtttgaattgtgtgcttaccttcattcgtgacagtggacatctagttcataaagacaccttgcactctgctatggctgtggtatcaagactctgtggcaaaatggagcctcaagattcttctttagaaatttgtgtagaatctctgtctagtttattaaagcatgaagatcatcaggtttcagatggagctctgcgatgctttgcatcactggctgaccgatttacccgtcgtggtgttgacccagctccattagccaagcatggattaactgaggagctgttatctcgaatggctgctgctggtggtactgtttcaggaccatcatcagcatgcaaaccaggtcgcagcaccacaggagctccatccaccactgcagattccaaattgagtaatcaggtgtcaacaattgtaagtctgctctcaacactttgcagaggctctccggtagtaacacatgatcttctgaggtcggagcttccagattcaattgaaagtgcattgcagggtgatgaaagatgtgtgcttgatactatgcgtttggttgaccttctcttggtgctattatttgaaggacgaaaagctttgccaaagtctagtgctggatctacaggcagaatcccaggactccggagattagatagttctggggagcgctcacatcggcagcttatagattgtattcgaagtaaagataccgatgcacttatagatgcaattgacacaggagcctttgaagtaaattttatggatgatgtaggtcagactctattaaactgggcctctgcttttggaactcaggaaatggtagaatttctttgtgagagaggtgcagatgttaatagaggtcaaaggtcatcatcattacattatgctgcatgttttggaagacctcaagtagcaaagactctgttacggcatggtgcaaatccagatctgagagatgaagatgggaaaactccattagataaagctcgagaaaggggccatagtgaagtggtagctattcttcagtctccaggtgattggatgtgtccagttaataaaggagatgataagaaaaaaaaagatacaaacaaagatgaagaagaatgtaatgagcccaaaggagatccggaaatggcacccatatacttgaaaaggttattgccagtgtttgcacaaacatttcagcaaactatgctgccttcaataaggaaagcaagtcttgctctaattcgaaaaatgattcatttttgctctgaagcactgttacaagaagtttgtgattctgatgttggtcacaatttgcctacaatactagtggaaatcactgcaactgtccttgatcaagaggatgatgatgatggccacttgctagctttgcagatcataagggatatagtagataaaggtggtgatatatacaagcatcagctagccagacttggtgtaataagcaaagtgtcaacgttggcaggtccttcctctgatgatgagaatgaagaggaatcaaaaccagaaaaagaagatgaaccacaggaagatgctcaagaattgcaacaaggtaaaccatatcattggagagactggtcaatcattaggggaagggactgcttatatatttggagtgatgcagcagccttggaattatctaatggcagtaatggatggttcagatttatcttggatggaaaacttgccaccatgtattcaagtggtagtccggaaggtggatctgacagttcagaaagccgaagtgaattcttagagaagttacaaagagctcgaggccaagtaaagccatctacttcaagtcaacctatactgtcagcaccaggacccactaaacttactgtaggaaattggtcactgacatgtttgaaagaaggagaaattgctattcataattcagatggtcagcaagctacaatattgaaagaagatttacctggttttgtatttgaatctaatagaggaaccaaacattcatttactgcagaaacttccctgggttcagaatttgtgactggctggactggcaaaagaggcagaaaactgaaatctaagttagaaaaaacaaagcaaaaggtacgaactatggctcgagatttatacgatgaccattttaaagctgttgaaagcatgcctcgtggagtagtggtgacactcagaaacatagcaactcagttagagtcatcttgggaacttcatacaaatagacaatgtattgaaagtgagaacacttggagagatttaatgaagacagctttaaaaaacctaattgtacttttgaaggatgaaaacacaatttcaccatatgaaatgtgtagcagtggcttggtacaagcacttcttactgtgttaaacaatgtaagtatatttagggctacaaagcaaaaacagaatgaagtcccaaaggtgattttaagtgttttcaagactgcattcactgaaaatgaagatgacgaaagtcgaccagcagttgcgttaattcgaaagttaatagctgtactagaatctattgaacgtctacctctccatttgtatgatacaccaggatccacatataacctccagatacttacaaggagattacgatttcggttggaacgtgcacctggtgaaactgcattgattgacaggactggcagaatgttgaagatggaacctttggctacagttgaatctctggaacagtaccttttgaaaatggtagcaaaacagtggtatgattttgaccgatcttcatttgtttttgttcgaaaattaagagaaggacaaaattttatatttcggcaccagcatgattttgatgaaaatggaatcatttactggattggaacaaatgcaaaaactgcttatgaatgggtaaatccagctgcctatggacttgtagtagtaacgtcatcagaaggaagaaatctaccttatggccgcttagaagacatactaagtcgtgataattcagctttaaattgtcatagcaatgatgataagaatgcctggtttgccatagatctgggtctctgggtgataccatcagcatatacacttcgtcatgctcgtggttatggaaggtctgcactgagaaattgggttttccaggtatccaaagatggacagaactggacttctttgtatacccatgttgatgactgcagtctcaatgaaccagggtcaactgcaacttggcctcttgatccaccaaaggatgagaaacaagggtggagacatgtgagaattaaacagatggggaaaaatgccagtggacaaacacactacctctcattatctggattcgaactttatggcactgtaaatggagtatgtgaagatcagctagggaaagcagctaaagaagcagaagctaatcttagacggcagagacgtctagtacgttcccaggttctgaaatacatggttccaggagctcgtgttatcagaggcctggattggaaatggcgagatcaggatggcagcccacagggagaaggcactgtcacaggagaactacacaatggctggattgatgtcacctgggatgctggtggctcaaactcttaccgtatgggcgcagaaggaaaatttgacctcaagcttgcaccagggtacgaccctgatacagtggcatcacccaaacctgtttcatccactgtttcaggcacaacgcaatcatggagcagcttggtgaaaaacaactgtccagacaagacatctgctgctgcaggctcctcaagtagaaaaggaagcagcagttctgtgtgtagcgtggccagtagcagcgacatcagcttgggttcgaccaaaacggaacggagatcagaaattgtaatggaacacagtatagtttcaggagctgatgtccatgaaccaattgttgttctttcatctgctgaaaacgtccctcaaacagaagtagggtcatcttccagtgcaagcaccagcaccttaacagcggaaacgggaagtgaaaatgctgaaaggaagttaggccctgatagttctgttcgtactcctggggagtctagtgcaatatccatgggaattgtcagtgttagttctcctgatgttagttcagtatctgaattaactaataaagaagcagcttcacaacgacctcttagctcttcagcaagtaacagactgtcagtgagttctttgttggctgctggggcccctatgagctctagtgcaagtgtacctaacctgtcctcaagagaaacatctagcttggagagttttgtaaggagagtggcaaacatagcacggactaatgccacgaacaacatgaatctaagccgaagcagcagtgataacaacactaatactttggggaggaatgtgatgagcacagcaacttctcctcttatgggtgctcagagtttccctaatttgaccacacctggtactacatcaacagtgactatgtcaacatccagtgttactagcagcagcaatgtagctacagcaacaacagttttatcagttggtcaatctttaagtaacactttaaccaccagcctcacatcaacttccagtgagagtgacacaggtcaggaagcagaatattccttatatgatttccttgatagctgccgtgccagtactctattggctgagctcgatgatgatgaggacttacctgagccagatgaagaagatgatgagaatgaagatgacaatcaggaggaccaagaatacgaggaggttatgattctgagacgcccatccctgcaacgtcgagctggctcccgctctgatgtaacgcatcatgctgttacctcgcagctaccacaggtacctgctggagcagggagccgacctattggggagcaggaagaagaagagtacgaaactaaaggaggacgccggagaacatgggatgatgattatgtgctaaagagacagttttctgcattggttcctgcttttgatcctagacctggtcgtactaatgtccagcagacaactgatctagaaataccacccccagggacccctcattcagagctcttggaagaagtcgaatgtactccgtcacctcgattagctctcactttgaaagtaacaggtcttggaacgactcgtgaagttgaattaccactcaccaatttcagatcaaccatcttttactatgtacaaaaattgcttcaattgtcctgtaatggcaatgtgaaatcagataaacttaggcgtatttgggagcccacatacacaatcatgtacagagaaatgaaggattctgataaagaaaaggaaaatggaaaaatgggttgctggtctatagagcatgtggagcagtaccttggcactgatgaattaccaaagaatgacttgataacctacctgcagaagaatgcagacgctgctttcctgcgccactggaaattaactggcactaataaaagtattaggaaaaacagaaattgttctcagctcatagctgcatataaggatttttgtgagcatggaacaaagtctgggttaaaccagggggccatttctactcttcaaagtagtgatattcttaatttaacaaaagaacaacctcaggccaaagcaggcaatggacagaactcttgtggagtagaagatgtccttcagcttctgcgtattctatatatagttgcaagtgacccttattcaagaatatcccaggaagatggtgatgaacagcttcagtttacttttccaccagatgaattcactagcaaaaaaattacaacaaaaatattacagcagattgaggaaccattggcactggcaagtggggctctgccagactggtgtgaacaattaaccagcaaatgtccttttctaataccatttgaaactagacagctttatttcacatgtacagcatttggcgcctcaagagcaatagtatggttacagaaccgacgtgaagccactgtggagcgaacgagaaccacaagcagtgttaggcgagatgaccctggagagtttcgagttggtcgtctcaagcatgaaagagtaaaagttccacgtggcgagtcactgatggaatgggctgagaatgtcatgcaaatacatgcagatcggaaatcagttcttgaggttgaatttttaggagaagaaggaactggcttgggacccacattagagttttatgctctggtggcagcagaattccagagaactgacttgggagcttggctttgtgatgataattttccagatgatgaatctcgtcacgttgatcttggaggtggattgaaacctcctggatattatgtgcagaggtcatgtggactgttcacagcaccatttccacaggatagtgatgagcttgaaaggatcacgaaactgtttcatttccttggaattttcttggccaaatgcattcaagacaatagacttgtggacttacctatttctaaacctttttttaaacttatgtgtatgggtgacattaaaagcaatatgagtaaactgatttatgagtcacgaggtgatagagacttacactgtactgaaagtcagtctgaagcttctacagaagaaggtcatgattcactctcggtaggaagctttgaagaggattcaaaatcagaatttattcttgatccccctaaaccaaaacccccagcttggtttaatggaattttgacttgggaagactttgaattagtaaacccacacagagccagatttttaaaagaaattaaagaccttgctatcaagaggcgccaaattttaagcaacaaaggtctttctgaagatgagaagaacacaaaattacaggaactagtgctgaagaatccatcaggttctgggcctccacttagcatagaggatttaggtttaaatttccagttttgcccttcctcaagaatatatggttttacagctgtggatctcaagccaagtggtgaagatgagatgataacaatggataatgcagaagaatatgtggatttgatgtttgacttttgtatgcatacgggtattcagaaacaaatggaagcctttagagatgggtttaataaagtttttccaatggagaaattaagttccttcagccatgaagaagtccaaatgattctttgtggaaaccagtcaccatcctgggcagcagaggatattatcaattacactgaacctaagctgggttatacacgtgacagccctggtttcctgaggtttgtgagggttttatgtggcatgtcttctgatgaaaggaaagcattcttgcagtttaccactggttgttcaactctacccccaggtggactggctaacctgcatcccaggctcacggttgtacgcaaggttgatgctactgatgcaagctatccatcagtcaatacatgtgtgcattaccttaagttgcctgaatattcttccgaggagatcatgagagagcgcctgctagctgctacaatggagaaaggctttcatctcaattgagctttgaagtgcaatgggagacatcagagactttaaaaatactagtgaagcctcttgtgtttgtgtgcagagaagtatatgatccaccatgctaatgacacttgcctttttttccaccattaaggctttaagaacatgtggaataagttttttagctgctaatgacaaaacaaatcctgtaactacccagccagcaagtatatagcacagaacactgtgttactttacaagggcttatgtgactggaataaggtggtcccacttgactgttccaaagagcagcttctcagatcttcagtgttcactggtaaatttctaacagtgtatttgtgtaaagtttgtcatttcatactccatacactacagttgctgtcactgatccctgttttgctggcttttaagctacttggtcaaaaatcctgcttccttaaaacatagagaattaatgagcatctcaagctttttcttttcctttttaatgatgcctgcactatcaagagtattctagtgttctctctttgtttggcatataatcatgcaccaaactttttatttctttaaggtgggagtatatttttatttcctaaatgccatactatgaagatcaaagtcttaagtgtgtttgcagctcaaaaataaagatgtattaaggggggaaaacctggtctaagtgcaaggcacacttacagcgagttttactttcggttgtattttctttgtatattataaacatttatttaacttgttgccgtttgaagtaaaaaatttccaaaatgtatgctcaacaataatcattaaaatgtttgcagcgt

SEQ ID NO: 1514 - DNA, 3844 bp, Homo sapiens
gggtgtggtgtagggaaaggaatcccgtccctctccaccttttttcgccttcggggcttcagactcagggaactcgctcatggctttcttgatgaagaagaagaaattcaaattccaaactactttcaccctggaggagctgactgcggttcccttcgtgaacggggtcctcttctgcaaggtccggctgctggatggaggggattttgtcagcttgtcgtcaagggaggaggtacaggagaactgtgtgcggtggcgaaagaggttcaccttcgtgtgtaagatgagtgctaacccggccaccggcctgctggacccctgtgtcttccgtgtgtctgtgcgcaaggagctgaaaggcgggaaggcttattccaagctgggcttcgctgacttgaacctggccgagtttgcgggctcgggctccacggtgcgctgctgcctgctcgagggatatgacacgaagaacactcgccaggacaactccatccttaaggtcaccattggtatgttcctgctctctggagatccctgcttcaagacgccaccatcgactgccaagtccatctccatcccaggccaggattcctccctgcagctgacgtgtaagggtggtgggaccagcagtgggggcagcagcaccaactccctgactgggtcccggccccccaaggctcggcccactattctcagctcagggctgccagaggaacccgaccagaacctgtccagccctgaggaggtgttccactctggccactcccgcaactccagctatgccagccagcagtccaagatctccggctacagcacagagcactcgcgctcctccagcctctcagacctgacgcaccgccgcaacacgtccaccagcagcagcgcctctgggggccttggcatgaccgtggagggccctgagggcagtgagcgggagcaccggcccccggagaagccgccgcggccaccccggcccctgcatctgtccgatcgctctttcaggcggaagaaggactcggtggagagccacccgacctgggtggacgacacgcggatcgatgcggatgccatcgtggagaagatcgtgcagagccaggatttcacagatggcagcaacaccgaggacagcaacctccggctgttcgtgagccgcgatggctctgccacgctgagcggcatccagcttgccaccagggtctcttctggggtctacgagccagttgtgattgaaagccattgaggagcaggtgtccgggctggagaagagtcctgctttctctggagtccagacctgtatcattccatgaggaactttccccttcagatcacctctgcgccacatctcatccatgcctcctccatgcactccagtccacactccccgtagcatcattccattgcccctcccatccatgctgggaccctcctggcccaccaaggcccaggcaccactgtgaatattctcctctgaaccactagagggcaggccaggcaggccaggcgggcccgtgcagcttgtgggcaagaaggagctggcaaggaccggcgctgctggagactgacccagccctctggctgaggacatgcagcggctcctaaatgtagagatgcctgtggctgagggggcctctctacctgtgtccccactcactccaggagcactggctttggtcacgtcttagcagcagggccttgctccgttgttcccttgccctggtggtgggggggccagaccacctccggaatcctgccacctgtgactgtctgactgcttagtgcttcagctgtcccttccttgtgtcctgggggacctgctggcggcctcttcctgggagccatgacctcagaccccacccacactccagatcgagacccctgcctccccccggcaaatgtcctcccgctgccttgcagcctgcactttgcacatgctcacccccagcacagtcccactggcccctcacctccccttccctgagctccttcccaaggactcctggtcactgcctgctgtgcagtcagaggcccagggtccagcagcccggcgggaacgggtgctgcctcttcctccagttagctccagctcaggtctgagacccgtgctgagaaaggtctgagcaccgaccgtgccctctgcccagggctgggtcctgagcagctggttttcctgcaggaaggttggagcaagcaaagtccttctctgccctcagggtcagctgcccagactggggcggatgccagagaggcaggtgggctgtggctggactggtccggagctggcttccttaccagaaaagcctcagccttcctctggaagcatcccccgttctgggcaagggggaagggctcctttaaggggtgtgctttcccagtggggagcagtctggccctgccccctactaaagcctctgctctcagcactttcccccaagtccttgtaacttgcttgaaggtgggttctggctgccagccagtccctggacaaactctcctgccccttttaaatttcactcattttgtataaacccagcaggctggtgtttacttagccctgtagcttttttcattttttctttccgtctttcttcttgagttcacggttcaatattgcctcctcgccctggtgaggggaggtgctgcttttctgccccacctgccggctggttccagcagcgctggggcccagctggggggccgggatgggggcttctctctctgggaggggtgcaggtgccctccccaggctgggagggttccttccctagctccccatctgcccccgctggtgagagttgggcttcttggtcttggaactccctggcattgggaacagagcatttccagcatttgttgttgttttactcacctaacccttagaaaatgaatgttagaaggtgcctgccgaggcgggacagagtgttcgctcgcgctggagaaggctctgctcagccctgagagtcccttcctgccccaccgatactggcactttaaaaaggaagctgaccgcacagtgtccagacgaattggcccccagaagatggggagttctgtcctgcccttctgtgtctgcgtgacctcacccagcctaggagggaggtgcattcagggtagatttgcctctcattcaaagttctggggctttgggtggaaaacagccagctttggcgctgttggggagactcctccagaccaggaaccccagaaggagacagagcctgccacatcctcccacgccaggccctgggccagggtgattggactgagaatttggccacaaccaaattgatgctggctggaaccagaggccagaaagcctggccttgtccccatgtgggagccctgtcctcagccctcttgtccccttgagctcagtgaattcccaccaggtgcccacagctcctggacttcaaattctatatattgagagagttggagagtatatcagagatatttttggaaaggagttggtctatgcaatgtcagtttggaatcttcttgaaagtttaatgtttttattaggagatttaaagaaaataaaggtctacaatatctttaggttttttttttttcctgtttaccgcacaaactgaccacatggcatgtctatcaggatggagggtgtccatgttctcctctgtctttagggaggtgataaggagatgggcggaggggtgtttttttctttgactcccctcctttctaacagaatgttgccaccactgcttgagtgggctgtgtttgttcctctgtcccagcttctgttgtagaaaataacattgttaggggaactcaggctagtgtcagcgtcttggtttggggagaaaaaattaaatgtttcggtttttgtttc

SEQ ID NO: 1515 - DNA, 3643 bp, Homo sapiens
cccggggcctctgtccttgggtcccagttatgcaacagtcagtcgaggctgtggggctggcccaggggctttatctgtctccctctccaacttttgccaagttacccttctgggcttccgccagccaggagcccacactccctcagccctcccacacgctcctctcacctcctagctgggcttcgctgacttgaacctggccgagtttgcgggctcgggctccacggtgcgctgctgcctgctcgagggatatgacacgaagaacactcgccaggacaactccatccttaaggtcaccattggtatgttcctgctctctggagatccctgcttcaagacgccaccatcgactgccaagtccatctccatcccaggccaggattcctccctgcagctgacgtgtaagggtggtgggaccagcagtgggggcagcagcaccaactccctgactgggtcccggccccccaaggctcggcccactattctcagctcagggctgccagaggaacccgaccagaacctgtccagccctgaggaggtgttccactctggccactcccgcaactccagctatgccagccagcagtccaagatctccggctacagcacagagcactcgcgctcctccagcctctcagacctgacgcaccgccgcaacacgtccaccagcagcagcgcctctgggggccttggcatgaccgtggagggccctgagggcagtgagcgggagcaccggcccccggagaagccgccgcggccaccccggcccctgcatctgtccgatcgctctttcaggcggaagaaggactcggtggagagccacccgacctgggtggacgacacgcggatcgatgcggatgccatcgtggagaagatcgtgcagagccaggatttcacagatggcagcaacaccgaggacagcaacctccggctgttcgtgagccgcgatggctctgccacgctgagcggcatccagcttgccaccagggtctcttctggggtctacgagccagttgtgattgaaagccattgaggagcaggtgtccgggctggagaagagtcctgctttctctggagtccagacctgtatcattccatgaggaactttccccttcagatcacctctgcgccacatctcatccatgcctcctccatgcactccagtccacactccccgtagcatcattccattgcccctcccatccatgctgggaccctcctggcccaccaaggcccaggcaccactgtgaatattctcctctgaaccactagagggcaggccaggcaggccaggcgggcccgtgcagcttgtgggcaagaaggagctggcaaggaccggcgctgctggagactgacccagccctctggctgaggacatgcagcggctcctaaatgtagagatgcctgtggctgagggggcctctctacctgtgtccccactcactccaggagcactggctttggtcacgtcttagcagcagggccttgctccgttgttcccttgccctggtggtgggggggccagaccacctccggaatcctgccacctgtgactgtctgactgcttagtgcttcagctgtcccttccttgtgtcctgggggacctgctggcggcctcttcctgggagccatgacctcagaccccacccacactccagatcgagacccctgcctccccccggcaaatgtcctcccgctgccttgcagcctgcactttgcacatgctcacccccagcacagtcccactggcccctcacctccccttccctgagctccttcccaaggactcctggtcactgcctgctgtgcagtcagaggcccagggtccagcagcccggcgggaacgggtgctgcctcttcctccagttagctccagctcaggtctgagacccgtgctgagaaaggtctgagcaccgaccgtgccctctgcccagggctgggtcctgagcagctggttttcctgcaggaaggttggagcaagcaaagtccttctctgccctcagggtcagctgcccagactggggcggatgccagagaggcaggtgggctgtggctggactggtccggagctggcttccttaccagaaaagcctcagccttcctctggaagcatcccccgttctgggcaagggggaagggctcctttaaggggtgtgctttcccagtggggagcagtctggccctgccccctactaaagcctctgctctcagcactttcccccaagtccttgtaacttgcttgaaggtgggttctggctgccagccagtccctggacaaactctcctgccccttttaaatttcactcattttgtataaacccagcaggctggtgtttacttagccctgtagcttttttcattttttctttccgtctttcttcttgagttcacggttcaatattgcctcctcgccctggtgaggggaggtgctgcttttctgccccacctgccggctggttccagcagcgctggggcccagctggggggccgggatgggggcttctctctctgggaggggtgcaggtgccctccccaggctgggagggttccttccctagctccccatctgcccccgctggtgagagttgggcttcttggtcttggaactccctggcattgggaacagagcatttccagcatttgttgttgttttactcacctaacccttagaaaatgaatgttagaaggtgcctgccgaggcgggacagagtgttcgctcgcgctggagaaggctctgctcagccctgagagtcccttcctgccccaccgatactggcactttaaaaaggaagctgaccgcacagtgtccagacgaattggcccccagaagatggggagttctgtcctgcccttctgtgtctgcgtgacctcacccagcctaggagggaggtgcattcagggtagatttgcctctcattcaaagttctggggctttgggtggaaaacagccagctttggcgctgttggggagactcctccagaccaggaaccccagaaggagacagagcctgccacatcctcccacgccaggccctgggccagggtgattggactgagaatttggccacaaccaaattgatgctggctggaaccagaggccagaaagcctggccttgtccccatgtgggagccctgtcctcagccctcttgtccccttgagctcagtgaattcccaccaggtgcccacagctcctggacttcaaattctatatattgagagagttggagagtatatcagagatatttttggaaaggagttggtctatgcaatgtcagtttggaatcttcttgaaagtttaatgtttttattaggagatttaaagaaaataaaggtctacaatatctttaggttttttttttttcctgtttaccgcacaaactgaccacatggcatgtctatcaggatggagggtgtccatgttctcctctgtctttagggaggtgataaggagatgggcggaggggtgtttttttctttgactcccctcctttctaacagaatgttgccaccactgcttgagtgggctgtgtttgttcctctgtcccagcttctgttgtagaaaataacattgttaggggaactcaggctagtgtcagcgtcttggtttggggagaaaaaattaaatgtttcggtttttgtttc

SEQ ID NO: 1516 - DNA, 717 bp, Homo sapiens
ccgggccgaagtccggtggatgaagggcggaagtagagtgtctaatcctgcagtcatggcgcaggaagaggaagatgttagagattacaatttgactgaagaacagaaggcgatcaaggccaagtatccgccagtcaataggaagtacgagtatttggatcatacagcagatgtccagttacacgcatggggagatactctggaggaagcatttgagcaatgtgcaatggccatgtttggttacatgacagatactgggacagtggagcccctccaaacagtagaagtagaaacccaaggagatgacttacagtctcttctgtttcactttttggatgaatggctttataagttcagtgctgatgaattcttcataccccgggaagtgaaagtacttagcattgatcaaagaaatttcaaattacgatcaattgggtggggagaagaattttcattgtccaagcaccctcagggaacagaagtcaaagcaataacatattcagcaatgcaggtctataatgaagagaacccggaagtttttgtgatcattgacatttaagacaccaaaaaataaaagactcctacgaagaactgtttttgttttcctcttccttttgagaagacactatgaattaaattctacagcttttttttgatatatggaaatttgtagaacagaaatattttagttaaagtgtgactttcagaaagggaaaa

SEQ ID NO: 1517 - DNA, 5312 bp, Homo sapiens
ggccgcggcggcggaggcagcagcggcggcggcagtggcggcggcgaaggtggcggcggctcggccagtactcccggcccccgccatttcggactgggagcgagcgcggcgcaggcactgaaggcggcggcggggccagaggctcagcggctcccaggtgcgggagagaggcctgctgaaaatgactgaatataaacttgtggtagttggagctggtggcgtaggcaagagtgccttgacgatacagctaattcagaatcattttgtggacgaatatgatccaacaatagaggattcctacaggaagcaagtagtaattgatggagaaacctgtctcttggatattctcgacacagcaggtcaagaggagtacagtgcaatgagggaccagtacatgaggactggggagggctttctttgtgtatttgccataaataatactaaatcatttgaagatattcaccattatagagaacaaattaaaagagttaaggactctgaagatgtacctatggtcctagtaggaaataaatgtgatttgccttctagaacagtagacacaaaacaggctcaggacttagcaagaagttatggaattccttttattgaaacatcagcaaagacaagacagggtgttgatgatgccttctatacattagttcgagaaattcgaaaacataaagaaaagatgagcaaagatggtaaaaagaagaaaaagaagtcaaagacaaagtgtgtaattatgtaaatacaatttgtacttttttcttaaggcatactagtacaagtggtaatttttgtacattacactaaattattagcatttgttttagcattacctaatttttttcctgctccatgcagactgttagcttttaccttaaatgcttattttaaaatgacagtggaagtttttttttcctctaagtgccagtattcccagagttttggtttttgaactagcaatgcctgtgaaaaagaaactgaatacctaagatttctgtcttggggtttttggtgcatgcagttgattacttcttatttttcttaccaattgtgaatgttggtgtgaaacaaattaatgaagcttttgaatcatccctattctgtgttttatctagtcacataaatggattaattactaatttcagttgagaccttctaattggtttttactgaaacattgagggaacacaaatttatgggcttcctgatgatgattcttctaggcatcatgtcctatagtttgtcatccctgatgaatgtaaagttacactgttcacaaaggttttgtctcctttccactgctattagtcatggtcactctccccaaaatattatattttttctataaaaagaaaaaaatggaaaaaaattacaaggcaatggaaactattataaggccatttccttttcacattagataaattactataaagactcctaatagcttttcctgttaaggcagacccagtatgaaatggggattattatagcaaccattttggggctatatttacatgctactaaatttttataataattgaaaagattttaacaagtataaaaaattctcataggaattaaatgtagtctccctgtgtcagactgctctttcatagtataactttaaatcttttcttcaacttgagtctttgaagatagttttaattctgcttgtgacattaaaagattatttgggccagttatagcttattaggtgttgaagagaccaaggttgcaaggccaggccctgtgtgaacctttgagctttcatagagagtttcacagcatggactgtgtccccacggtcatccagtgttgtcatgcattggttagtcaaaatggggagggactagggcagtttggatagctcaacaagatacaatctcactctgtggtggtcctgctgacaaatcaagagcattgcttttgtttcttaagaaaacaaactcttttttaaaaattacttttaaatattaactcaaaagttgagattttggggtggtggtgtgccaagacattaattttttttttaaacaatgaagtgaaaaagttttacaatctctaggtttggctagttctcttaacactggttaaattaacattgcataaacacttttcaagtctgatccatatttaataatgctttaaaataaaaataaaaacaatccttttgataaatttaaaatgttacttattttaaaataaatgaagtgagatggcatggtgaggtgaaagtatcactggactaggaagaaggtgacttaggttctagataggtgtcttttaggactctgattttgaggacatcacttactatccatttcttcatgttaaaagaagtcatctcaaactcttagttttttttttttacaactatgtaatttatattccatttacataaggatacacttatttgtcaagctcagcacaatctgtaaatttttaacctatgttacaccatcttcagtgccagtcttgggcaaaattgtgcaagaggtgaagtttatatttgaatatccattctcgttttaggactcttcttccatattagtgtcatcttgcctccctaccttccacatgccccatgacttgatgcagttttaatacttgtaattcccctaaccataagatttactgctgctgtggatatctccatgaagttttcccactgagtcacatcagaaatgccctacatcttatttcctcagggctcaagagaatctgacagataccataaagggatttgacctaatcactaattttcaggtggtggctgatgctttgaacatctctttgctgcccaatccattagcgacagtaggatttttcaaacctggtatgaatagacagaaccctatccagtggaaggagaatttaataaagatagtgctgaaagaattccttaggtaatctataactaggactactcctggtaacagtaatacattccattgttttagtaaccagaaatcttcatgcaatgaaaaatactttaattcatgaagcttactttttttttttggtgtcagagtctcgctcttgtcacccaggctggaatgcagtggcgccatctcagctcactgcaacctccatctcccaggttcaagcgattctcgtgcctcggcctcctgagtagctgggattacaggcgtgtgccactacactcaactaatttttgtatttttaggagagacggggtttcaccctgttggccaggctggtctcgaactcctgacctcaagtgattcacccaccttggcctcataaacctgttttgcagaactcatttattcagcaaatatttattgagtgcctaccagatgccagtcaccgcacaaggcactgggtatatggtatccccaaacaagagacataatcccggtccttaggtagtgctagtgtggtctgtaatatcttactaaggcctttggtatacgacccagagataacacgatgcgtattttagttttgcaaagaaggggtttggtctctgtgccagctctataattgttttgctacgattccactgaaactcttcgatcaagctactttatgtaaatcacttcattgttttaaaggaataaacttgattatattgtttttttatttggcataactgtgattcttttaggacaattactgtacacattaaggtgtatgtcagatattcatattgacccaaatgtgtaatattccagttttctctgcataagtaattaaaatatacttaaaaattaatagttttatctgggtacaaataaacaggtgcctgaactagttcacagacaaggaaacttctatgtaaaaatcactatgatttctgaattgctatgtgaaactacagatctttggaacactgtttaggtagggtgttaagacttacacagtacctcgtttctacacagagaaagaaatggccatacttcaggaactgcagtgcttatgaggggatatttaggcctcttgaatttttgatgtagatgggcatttttttaaggtagtggttaattacctttatgtgaactttgaatggtttaacaaaagatttgtttttgtagagattttaaagggggagaattctagaaataaatgttacctaattattacagccttaaagacaaaaatccttgttgaagtttttttaaaaaaagctaaattacatagacttaggcattaacatgtttgtggaagaatatagcagacgtatattgtatcatttgagtgaatgttcccaagtaggcattctaggctctatttaactgagtcacactgcataggaatttagaacctaacttttataggttatcaaaactgttgtcaccattgcacaattttgtcctaatatatacatagaaactttgtggggcatgttaagttacagtttgcacaagttcatctcatttgtattccattgattttttttttcttctaaacattttttcttcaaacagtatataactttttttaggggatttttttttagacagcaaaaactatctgaagatttccatttgtcaaaaagtaatgatttcttgataattgtgtagtaatgttttttagaacccagcagttaccttaaagctgaatttatatttagtaacttctgtgttaatactggatagcatgaattctgcattgagaaactgaatagctgtcataaaatgaaactttctttctaaagaaagatactcacatgagttcttgaagaatagtcataactagattaagatctgtgttttagtttaatagtttgaagtgcctgtttgggataatgataggtaatttagatgaatttaggggaaaaaaaagttatctgcagatatgttgagggcccatctctccccccacacccccacagagctaactgggttacagtgttttatccgaaagtttccaattccactgtcttgtgttttcatgttgaaaatacttttgcatttttcctttgagtgccaatttcttactagtactatttcttaatgtaacatgtttacctggaatgtattttaactatttttgtatagtgtaaactgaaacatgcacattttgtacattgtgctttcttttgtgggacatatgcagtgtgatccagttgttttccatcatttggttgcgctgacctaggaatgttggtcatatcaaacattaaaaatgaccactcttttaattgaaattaacttttaaatgtttataggagtatgtgctgtgaagtgatctaaaatttgtaatatttttgtcatgaactgtactactcctaattattgtaatgtaataaaaatagttacagtgacaaaaaaaaaaaaaaa

SEQ ID NO: 1518 - DNA, 5436 bp, Homo sapiens
ggccgcggcggcggaggcagcagcggcggcggcagtggcggcggcgaaggtggcggcggctcggccagtactcccggcccccgccatttcggactgggagcgagcgcggcgcaggcactgaaggcggcggcggggccagaggctcagcggctcccaggtgcgggagagaggcctgctgaaaatgactgaatataaacttgtggtagttggagctggtggcgtaggcaagagtgccttgacgatacagctaattcagaatcattttgtggacgaatatgatccaacaatagaggattcctacaggaagcaagtagtaattgatggagaaacctgtctcttggatattctcgacacagcaggtcaagaggagtacagtgcaatgagggaccagtacatgaggactggggagggctttctttgtgtatttgccataaataatactaaatcatttgaagatattcaccattatagagaacaaattaaaagagttaaggactctgaagatgtacctatggtcctagtaggaaataaatgtgatttgccttctagaacagtagacacaaaacaggctcaggacttagcaagaagttatggaattccttttattgaaacatcagcaaagacaagacagagagtggaggatgctttttatacattggtgagggagatccgacaatacagattgaaaaaaatcagcaaagaagaaaagactcctggctgtgtgaaaattaaaaaatgcattataatgtaatctgggtgttgatgatgccttctatacattagttcgagaaattcgaaaacataaagaaaagatgagcaaagatggtaaaaagaagaaaaagaagtcaaagacaaagtgtgtaattatgtaaatacaatttgtacttttttcttaaggcatactagtacaagtggtaatttttgtacattacactaaattattagcatttgttttagcattacctaatttttttcctgctccatgcagactgttagcttttaccttaaatgcttattttaaaatgacagtggaagtttttttttcctctaagtgccagtattcccagagttttggtttttgaactagcaatgcctgtgaaaaagaaactgaatacctaagatttctgtcttggggtttttggtgcatgcagttgattacttcttatttttcttaccaattgtgaatgttggtgtgaaacaaattaatgaagcttttgaatcatccctattctgtgttttatctagtcacataaatggattaattactaatttcagttgagaccttctaattggtttttactgaaacattgagggaacacaaatttatgggcttcctgatgatgattcttctaggcatcatgtcctatagtttgtcatccctgatgaatgtaaagttacactgttcacaaaggttttgtctcctttccactgctattagtcatggtcactctccccaaaatattatattttttctataaaaagaaaaaaatggaaaaaaattacaaggcaatggaaactattataaggccatttccttttcacattagataaattactataaagactcctaatagcttttcctgttaaggcagacccagtatgaaatggggattattatagcaaccattttggggctatatttacatgctactaaatttttataataattgaaaagattttaacaagtataaaaaattctcataggaattaaatgtagtctccctgtgtcagactgctctttcatagtataactttaaatcttttcttcaacttgagtctttgaagatagttttaattctgcttgtgacattaaaagattatttgggccagttatagcttattaggtgttgaagagaccaaggttgcaaggccaggccctgtgtgaacctttgagctttcatagagagtttcacagcatggactgtgtccccacggtcatccagtgttgtcatgcattggttagtcaaaatggggagggactagggcagtttggatagctcaacaagatacaatctcactctgtggtggtcctgctgacaaatcaagagcattgcttttgtttcttaagaaaacaaactcttttttaaaaattacttttaaatattaactcaaaagttgagattttggggtggtggtgtgccaagacattaattttttttttaaacaatgaagtgaaaaagttttacaatctctaggtttggctagttctcttaacactggttaaattaacattgcataaacacttttcaagtctgatccatatttaataatgctttaaaataaaaataaaaacaatccttttgataaatttaaaatgttacttattttaaaataaatgaagtgagatggcatggtgaggtgaaagtatcactggactaggaagaaggtgacttaggttctagataggtgtcttttaggactctgattttgaggacatcacttactatccatttcttcatgttaaaagaagtcatctcaaactcttagttttttttttttacaactatgtaatttatattccatttacataaggatacacttatttgtcaagctcagcacaatctgtaaatttttaacctatgttacaccatcttcagtgccagtcttgggcaaaattgtgcaagaggtgaagtttatatttgaatatccattctcgttttaggactcttcttccatattagtgtcatcttgcctccctaccttccacatgccccatgacttgatgcagttttaatacttgtaattcccctaaccataagatttactgctgctgtggatatctccatgaagttttcccactgagtcacatcagaaatgccctacatcttatttcctcagggctcaagagaatctgacagataccataaagggatttgacctaatcactaattttcaggtggtggctgatgctttgaacatctctttgctgcccaatccattagcgacagtaggatttttcaaacctggtatgaatagacagaaccctatccagtggaaggagaatttaataaagatagtgctgaaagaattccttaggtaatctataactaggactactcctggtaacagtaatacattccattgttttagtaaccagaaatcttcatgcaatgaaaaatactttaattcatgaagcttactttttttttttggtgtcagagtctcgctcttgtcacccaggctggaatgcagtggcgccatctcagctcactgcaacctccatctcccaggttcaagcgattctcgtgcctcggcctcctgagtagctgggattacaggcgtgtgccactacactcaactaatttttgtatttttaggagagacggggtttcaccctgttggccaggctggtctcgaactcctgacctcaagtgattcacccaccttggcctcataaacctgttttgcagaactcatttattcagcaaatatttattgagtgcctaccagatgccagtcaccgcacaaggcactgggtatatggtatccccaaacaagagacataatcccggtccttaggtagtgctagtgtggtctgtaatatcttactaaggcctttggtatacgacccagagataacacgatgcgtattttagttttgcaaagaaggggtttggtctctgtgccagctctataattgttttgctacgattccactgaaactcttcgatcaagctactttatgtaaatcacttcattgttttaaaggaataaacttgattatattgtttttttatttggcataactgtgattcttttaggacaattactgtacacattaaggtgtatgtcagatattcatattgacccaaatgtgtaatattccagttttctctgcataagtaattaaaatatacttaaaaattaatagttttatctgggtacaaataaacaggtgcctgaactagttcacagacaaggaaacttctatgtaaaaatcactatgatttctgaattgctatgtgaaactacagatctttggaacactgtttaggtagggtgttaagacttacacagtacctcgtttctacacagagaaagaaatggccatacttcaggaactgcagtgcttatgaggggatatttaggcctcttgaatttttgatgtagatgggcatttttttaaggtagtggttaattacctttatgtgaactttgaatggtttaacaaaagatttgtttttgtagagattttaaagggggagaattctagaaataaatgttacctaattattacagccttaaagacaaaaatccttgttgaagtttttttaaaaaaagctaaattacatagacttaggcattaacatgtttgtggaagaatatagcagacgtatattgtatcatttgagtgaatgttcccaagtaggcattctaggctctatttaactgagtcacactgcataggaatttagaacctaacttttataggttatcaaaactgttgtcaccattgcacaattttgtcctaatatatacatagaaactttgtggggcatgttaagttacagtttgcacaagttcatctcatttgtattccattgattttttttttcttctaaacattttttcttcaaacagtatataactttttttaggggatttttttttagacagcaaaaactatctgaagatttccatttgtcaaaaagtaatgatttcttgataattgtgtagtaatgttttttagaacccagcagttaccttaaagctgaatttatatttagtaacttctgtgttaatactggatagcatgaattctgcattgagaaactgaatagctgtcataaaatgaaactttctttctaaagaaagatactcacatgagttcttgaagaatagtcataactagattaagatctgtgttttagtttaatagtttgaagtgcctgtttgggataatgataggtaatttagatgaatttaggggaaaaaaaagttatctgcagatatgttgagggcccatctctccccccacacccccacagagctaactgggttacagtgttttatccgaaagtttccaattccactgtcttgtgttttcatgttgaaaatacttttgcatttttcctttgagtgccaatttcttactagtactatttcttaatgtaacatgtttacctggaatgtattttaactatttttgtatagtgtaaactgaaacatgcacattttgtacattgtgctttcttttgtgggacatatgcagtgtgatccagttgttttccatcatttggttgcgctgacctaggaatgttggtcatatcaaacattaaaaatgaccactcttttaattgaaattaacttttaaatgtttataggagtatgtgctgtgaagtgatctaaaatttgtaatatttttgtcatgaactgtactactcctaattattgtaatgtaataaaaatagttacagtgacaaaaaaaaaaaaaaa

SEQ ID NO: 1519 - DNA, 2728 bp, Homo sapiens
atcttggcttcccggggaaaggcggcgtgaggggaagaagttgtagggtgggggcaggagtgaggaggagggaagagagagggggaggaggccgcggcggggcagggcggggactgcctgcctgcctgggttgcggaagtgatagccgccgaccgagcctgctgctttcttgctactgcttcggcttcccggctaccccccggacggtgaaggcggcccagctgtggatggtcagatagcccttgtctcccgccgccaatctctggcccctagcagcacggagcagacggcggcagcagcagcagcaggcgaggaggaagatggcgggacggctgccggcctgtgtggtggactgtggcacggggtatacaaaactaggatatgctggaaatacagaaccacagtttatcatcccttcctgtattgctattaaggagtcagcaaaagtgggtgatcaagctcaaaggagggtgatgaaaggtgttgatgacctagacttcttcattggtgatgaagcaatagaaaaacctacatatgcaacaaagtggccaatccgccatggtatagttgaagattgggacttaatggaaaggtttatggagcaagtgatctttaaatatttaagggcagaacctgaagaccattattttcttttgactgaacctccattgaatactccagaaaacagggaatatactgctgaaataatgtttgagtccttcaatgttccaggcttgtacattgctgtgcaggctgttcttgccttagctgcatcttggacctcaagacaagtaggagaacggacgttgaccggtacggtaatagacagtggagatggtgtcactcatgtcattcctgtggctgaagggtatgtgattggcagctgtattaaacacattccaatcgcaggacgagatataacatattttattcagcaactgctgagagaccgagaagtaggaatccctccagaacaatccttggaaactgctaaggcagtaaaggagcgctatagttatgtctgcccagatttagtaaaagaatttaacaagtatgatacagatgggtcaaaatggattaaacagtatactggaatcaatgctatctcaaagaaagagttttctatcgatgttggttatgagagatttttgggacctgaaatcttttttcatccagagtttgctaatccagactttacacaacctatctcagaagttgtagatgaagtaattcagaattgtcctattgatgtcagacgtcctctctacaagaatattgtcctctctggaggttcaaccatgttcagggactttggacgtcgcttgcaaagagatttgaaaagaactgtagatgcccggctgaaattaagtgaggaattgagtggtggtagattgaagccaaaacctattgatgtacaagtcattacacaccacatgcagcgatatgcagtttggtttggaggatcaatgctggcttccacgcctgagttctaccaagtatgccacaccaaaaaggattatgaagaaattggacctagcatttgtcgtcacaatccagtgtttggagtcatgtcgtaaaattggcttcatagttattggggttagggaggtggggaagagataatctttctgattacctgttttgtctggatggctggttttgaggttttaaacctgacttgaaatagtaacaccaaacatgattatacaggaatattttaataagtgtatcaccatgcagatgtagaagagagcgaaagtgattgtgtttttctttagattgaatatttgaatcttatgtgtaacaaaaagaagtgggttttagttctttctgtgccctgatattttgtatattaatgaattatccaagattcgatgggatttatcagtgtgtagatagctctataatgcttgaattgtacacttctaagtgtgcagtgcaagagcttgtttatatttcatactttttatactttgaggaaaaaaagtcaaagaaaaattgtatttgagggaaaaaaccatgaccaagtaaaggataaattcaaaaaatagcctcatgagacttggcatacacactcgtgggattccagttattatggagtgcttccatccctctccaccccttccccccaaaaggttttctttgcaagtgcttttggaactaagagctagtatcttggattaactgatgcctgctagtgctttctgattactcgcattctgtttcttgctttaaaagaagagtaaagacaagagtgttggaccagtattgcagttctgtagtgtcatttcttataaaaaacaaaacaacaacaataatttatcaaaattggcatatttaaagcctaacattctaataaaggcacaaatttctttttaatacttgtttcagcctctttaatctctttataagttaactaataaatctattttcttcagacttctgcaatagttctttaaaatcacaacagttagcaagctgacttttgtaatgtgctcaatacaaatacttgtgaacttttaatatgttgagtgctttcattttgataactggatctccatttgatattttcatttgtataactcatttgcagtctgaaaattttttttagtgccagtccctgaacatatcattgaaagttaattttctttgcattttaaaatatctggattatgaagaaaaagtgatgaaaataaattaaaactgaattacaaaaaaaaaaaaaaaa

SEQ ID NO: 1520 - DNA, 4333 bp, Homo sapiens
ggcttcctccagttccggagtccagtggctgaccgccttgctggagcggagatgcagccgccgccccgaaaagtgaagccggcccaggaggtgaagcttcgcttcctggaacagctgagcatccttcagacctggcagcagagggaggcggatctgctggaggacatcagatcctacagcaagcagagggcagccattgaacgggagtatgggcaggcactccagaaactggctggcccattcctgaagagggaagggcaccggagcggtgagatggacagcaggggcaggacagtgttcggtgcctggcgctgcctgctggatgccaccgtggctgggggccaaacccgactccaggcgtctgaccgataccgtgacctagcagggggtacagggcggagcgccaaggagcaggtgcttaggaagggaacagagaacctccagagggcgcaggctgaggtgctgcagtctgtccgggagctgagccgaagtcggaagctgtatgggcagcgggaacgtgtgtgggccttggcacaggagaaggcggctgatgtccaggccaggctaaaccgaagtgaccatgggatcttccactctcggaccagtctccagaaactgagcaccaagctgtccgcccagtcagcccagtactcccagcagctgcaagcagcccgcaatgagtacctgcttaacttggtggctaccaatgcccacctcgaccattactaccaggaggaactgccagctctgctcaaggccctggtcagtgagctgtcagagcacttgagggaccccctgacctccctgagccacactgagctggaagccgcagaggtcatcctggagcatgcccaccgcggggagcagacaacctcccaggtaagctgggagcaagacctgaagctgtttcttcaggagcctggtgtattttcccccaccccacctcagcagtttcagccagcagggactgatcaggtgtgtgtcctggagtggggagcagaaggcgtggctggcaagagtggcctggagaaagaggttcagcgcttgaccagccgagctgcccgtgactacaagatccagaaccatgggcatcgggtactgcaacgactggagcagaggcggcagcaggcttcagagcgggaggctccaagcatagaacagaggttacaggaagtgcgagagagcatccgccgggcacaggtgagccaggtgaagggggctgcccggctggccctgctgcagggggctggcttagatgtggagcgctggctgaagccagccatgacccaggcccaggatgaggtggagcaggagcggcggctcagtgaggctcggctgtcccagagggacctctctccaaccgctgaggatgctgagctttctgactttgaggaatgtgaggagacgggagagctctttgaggagcctgccccccaagccctggccacgagggccctcccctgccctgcacacgtggtatttcgctatcaggcagggcgtgaggatgagctgacaatcacggagggtgagtggctggaggtcatagaggagggagatgctgacgaatgggtcaaggctcggaaccagcacggcgaggtaggctttgtccctgagcgatatctcaacttcccggacctctccctcccagagagcagccaagacagtgacaatccctgcggggcagagcccacagcattcctggcacaggccctgtacagctacaccggacagagtgcagaggagctgagcttccctgagggggcactcatccgtctgctgccccgggcccaagatggagtagatgacggcttctggaggggagaatttgggggccgtgttggggtcttcccctccctgctggtggaagagctgcttggccccccagggccacctgaactctctgaccctgaacagatgctgccgtccccttctcctcccagcttctccccacctgcacctacctctgtgttggatgggccccctgcacctgtcctgcctggggacaaagccctggacttccctgggttcctggacatgatggcacctcgactcaggccgatgcgtccaccacctcccccgccggctaaagccccggatcctggccacccagatcccctcacctgaaggccagggaagccttgacccccagtgatgctgctgtccctatcttcaagctgtcagaccacaccatcaatgatccagagcaacacagccaaaagctggaatcgcccttatttccaccctcacctccaagggtggaaacttgccccttcccatttctagagctggaacccactcctttttttcccattgttctatcatctctaggaccggaactaccttctcttctgtcatgaccctatctagggtggtgaaatgcctgaaatctctggggctggaaaccatccatcaaggtctctagtagttctggcccacctctttccccaccctggctccatgacccaccccactctggatgccagggtcactggggttgggctggggagaggaacaggccttgggaatcaggagctggagccaggatgcgaagcagctgtaatggtctgagcggatttattgacaatgaataaagggcacgaaggccaggccagggcctgggcctcttgtgctaagagggcagggggcctacggtgctattgctttaggggcccaccacgggcaggggcctgctcccagctgccacgctctatcatatggagcgaggtgttggggaaggcggggcaggcagcctgttgcaggcaggggaaggagaagagactgaggggctgtgacctctcctgaggcccccagcctgagactgtgcaactccaggtggaagtagagctggtccctcagctggggggcagtgctgtccagtggaggggagggctttcacgcccacccaccccctggccctgccagctggtagtccatcagcacaatgaaggagacttggagaagaggaagaataacactgttgcttcctgttcaagctgtgtccagcttttcccctggggctccaggaccttccctacctccaccaccaaaccaagggatttatagcaaaggctaagcctgcagtttactcggggggttcagggagccgaaaggcttaaatagtttaagtaggtgatgggaagatgagattacctcatttagggctcaggcagactcacctcacatactccctgctccctgtggtagagacacctgagagaaaggggaggggtcaacaatgagagaccaggagtaggtcctatcagtgccccccagagtagagagcaataagagcccagcccagtgcagtcccggctgtgttttcctacctggtgatcagaagtgtctggtttgcttggctgcccatttgcctcttgagtgggcagccctgggcttgggcccctccctccggccctcagtgttggctctgcagaagctctggggttcccttcaagtgcacgaggggttaggctgctgtccctgagtcctccattctgtactggggggctggctaggacctggggctgtggcctctcagggggcagcctctccatggcaggcatccctgccttgggctgccctcccccagacccctgaccaccccctgggtcctgtcccccaccagagccccagctcctgtctgtgggggagccatcacggtgttcgtgcagtccatagcgcttctcaatgtgtgtcacccggaacctgggaggggagggaacactggggtttaggaccacaactcagaggctgcttggccctcccctctgaccagggacatcctgagtttggtggctacttccctctggcctaaggtaggggaggccttctcagattgtggggcacattgtgtagcctgacttctgccggagctcccagtccaggaggaaagagccaaggcccacttttgggatcaggtgcctgatcactgggccccctacctcagccccgctttccctggagcacctgccccacctgcccacagagaacacagtggtctcccctgtccgggggcggctttttccttccttggagcgtccctgacggacaagtggaggcctcttgctgcggctgcaatggaggcaaggtgctgcagagcccaggtgcactgtgtgatgatgggagggggctccgtcctgcaggctggaggtggcatccacactggacagcagggaggaggggagtgagggtaacatttccatttcccttcatgttttgtttcttacgttctttcagcatgctccttaaaaccccagaagccccaatttccccaagccccattttttcttgtctttatctaataaactcaatattaagatgttaaaaaaaaaaaaaa

SEQ ID NO: 1521 - DNA, 949 bp, Homo sapiens
gcgctccgggcctggaatccctacgcgtccctttgggtttagcacgatgagctcaatcggcactgggtatgacctgtcagcctctacattctctcctgacggaagagtttttcaagttgaatatgctatgaaggctgtggaaaatagtagtacagctattggaatcagatgcaaagatggtgttgtctttggggtagaaaaattagtcctttctaaactttatgaagaaggttccaacaaaagactttttaatgttgatcggcatgttggaatggcagtagcaggtttgttggcagatgctcgttctttagcagacatagcaagagaagaagcttccaacttcagatctaactttggctacaacattccactaaaacatcttgcagacagagtggccatgtatgtgcatgcatatacactctacagtgctgttagaccttttggctgcagtttcatgttagggtcttacagtgtgaatgacggtgcgcaactctacatgattgacccatcaggtgtttcatacggttattggggctgtgccatcggcaaagccaggcaagctgcaaagacggaaatagagaagcttcagatgaaagaaatgacctgccgtgatatcgttaaagaagttgcaaaaataatttacatagtacatgacgaagttaaggataaagcttttgaactagaactcagctgggttggtgaattaactaatggaagacatgaaattgttccaaaagatataagagaagaagcagagaaatatgctaaggaatctctgaaggaagaagatgaatcagatgatgataatatgtaacatttactccagcatctattgtattttaaatttctactccagtccaatgtaactatttagccctggattatacatactgtccaattttcattaaatttttgtcttataactataaaaaaaaaaaaaaaaaaaaaa

SEQ ID NO: 1522 - DNA, 938 bp, Homo sapiens
gcgctccgggcctggaatccctacgcgtccctttgggtttagcacgatgagctcaatcggcactgggtatgacctgtcagcctctacattctctcctgacggaagagtttttcaagttgaatatgctatgaaggctgtggaaaatagtagtacagctattggaatcagatgcaaagatggtgttgtctttggggtagaaaaattagtcctttctaaactttatgaagaaggttccaacaaaagactttttaatgttgatcggcatgttggaatggcagtagcaggtttgttggcagatgctcgttctttagcagacatagcaagagaagaagcttccaacttcagatctaactttggctacaacattccactaaaacatcttgcagacagagtggccatgtatgtgcatgcatatacactctacagtgctgttagaccttttggctgcagtgtgaatgacggtgcgcaactctacatgattgacccatcaggtgtttcatacggttattggggctgtgccatcggcaaagccaggcaagctgcaaagacggaaatagagaagcttcagatgaaagaaatgacctgccgtgatatcgttaaagaagttgcaaaaataatttacatagtacatgacgaagttaaggataaagcttttgaactagaactcagctgggttggtgaattaactaatggaagacatgaaattgttccaaaagatataagagaagaagcagagaaatatgctaaggaatctctgaaggaagaagatgaatcagatgatgataatatgtaacatttactccagcatctattgtattttaaatttctactccagtccaatgtaactatttagccctggattatacatactgtccaattttcattaaatttttgtcttataactataaaaaaaaaaaaaaaaaaaaaaaaaaaaaaaa

SEQ ID NO: 1523 - DNA, 2161 bp, Homo sapiens
ggaggagctgttttgcggcgggcggagctgcaggctgggcagggcttagcctgtgcgcttctgctggcctccttttcgccctcccacccgcactgcagtctccagcctgagccatgggccgccgagccctcctgctcctgcttctgtcttttctggcgccctgggccaccatagccctccggccggccttaagggccctcggcagcctacacttgccaaccaaccccacatccctcccggctgtagccaagaactattcggttctctacttccaacagaaggttgatcattttggatttaatactgtgaaaacttttaatcagcggtacctagtagctgataaatactggaagaaaaatggtggatcaatacttttctacactggtaatgaaggggacattatctggttttgtaataacacggggttcatgtgggatgtggctgaggaactgaaagctatgttggtgtttgctgaacatcgatactatggagagtctctcccctttggtgacaactcattcaaggattccagacacttgaatttcctgacatcagaacaagctctggctgattttgcagagttaatcaaacacttgaaaagaacaatcccaggagctgaaaatcaacctgtcattgccataggaggctcctatggtggcatgcttgccgcctggtttaggatgaaatatcctcatatggtagttggagctcttgcagcttctgcccctatctggcagtttgaggatttagtaccttgtggtgtatttatgaagatcgtaactacagattttaggaaaagcggtccacattgttcagagagcatccacaggtcctgggatgccattaatcgactctcaaatactggcagtggtttgcagtggcttactggagcccttcacttatgcagcccattaacttctcaggacatccaacatttgaaagactggatctctgaaacctgggtgaatctggcaatggtggactatccttatgcctctaactttttacagcctttgcctgcttggcctatcaaggtagtgtgccagtatttgaaaaatcccaatgtatctgattcactgctgctgcagaatattttccaagctctgaatgtatattacaattattcgggccaggtgaaatgcctgaatatttcagagacagcaactagcagtctgggaacactgggttggagctatcaggcctgcacagaagtagtcatgcccttttgtactaatggtgtcgatgacatgtttgaacctcactcatggaacttaaaggaactttctgatgactgttttcaacagtggggtgtgagaccaaggccctcctggatcactactatgtatggaggcaaaaacattagttcacacacaaacattgttttcagcaatggtgaactagacccctggtcaggaggtggagtaactaaggatatcacagacactctggttgcagtcaccatctcagagggggcccaccacttagatctccgcaccaagaatgccttggatcctatgtctgtgctgttagcccgctccttggaagttagacatatgaagaattggatcagagatttctatgacagtgcgggaaagcagcactgagaaacttttgattgttttcaatttcttcttttatgttcacaccaccacattcccattcactttgattttctacatgtaattaccttcttttgtttatcattagatttgatggggccaaagttgagatagaatagagggtgatgacggtaagagcaagtgtcccatgaatgtgatttcctgggttctcactgtctttgcaccacgtctaggaagaatcttcttgatagctctcccacaccatcagtggccctcataactggagtagagttcctggttgcttttcataagagggagagttactttctttgtatctctgcaagcagagatttctctttggttttgaggttgaagtgtctttggcccatttgtaagtccccatccctaccctacacaaagtaaaagcagaagatagataaaaaatgatgtaattgcagctggtaggatgtctggtgccaatccaggaagtgagagccatttcttttgtaccggatttaatgactttgaactgtgctgtaaataaataatacagctggaccttaaaaaaaaaaaaaaaaaaa

SEQ ID NO: 1524 - DNA, 2222 bp, Homo sapiens
ggaggagctgttttgcggcgggcggagctgcaggctgggcagggcttagcctgtgcgcttctgctggcctccttttcgccctcccacccgcactgcagtctccagcctgagccatgggccgccgagccctcctgctcctgcttctgtcttttctggcgccctgggccaccatagccctccggccggccttaagggccctcggcagcctacacttgccaaccaaccccacatccctcccggctgtagccaagaactattcggttctctacttccaacagaaggcccttgctgctgggcagttgcacatatgtattatccaactaaatcattacaagactcctctggttgatcattttggatttaatactgtgaaaacttttaatcagcggtacctagtagctgataaatactggaagaaaaatggtggatcaatacttttctacactggtaatgaaggggacattatctggttttgtaataacacggttcatgtgggatgtggctgaggaactgaaagctatgttggtgtttgctgaacatcgatactatggagagtctctcccctttggtgacaactcattcaaggattccagacacttgaatttcctgacatcagaacaagctctggctgattttgcagagttaatcaaacacttgaaaagaacaatcccaggagctgaaaatcaacctgtcattgccataggaggctcctatggtggcatgcttgccgcctggtttaggatgaaatatcctcatatggtagttggagctcttgcagcttctgcccctatctggcagtttgaggatttagtaccttgtggtgtatttatgaagatcgtaactacagattttaggaaaagcggtccacattgttcagagagcatccacaggtcctgggatgccattaatcgactctcaaatactggcagtggtttgcagtggcttactggagcccttcacttatgcagcccattaacttctcaggacatccaacatttgaaagactggatctctgaaacctgggtgaatctggcaatggtggactatccttatgcctctaactttttacagcctttgcctgcttggcctatcaaggtagtgtgccagtatttgaaaaatcccaatgtatctgattcactgctgctgcagaatattttccaagctctgaatgtatattacaattattcgggccaggtgaaatgcctgaatatttcagagacagcaactagcagtctgggaacactgggttggagctatcaggcctgcacagaagtagtcatgcccttttgtactaatggtgtcgatgacatgtttgaacctcactcatggaacttaaaggaactttctgatgactgttttcaacagtggggtgtgagaccaaggccctcctggatcactactatgtatggaggcaaaaacattagttcacacacaaacattgttttcagcaatggtgaactagacccctggtcaggaggtggagtaactaaggatatcacagacactctggttgcagtcaccatctcagagggggcccaccacttagatctccgcaccaagaatgccttggatcctatgtctgtgctgttagcccgctccttggaagttagacatatgaagaattggatcagagatttctatgacagtgcgggaaagcagcactgagaaacttttgattgttttcaatttcttcttttatgttcacaccaccacattcccattcactttgattttctacatgtaattaccttcttttgtttatcattagatttgatggggccaaagttgagatagaatagagggtgatgacggtaagagcaagtgtcccatgaatgtgatttcctgggttctcactgtctttgcaccacgtctaggaagaatcttcttgatagctctcccacaccatcagtggccctcataactggagtagagttcctggttgcttttcataagagggagagttactttctttgtatctctgcaagcagagatttctctttggttttgaggttgaagtgtctttggcccatttgtaagtccccatccctaccctacacaaagtaaaagcagaagatagataaaaaatgatgtaattgcagctggtaggatgtctggtgccaatccaggaagtgagagccatttcttttgtaccggatttaatgactttgaactgtgctgtaaataaataatacagctggaccttaaaaaaaaaaaaaaaaaaa

SEQ ID NO: 1525 - DNA, 2858 bp, Homo sapiens
ggcgacgggtttggtaagtaggaaagtttcggttgaggagtaagagctgccgcgggagcagtaacccgcgcgggggaggccgacgtcggtcggagagggggtacgagagctgctggtggtgttgtcgtggccggagcggcccgcgcctgggctgccggcacttcgcggcagtcagagcaccataacatggtgtgggaagtgaagacaaatcagatgcctaatgcagtacagaaactcctgttggtgatggacaagagagcctcaggaatgaatgactcattggagttgctgcagtgtaatgagaatttgccatcttcacctggatataactcctgtgatgaacacatggagcttgatgaccttcctgaacttcaggcagttcaaagtgatcctacccaatctggcatgtaccagctgagttcagatgtttcacatcaagaatacccaagatcatcttggaaccaaaatacctcagacataccagaaactacttaccgtgaaaatgaggtggactggctaacagaattggcaaatatcgcgaccagtccacaaagtccactgatgcagtgctcattttacaatagatcatctcctgtacacatcatagccactagcaaaagtttacattcctatgcacgccctccaccagtgtcctcttcttcgaagagtgaaccagccttccctcatcaccattggaaggaggaaacaccagtaagacacgaaagggcaaatagtgagtcagaatctggcattttctgcatgtcctccctgtcagatgatgatgatttgggatggtgcaattcctggccttcaactgtctggcactgttttttgaaaggcacacgactgtgctttcataagggaagcaataaggaatggcaagatgttgaagattttgctagagctgaaggctgtgataatgaggaagatcttcaaatgggcattcacaagggctatggttctgatggtctaaagttgttatcacatgaagaaagtgtatcatttggcgagtctgtactgaagttgacttttgatcctggtacagtagaagatggtttacttaccgtagagtgtaagctggaccaccctttctatgttaaaaataaaggttggtcatcattttatccaagcttgactgtggtacagcatggcattccatgttgtgaagttcatattggcgatgtatgtctacctcctggacaccccgatgccattaattttgatgattcaggtgtttttgatacatttaaaagctatgacttcacacctatggattcttctgcagtttatgtgttaagtagtatggctcgccagcgtcgtgcatctttgtcttgtggaggacctggtggtcaagactttgcaagatctggattcagtaaaaactgtggctcacctggatcatcacagctctcttccaattctttgtatgctaaagctgtcaaaaaccacagctcagggactgtgagtgccacttctcctaataagtgcaaaagaccaatgaatgccttcatgctttttgccaaaaaatacagagttgaatatactcagatgtatccagggaaagataacagagccataagtgtgatccttggtgacaggtggaagaaaatgaagaatgaagagagaagaatgtacacattagaagcaaaggctttggctgaagaacagaaacgtttaaatcctgactgttggaagaggaaaagaaccaattcaggctcacaacaacattaaaccaggatgcttatgttcttaagtctatatttgcatatacattgactcttgatggaaagacttaagaagatcaaggtctcaccatttgtcctcaattcgtgtgaccataagatactgatagcattgagtcttgaaatgatttaataatatgagtgaggatttgctttctccattagagcattaagctaaaactatcaacattttaaaccaaattgccttatttttcttccaaacttcatatatgtctatcaggtaataataggcttgaaaattgatatcctgtggtgctaaagtacagtagaaagagaggagaagtgtatacatgttttattttaaattgtacgaaaggggaatttaaaaaatatgtaactgctgtttatacattggctccttactgcttattaatctgtattgtacacatgatgaaatgaagcagaagctgggagtcggcctttcctctagtaaccaccacatggctcagcatctgtgccaaacataggcgctcctagtctggtcagtgccaagaggctaccagaacatggggcaggtggctggtgttggtgtcccagcctaagagccacctgctgcagttaccatggcatgctgagttgatgcaccaggtggcagcagccatccgttattatttccaatggagacctagcccaggccaaggtaaagttagttaatagcattgggatatagtcactgtaatggtgctattaacaaacagtcaacaccattgtattttttaacttcgtgttctgtatctcctcagccatgtatcttaaatatattttgtcatcataatctttatggtgggggcagactttgcacttactgcagtgcaacacttgcactttaattttcctccaactgtctaaaattagagcaaatacattggcaatacagctgcttttgctctgagctacaatcatggcttttcatgttacttaccaagtggtgtttctggttaggaatcacagctgtaaaattgatttcagttcatcacacttcttcatgatgttgcccctaaattttgcacactatattcttgtatattatttcaaataaatggaaaaaaaagttgcttatctctgaaaaaaaaaaaaaaaaaaaaaaaaaaaaaa

SEQ ID NO: 1526 - DNA, 800 bp, Homo sapiens
tggcgcggtgcagggctcttaagaacgaacggcttgggcgcgggtaatcagctccctttcccccactttctcacttattctaggtacttgggactgtcgtagagtttccagaccccatgtaggcgcccagtcgtggactgtcccactctgctgctctactgctcgtggtgctcccgcgcccagactggtatccggggactgtgacttgcagggtccgccatggagccagagcagatgctggagggacaaacgcaggttgcagaaaatcctcactctgagtacggtctcacagacaacgttgagagaatagtagaaaatgagaagattaatgcagaaaagtcatcaaagcagaaggtagatctccagtctttgccaactcgtgcctacctggatcagacagttgtgcctatcttattacagggacttgctgtgcttgcaaaggaaagaccaccaaatcccattgaatttctagcatcttatcttttaaaaaacaaggcacagtttgaagatcgaaactgacttaatgggaagaacagaaaaatttagttgctactgtagatttacatgattaagaggcagctttaattgccatgatcattccctctttttggatgtataagaaccttccggacaacagaacctatttctggaattgcagaagataacatatttcccttattttgatttaatcaccataaaccatacctatttaatgagtgtattctgtgcaatttttttctcagattgtctttaactttgtttttaaaatgaccttcaaaataaactgtcaaaacaccatt

SEQ ID NO: 1527 - DNA, 943 bp, Homo sapiens
gctacctccaactgctgaggaaccggttgcctaaaaggagccggcaaaagcgcctacgtggagtccagaggagcggaagtagtcagatttgactgagagccgtaaagcgcggctggctctcgttttccggataacgactacagctccgactgtcagtgccggccttcctcgtgtgaggggatctgccggacccctgcaaattcaatttctttcccattccgggcccttccctatcgtcgcccccttcaccttggatcatgttcaagaaatttgatgaaaaagaaaatgtgtccaactgcatccagttgaaaacttcagttattaagggtattaagaatcaattgatagagcaatttccaggtattgaaccatggcttaatcaaatcatgcctaagaaagatcctgtcaaaatagtccgatgccatgaacatatagaaatccttacagtaaatggagaattactcttttttagacaaagagaagggcctttttatccaaccctaagattacttcacaaatatccttttatcctgccacaccagcaggttgataaaggagccatcaaatttgtactcagtggagcaaatatcatgtgtccaggcttaacttctcctggagctaagctttaccctgctgcagtagataccattgttgctatcatggcagaaggaaaacagcatgctctatgtgttggagtcatgaagatgtctgcagaagacattgagaaagtcaacaaaggaattggcattgaaaatatccattatttaaatgatgggctgtggcatatgaagacatataaatgagcctcagaaggaatgcacttgggctaaatatggatattgtgctgtatctgtgtttgtgtctgtgtgtgacagcatgaagataatgcctgtggttatgctgaataaattcaccagatgctaaaaaaaaaaaaaaaaaaaaa

SEQ ID NO: 1528 - DNA, 1189 bp, Homo sapiens
gcgcatgcgcgggggccatattagcagcggttattcggtgagcggtggtggtttattcttccgtggagttaagggctccgtggacatctcaggtcttcagggtcttccatctggaactatataaagttcagaaaacatgtctcgaagatatgactccaggaccactatattttctccagaaggtcgcttataccaagttgaatatgccatggaagctattggacatgcaggcacctgtttgggaattttagcaaatgatggtgttttgcttgcagcagagagacgcaacatccacaagcttcttgatgaagtctttttttctgaaaaaatttataaactcaatgaggacatggcttgcagtgtggcaggcataacttctgatgctaatgttctgactaatgaactaaggctcattgctcaaaggtatttattacagtatcaggagccaataccttgtgagcagttggttacagcgctgtgtgatatcaaacaagcttatacacaatttggaggaaaacgtccctttggtgtttcattgctgtacattggctgggataagcactatggctttcagctctatcagagtgaccctagtggaaattacgggggatggaaggccacatgcattggaaataatagcgctgcagctgtgtcaatgttgaaacaagactataaagaaggagaaatgaccttgaagtcagcacttgctttagctatcaaagtactaaataagaccatggatgttagtaaactctctgctgaaaaagtggaaattgcaacactaacaagagagaatggaaagacagtaatcagagttctcaaacaaaaagaagtggagcagttgatcaaaaaacatgaggaagaagaagccaaagctgagcgtgagaagaaagaaaaagaacagaaagaaaaggataaatagaatcagagattttattactcatttggggcaccatttcagtgtaaaagcagtcctactcttccacactaggaaggctttactttttttaactggtgcagtgggaaaataggacattacatactgaattgggtccttgtcatttctgtccaattgaatactttattgtaacgatgatggttacccttcatggacgtcttaatcttccacacacatcccctttttttggaataaaatttggaaaatggaaatgaaaaaaaaaaaaaaaaa

SEQ ID NO: 1529 - DNA, 2209 bp, Homo sapiens
ggcggctggaggcctgagttgggctcgcggcgggggtcggcagggggccgggtggcggaatgatggaggaggaggaactggagttcgtggaggagctggaagccgtgctgcagctcacgcccgaggtgcagctggccatcgagcaggtgtttccaagccaggaccctctagatcgagcagatttcaatgctgttgagtatatcaataccctgttcccaaccgagcaatctctggcgaacatagacgaagtcgtgaacaaaattaggctgaaaataaggagactggatgacaatattcgaactgttgtaagaggtcagacgaacgtggggcaggatggacggcaagtgaaagaaatcacccgtgatattaagcaattagatcacgccaaacgccacctgaccacctcaatcaccacactgaaccacctgcacatgctggcaggaggtgtcgactccctcgaagccatgaccaggcgaagacaatacggagaagttgctaatctccttcagggtgtgatgaatgtcctggagcacttccacaagtatatggggattccgcagatccggcagctttccgaaagagtgaaggctgcacagactgagttaggacagcaaatcctggcagattttgaagaagcgtttccttcccagggcaccaagagaccaggaggacccagcaatgttctacgagatgcatgtctggttgctaatattctagatcccaggatcaaacaggaaatcatcaaaaagtttattaaacagcatctgtcagagtatctggtactttttcaagaaaaccaagatgttgcctggctggacaaaatcgacagacgctatgcctggataaaacgccagcttgtggactatgaggagaaatacggccgcatgtttccacgtgagtggtgcatggctgagaggattgcggtggaattttgccatgtgacaagggcagaacttgccaagattatgcgtaccagagcgaaggaaattgaagtgaaattgcttctttttgctattcaaagaacaactaactttgaggggtttcttgcaaaacgcttctccggctgcaccctgaccgatgggaccctgaaaaagcttgagtctccacccccatctaccaatcccttcctggaagatgagccaacaccagagatggaggaactggcaacggagaaaggagatttagatcaaccaaagaagcctaaagccccagacaatccatttcatggcattgtttccaagtgttttgagcctcatctctacgtgtatatcgaatcccaagacaagaacctcggagagctgatagatcggtttgtggctgatttcaaagcccaggggccacctaagcccaacactgatgaagggggtgccgtgctccccagctgcgccgacctctttgtctactacaagaagtgcatggtgcaatgctctcagctcagtactggggagcccatgatcgccctgaccaccattttccagaagtacctccgagaatatgcctggaaaatcctctctggcaacctgcccaaaaccacaaccagcagtggaggactgactatcagcagcctcctcaaggaaaaggagggctcagaagtagccaagttcactctggaggagctctgcctcatctgtaacatcctgagcacggcagagtactgtctggccaccacccagcagctagaagaaaaactcaaagaaaaagtggatgtaagtctgattgaacgaatcaatctgactggagagatggacacgttcagcaccgtcatctccagcagtattcagctgctggttcaggatctggatgctgcctgtgatcctgccctgactgccatgagcaagatgcagtggcagaacgtggagcacgttggtgaccagagcccctacgtcacctctgtcattctgcacatcaagcagaacgtccccatcatccgtgacaacctggcttccacacgcaagtacttcactcagttctgcgttaaatttgcaaactccttcattcccaaattcatcacccacctcttcaagtgcaagccaattagcatggtgggagcagaacaggtgagatggacgtagtatcaggcatttgcctggcagcttttgttgtagatcaagcacatattcttctagtccagatctacttggcaggaataaaattgatgatgtcccctgtttggggacagtataatgactcaaaaaaaaaaaaaaaaaaa

SEQ ID NO: 1530 - DNA, 4491 bp, Homo sapiens
agaagcccggatcgaagcgcagggtggcagccccggagccggggaatgtgaagagctctcggctgtgcagtggtaccgtcggggcctgggccgcgaaggatcttctgccacagctgcaacatgggcggcaagaacaagaaacacaaggctccagcggccgcggtggtccgggccgccgtgtctgcttccagagccaaatctgccgaggctggaattgccggggaggcccaaagcaagaagccagtgtccaggccggccaccgctgccgctgccgctgccggctccagggagccccgtgtcaagcaaggtccaaaaatttatagttttaattctacaaatgattctagtggtcctgcaaatctggataaatctattttgaaagtggtaattaataacaaactagagcaaagaattattggagtgatcaatgagcataaaaagcaaaataatgacaaaggaatgatttctggaagacttactgccaaaaaattgcaggatttatacatggctttacaagcattttcatttaagacaaaggacattgaagatgccatgaccaatacactcttatatggaggtgaccttcattctgccttggattggctctgtttaaacctttcagatgatgcacttcctgaaggattcagtcaggaatttgaagagcagcaacctaaaagtaggcctaaatttcagtctcctcaaatacaagccactatttcacctccattgcaacctaaaacaaaaacatatgaagaggaccctaagagtaagccaaaaaaggaagaaaaaaatatggaagtaaatatgaaagagtggattttacgatatgctgaacaacaaaatgaagaagaaaagaatgagaattctaaaagtttagaagaggaggaaaaatttgaccctaatgaaaggtacttacatcttgcagcaaaactgctggatgcaaaagaacaagcagctacctttaaactagaaaaaaacaagcaaggccaaaaagaggctcaggaaaaaataaggaaatttcaaagagaaatggaaactttagaagaccatccagtatttaacccagccatgaagatttcacatcaacaaaatgaaaggaaaaagcctcctgtagccacagaaggagaaagtgcattgaattttaatttatttgaaaaatctgcagctgctactgaagaagagaaagataaaaagaaagaacctcatgatgtaagaaattttgactatactgctcgaagttggactggaaaatctcccaaacaatttctgattgattgggtcaggaagaatcttcccaagagtccaaatccttcctttgaaaaagttccagtaggtagatactggaaatgtagggttagggtaatcaagtctgaagatgatgtcctggtagtatgccctacaatcttaacagaagatggcatgcaagctcagcacctgggagctactttagccctttaccgtttagttaaagggcagtcagttcatcagttacttcctcccacttaccgagatgtttggctggagtggagtgatgcagaaaagaaaagggaagaattaaataaaatggaaaccaataaaccacgtgatctttttattgccaaacttctgaataaactgaaacagcagcaacagcagcaacaacagcattctgaaaataagagagaaaactctgaagatcccgaggaatcttgggaaaatttagtttcggatgaggatttttctgcactgtccttggaatcagcaaatgtggaagatttggaacctgttagaaacctctttagaaagttgcaaagcacacctaagtatcagaaacttctaaaggaaagacaacagctacctgtatttaaacatcgggactcaattgttgaaactcttaaaaggcatcgggtagtggttgtggcaggtgaaacagggagtggtaaaagtactcaggtaccacattttctattggaagatttgcttctaaatgagtgggaagcaagtaaatgtaacattgtctgtacccaaccccgaagaatctcagcagttagtttagccaacagagtatgtgatgaattgggctgtgaaaatggacctggaggaaggaattccttgtgtggatatcagatccggatggaatctcgagcttgtgaatctaccaggttactctattgtacaacaggggttttgctaaggaaacttcaagaagatggtcttctaagtaatgtgtctcatgttattgtagatgaggttcatgaaagaagtgtccagtcagacttcctactaattatcttgaaggaaattttacagaaacgttctgatctacacttgattctaatgagtgccactgtggacagcgaaaaattttctacatatttcacacactgccccattctcagaatttcaggaagaagttatcctgttgaggtttttcatcttgaagatataatagaagaaacaggctttgtactggaaaaagactcagaatattgtcagaaatttctggaagaggaagaagaagtaaccattaatgttacaagcaaagcagggggaataaaaaaatatcaggaatacatcccagttcagactggagcacatgctgatttaaatccattttaccaaaagtacagcagccgcactcagcatgctattctatacatgaatcctcataaaatcaacctggatctcattttggaacttcttgcatacttagataaaagtccccaattcagaaatattgaaggagcagtattgatctttttaccaggacttgctcatattcagcagttgtatgatcttctatcaaatgatagaagattttattctgaacgatataaagtgatagctctgcattctattctttcaacccaagatcaagctgcagcattcacacttccccctccaggagtcaggaagattgttttagcaaccaatattgcagagacgggtatcactattcctgatgttgtatttgtaattgatactggaagaacaaaagaaaataagtaccatgaaagcagtcagatgagttctttggtggagacgtttgtcagtaaagccagtgctttgcagcgccagggaagagctgggcgggtcagagatggcttctgtttccgaatgtacacaagagaaagatttgaaggctttatggattattctgttcctgaaatcttacgtgtacctttggaggaattatgccttcatattatgaaatgtaatcttggttctcctgaagatttcctctccaaagccttagatcctcctcagctccaagtgatcagcaatgcaatgaatttgctccgaaaaattggagcttgtgaattaaatgagcctaaactgactccgttgggccaacaccttgcagctttacctgtgaatgtcaagattggcaagatgcttatttttggtgccatatttggctgccttgacccagtggcaacactagctgcagttatgacagagaagtctccttttaccacaccaattggtcgaaaagatgaagcagatcttgcaaaatcagctttggccatggcggattcagaccacctgacgatctacaatgcatatctaggatggaagaaagcacgacaagaaggaggttatcgttctgaaatcacatactgccggaggaactttcttaatagaacatcactgttaaccctagaggatgtaaagcaggagttaataaagttggttaaggcagcaggattttcatcttccacaacttctaccagctgggaaggaaacagagcctcacagaccctctcattccaagaaattgcccttcttaaagctgtactggtggctggactgtatgacaatgtggggaagataatctatacaaagtcagtggatgttacagaaaaattggcttgcattgtggagacggcccaaggcaaagcacaagtacacccatcctcagtaaatcgagatttgcaaactcatggatggctcttataccaggagaagataaggtatgccagagtgtatttgagagaaactaccctaataaccccttttccagttttactttttggtggtgatatagaagttcagcaccgagaacgtcttctttctattgatggctggatctattttcaggcccctgtaaagatagctgtcattttcaagcagctgagagttctcattgattcagttttaagaaaaaagcttgaaaatccaaagatgtcccttgaaaatgacaagattctgcagatcattacggaattgataaaaacagagaataactgaaactgaaattcatggtcaactgctttaaaaattaagatgaagatacagtcatgaaattatctgaaaatgggtcatcacattaagtatttcattacttaaaatgttggtactagccattaacttaaaggtggtgggaaaaaagcacatactttaaacatgtataattttctagttcctttttaatgatgattattctgaatgtatttgccactacatttacaataaattctttggtattatgcaaaaaaaaaaaaaaaaaaa

SEQ ID NO: 1531 - DNA, 2226 bp, Homo sapiens
ggcagcatggcgtctttccggcttctccaaacccttgcgaaaaactttattggcaaagctatcagagaacggacagtgtacccactgaggcggccaaagcttaactggatcagggcaggatgacatgaccttgtggtagatcccagaactgaggccccaggatgacagaacaggagaccctggccctactggaagtgaagaggtctgattccccagagaagagctcaccccaggccttggttcccaatggccggcagccagaaggggaaggtggggccgaatccccgggagctgagtccctcagagtggggtcttcagctggatctcccacagccatagagggggctgaggatggtctagacagcacagtaagtgaggctgccaccttgccctgggggactggccctcagcccagtgctccgttcccggatccccctggctggcgggacattgaaccagagccccctgagtcagaaccacttaccaagctagaggagctgcccgaagacgatgccaacctgctgcctgagaaagcggcccgtgccttcgtgcctattgacctacagtgcattgagcggcagccccaagaagaccttatcgtgcgctgtgaggcaggcgagggcgagtgccgaaccttcatgcccccccgggtcacccaccccgaccccactgagcgcaagtgggctgaggcagtggtgaggccgcctggctgttcctgtgggggctgcgggagctgtggagaccgtgagtggctaagggctgtggcctccgtgggagccgcactcattctcttcccttgcctactatacggggcatatgccttcctgccgtttgatgtcccacggctgcccaccatgagttcccgcctgatctacacactgcgctgcggggtctttgccaccttccccattgtgctggggatcctggtgtacgggctgagcctgttatgcttttctgcccttcggccctttggggagccacggcgggaggtggagatccaccggcgatatgtggcccagtcggtccagctctttattctctacttcttcaacctggccgtgctttccacttacctgccccaggataccctcaaactgctccctctgctcactggtctctttgccgtctcccggctgatctactggctgacctttgccgtgggccgctccttccgaggcttcggctacggcctgacgtttctgccactgctgtcgatgctgatgtggaacctctactacatgttcgtggtggagccggagcgcatgctcactgccaccgagagccgcctggactacccggaccacgcccgctcggcctccgactacaggccccgcccctggggctgagcctctccgccctcgccctcggagtagggggtagcggcttgggtctgacacatctttgaaccttgtggccaggcctggacttcgcccccaggcctaggaccgcggtgggtggaaccctgctactgccccaacagggactccaatcaatcggagttctccccttgccggagctgcccttcacctttggggcccgagacagtcataagggatggacttagttttcttgcagggaaaaaggtggacagccgtgtttcttaaggatgctgagggcatggggccaggaccaggggagaggcacagctccttcctgagcagcctctcaccactgccacaaggctccctaatgctggtctctgctccactccccggcttcccgtgaggcaggaggcagagccacagccaaggccctgaccacttctgtgccagttgtctaagcagagcgcctcagggacgctggaaatgccttaaggatagaggctgggcatcacatcaaatgggactgtggtgtttggtgaaaaccttcctgaggatctggattcaggaccctccatgactggcctatttactgtttacagctggccagtgcagagctgctgctcttttacctttttaggcccctgtaacttcccacctttaaactgcccagaaggcatgcctctcccacaggaagaggggagcagacagggaaatctgcctaccaagaggggtgtgtgtgtctttgtgcccacacgtggtggctggggagtgcctggatggtgcggtggttgatgttaacctagtgtgtgtgtgtgtgtgtgtgtgtgtgtgtgtaacaataaattactaccagtcaaaaaaaaaaaaaaaaaaaaaaaaaaaaaaaaaaaaaaaaaaaaaaaaa

SEQ ID NO: 1532 - DNA, 1421 bp, Homo sapiens
cggtggtggcggagtctacggaagccgttttcgcttcacttttcctggctgtagagcgctttccccctggcgggtgagagtgcagagacgaaggtgcgagatgagcactatgttcgcggacactctcctcatcgtttttatctctgtgtgcacggctctgctcgcagagggcataacctgggtcctggtttacaggacagacaagtacaagagactgaaggcagaagtggaaaaacagagtaaaaaattggaaaagaagaaggaaacaataacagagtcagctggtcgacaacagaaaaagaaaatagagagacaagaagagaaactgaagaataacaacagagatctatcaatggttcgaatgaaatccatgtttgctattggcttttgttttactgccctaatgggaatgttcaattccatatttgatggtagagtggtggcaaagcttccttttacccctctttcttacatccaaggactgtctcatcgaaatctgctgggagatgacaccacagactgttccttcattttcctgtatattctctgtactatgtcgattcgacagaacattcagaagattctcggccttgccccttcacgagccgccaccaagcaggcaggtggatttcttggcccaccacctccttctgggaagttctcttgaactcaagaactctttattttctatcattctttctagacacacacacatcagactggcaactgttttgtagcaagagccataggtagccttactacttgggcctctttctagttttgaattatttctaagccttttgggtatgattagagtgaaaatggcagccagcaaacttgatagtgcttttggtcctagatgatttttatcaaataaagtggattgattagttaagttcaggtaatgtttatgtaatgaaaaacaaatagcatccttcttgtttcatttacataagtattttctgtgggaccgactctcaaggcactgtgtatgccctgcaagttggctgtctatgagcatttagagatttagaagaaaaatttagtttgtttaacccttgtaactgtttgttttgttgttgtttttttttcaagccaaatacatgacataagatcaataaagaggccaaatttttagctgttttatgtacaaggagagatctgtttcattttgttttgccgtatttctagatataagttttagcatgggccaggaaggactaaaataaaagtttttaaggtactgtactttttgccatacttgactcatatactcaaaatacagagttgtcttggtgtaggaattggaaagcaagagtggaaaggaacgtaataactcgttggagtttaaaaatgagggtcttggcaagtaacactgatgtctgaaaaaaaattaaatataaataaataaataaaaatga

SEQ ID NO: 1533 - DNA, 1371 bp, Homo sapiens
gcggtggcggcggcggcggcggcgcgtggcaggtccggcgggcgcgaggcggcggcggaggcccgagcccggcccagcctcgtcccgcccggagcccgcctggctgctaccccgaccccggctccggtcccgtcctgtcccggcgcgccgcggcctcgccccggcccccgctcggcgcctcccgagggagcggcgctgccggccgagagcgcaggcccggccatgaccgacttcaaattgggtatcgtgcggctcggccgggtggccgggaagaccaaatacacgctgatcgatgagcaggacatcccgctggtggagagctactcctttgaggcccgaatggaagtggatgcagatggaaatggtgctaagatatttgcctatgcctttgacaagaaccgaggaaggggctctgggagactccttcatgagctgctgtgggagcggcaccgggggggcgtggccccgggcttccaggtggtgcacctcaacgctgtgaccgtggacaatcgcctggacaacctgcaactggtgccgtggggctggcggcccaaggctgaagagacctccagcaagcagagggagcaaagcttgtattggcttgcaattcagcagctgcctacagaccctatagaagaacagtttcctgtcctaaatgtgacccggtattataatgccaacggggatgtagtggaagaggaggagaactcttgcacctactatgagtgccactaccctccctgcacagtgattgagaagcagctccgggagttcaacatctgtgggcgctgccaggtggcccggtactgcggctcccagtgccagcagaaggactggcctgcccacaagaagcactgtcgggagaggaagcgtcccttccagcatgagcttgagccagagcgatgacgggcaggggagccacacatactcacagcccccgggctctaccctgggcacagcagagacagactggtggttgaacctggaggtgccaaaaaagccagctgcgggcccaggacagctgccgtgagactcccgatgtcacaggcagtctgtgtggttacagcgcccctcagtgttcatctccagcagagacaacggaggaggctcccaccaggacggttctcattatttatatgttaatatgtttgtaaactcatgtacagttttttttgggggggaggcaatgggaagggtagaaattacaaatagaatcatttgctgtaatccttaaatggcaaacggtcaggccacgtgactaaaaactgtcctgttgtcgaagcttctcccctgggccgccgggagccccgtggagcgcggcctgcacgggagttgtgtccacaaaggcaaagtaaaggggtggaatcatca

SEQ ID NO: 1534 - DNA, 2798 bp, Homo sapiens
cgttgctgtcgctctgcacgcacctatgtggaaactaaagcccagagagaaagtctgacttgccccacagccagtgagtgactgcagcagcaccagaatctggtctgtttcctgtttggctcttctaccactacggcttgggatctcgggcatggtggctttgccaatggtccttgttttgctgctggtcctgagcagaggtgagagtgaattggacgccaagatcccatccacaggggatgccacagaatggcggaatcctcacctgtccatgctggggtcctgccagccagccccctcctgccagaagtgcatcctctcacaccccagctgtgcatggtgcaagcaactgaacttcaccgcgtcgggagaggcggaggcgcggcgctgcgcccgacgagaggagctgctggctcgaggctgcccgctggaggagctggaggagccccgcggccagcaggaggtgctgcaggaccagccgctcagccagggcgcccgcggagagggtgccacccagctggcgccgcagcgggtccgggtcacgctgcggcctggggagccccagcagctccaggtccgcttccttcgtgctgagggatacccggtggacctgtactaccttatggacctgagctactccatgaaggacgacctggaacgcgtgcgccagctcgggcacgctctgctggtccggctgcaggaagtcacccattctgtgcgcattggttttggttcctttgtggacaaaacggtgctgccctttgtgagcacagtaccctccaaactgcgccacccctgccccacccggctggagcgctgccagtcaccattcagctttcaccatgtgctgtccctgacgggggacgcacaagccttcgagcgggaggtggggcgccagagtgtgtccggcaatctggactcgcctgaaggtggcttcgatgccattctgcaggctgcactctgccaggagcagattggctggagaaatgtgtcccggctgctggtgttcacttcagacgacacattccatacagctggggacgggaagttgggcggcattttcatgcccagtgatgggcactgccacttggacagcaatggcctctacagtcgcagcacagagtttgactacccttctgtgggtcaggtagcccaggccctctctgcagcaaatatccagcccatctttgctgtcaccagtgccgcactgcctgtctaccaggagctgagtaaactgattcctaagtctgcagttggggagctgagtgaggactccagcaacgtggtacagctcatcatggatgcttataatagcctgtcttccaccgtgacccttgaacactcttcactccctcctggggtccacatttcttacgaatcccagtgtgagggtcctgagaagagggagggtaaggctgaggatcgaggacagtgcaaccacgtccgaatcaaccagacggtgactttctgggtttctctccaagccacccactgcctcccagagccccatctcctgaggctccgggcccttggcttctcagaggagctgattgtggagttgcacacgctgtgtgactgtaattgcagtgacacccagccccaggctccccactgcagtgatggccagggacacctacaatgtggtgtatgcagctgtgcccctggccgcctaggtcggctctgtgagtgctctgtggcagagctgtcctccccagacctggaatctgggtgccgggctcccaatggcacagggcccctgtgcagtggaaagggtcactgtcaatgtggacgctgcagctgcagtggacagagctctgggcatctgtgcgagtgtgacgatgccagctgtgagcgacatgagggcatcctctgcggaggctttggtcgctgccaatgtggagtatgtcactgtcatgccaaccgcacgggcagagcatgcgaatgcagtggggacatggacagttgcatcagtcccgagggagggctctgcagtgggcatggacgctgcaaatgcaaccgctgccagtgcttggacggctactatggtgctctatgcgaccaatgcccaggctgcaagacaccatgcgagagacaccgggactgtgcagagtgtggggccttcaggactggcccactggccaccaactgcagtacagcttgtgcccataccaatgtgaccctggccttggcccctatcttggatgatggctggtgcaaagagcggaccctggacaaccagctgttcttcttcttggtggaggatgacgccagaggcacggtcgtgctcagagtgagaccccaagaaaagggagcagaccacacgcaggccattgtgctgggctgcgtagggggcatcgtggcagtggggctggggctggtcctggcttaccggctctcggtggaaatctatgaccgccgggaatacagtcgctttgagaaggagcagcaacaactcaactggaagcaggacagtaatcctctctacaaaagtgccatcacgaccaccatcaatcctcgctttcaagaggcagacagtcccactctctgaaggagggagggacacttacccaaggctcttctccttggaggacagtgggaactggagggtgagaggaagggtgggtctgtaagaccttggtaggggactaattcactggcgaggtgcggccaccaccctacttcattttcagagtgacacccaagagggctgcttcccatgcctgcaaccttgcatccatctgggctaccccacccaagtatacaataaagtcttacctcagaaaaaaaaaaaaaaaaaa

SEQ ID NO: 1535 - DNA, 5087 bp, Homo sapiens
gggatgctgctgccgctactgcggagtagctgcttcccttcctcctctcccggcggcggcggcggcagcggcggaggaggaggaggaggggacccgggcgcagagagccggccggcggcgcagttgcagcgcggagcccacgggccgccggggccgctccagcgggcggaagccgagcccggggccgaccccccgcgcgcggcggaggccgagggggcgccggggcccggggcgcgcagccggggggcgggcggcggcgggcggcgggccgagcgggagccgcatgcgtgtatggatccgggcgccgcgctgcagaggcgggccgggggcggcggcggtctgggcgcgggctccccggcgctgtcgggcggccagggccgccggaggaagcagccccccaggccggccgacttcaagttgcaggtcatcattatcggctcccgcggcgtgggcaagaccagcctgatggagcgcttcaccgacgacaccttctgcgaggcctgcaagtccaccgtgggtaagggcgccacggcgaccctgggccgggcctcctggcgcccgggcagttgcccttcgccccgtgggcttcgagtctcatcgagcctgggagtctttcggggatgggcctctcggtgaaactaggggcgggggtctccttggagcgccctgcatcccaatcccaaagcctggcagaggttttcgtgccgcctccgggcagacctgcccttggcccccggccctgcctcagaggtcctggcagcccccggggcctgtgggggcggctctccacggaaacttcggcccttagcatactcgcccaagaaaaagctgggttcgagtggagcgcaggcaggcaggggagtgaacgcctaaggccgctctcgcccggcccgccaaggccagcgcgcgccgtctgctgcgggtgtgatccctgcgcaaccagggcagttttcttattttgaacccattttcaagaaatgaagtttaaagtcacctatggagaatgttaaaactaaaactacagtaagtttctcgtgctagccgtacgtacggggcagaggagcttcagctgtatttatccatgacctcaaacaacccggtgactggcgggcatggggttgattcctccagtaccgctgttttcggtgagggacaggagtgaagtaagtacaggaacgctccagggtcaaggaggaaaacagccgcggatctgaaatggaaactgcaggggaaatttttttaattaagtcatgcttagaggacttgacattgagatttctcagttggatgtgggtagcagttgtttctatggaaaaccccttaaaagatgtccaaactaggagaaccccgttctttaaaataaagggcagtcacttccgtgataggaagtgagagatttccccaggggcggtccaagaaactgagtagtcaggagatttgatagaattaaaagcataatttcatgtaattctatttattaatagtgttataaccagtggtagttccaaggctgtcagtacgattttgagatgacttgatttgaaattgtcatgtaacaaaacagtactacatttaaagtgtcttattggaaagtgaaacctccaatttttgtactgtctttcttggtttgttttcaagaacttacttcccttaatgcttttttggaatagatcattttggaaatatttgtgatgtctgtaccatatgtttttaaaatgttgtcgttggagacattatattaaaatgagtagcataactatacctgtttcaaatatccagtcttggatcatgcagagtacagggagttgttaaaccatcaaatgagggttaggctgttattttagtacctgacataaataaagtagggttaaattccgtttagaattgtcaatattttatggctccgtacttcagtatataaaaatgagggataatagagttgcactgtgtgatgaagagaaatcaggtacccataggtgggtaactgagggcttgagtggatggagggtgagatggatgagcaaaggtgtgctttagaatgcagaagaggagagaggaagaaggattttctaagcctggcagcagtggagcagccccccacctctggggagggttccttaggggacttgggaatggatgctgcgagaccttgaccgccatgctaaggagaatggacccgatcctatgggcacctggaaccaaaagactccttagtaaggcattggcacgaaaacagtttggcagagttgcataggatgtttgggaataaggaagagctgcggaggatgcttgggaataaggaagaaaccaggaggcaaggagaccaagcagtttgtttctgtgtcccttaacaaacatgcacttacccgagcacatactccctactctgagtgtggttgaatttctgtcttgctcatttttgtttgcttcacatgtagcctataatacttagagtactggagtactttagtactcagtgcgtgcttctaactgtgggatgttcagagaatgatcatggcccctggcctgctgcagagcgggaagacactgtgagaacgccagccagctccacttcagtttctgcttcagagttgcttttcccctccactcatcagatcgtttgttgagcacctactgtgtgttgggtgttatgctacccagtggggattcagtggtaaacaggacatcgactctgtccagaagtggatcggagcttctgggagctgcgtaaccgcttgtcagggcagtgacagatgtgtatgggtatttgggagcacagtgaaagcgcctccagtcgaggctagtgatgaggcctggtcagagaaggcttcctcgtcattggaatgtttgaagataagtttgttcctctagttcctttagaaaaatgcaaattaaatatggtactgggtgtggtgtagaattgtggttgccttacctgaacgcttaccatttgagcagttagctcccggggttcttcccaggctggtttttctagtttcatcttcatgtagtgcagtgaattccatatagagcaagagtctcttccacagtaggagtttctccctaccctgtcagggctgctcgcgacagccgtctgggaaagaccgtgagcctcacagcatggcccagggaagagtccctgagtgtgcctggaccaagatgggtcactagagtggtagtattgtctaattcctaggctaggagagtgtttccattaagagcctttttatttttatttatttatttatttttgagacagagtcttgctctgtcacccaggctggagtgcagtggtacgatcatggctcactgcagcctcgacctgccaggctcacacaatcttcctgccgcagcctcctgagtagctgggactgcaggtgcacaccaccaagcccttttttgatttttagtagagacaaagtcttgctatgttgtccaggctggtctcaaactcctagtctcaagcacttggcctcccaaagtgctcagattacaggcgtaagccactgctccttaccagtaagtgcccttttaaagtaaatgggattcacttgaactttctataaaagatccgtagtggaagtccttagggatttgagatgatgaactattatgtaaaattataaatgagcaaaatgttgttttttgtattgttaatcaaatcagaaactggtttaaaagatttacaaaattcacaagggtatgaaaaacagaggttgtatttactgattggtctgtttaatggaaattgtctaatggaattgtctcatattttcaaatgggattttgttttcatggaatttaattagtctgattataatttacaagttcttttaaaaagtacaggagcagctttttaaagtttgagaaacagaaaaaagtaattgactaaagaaatttacaactaacatgcctggtccactattttcctcatagcagtgcctgtatcacaagcatacttatccaccatgaatctgtgtgtgcttttgcaagttgacattattgcttcctgagtgaagctgtagaaaccatttctatctagcaatgccgaattcttgatcttggttccttctgtttgactctcattagttttagcataaacaggtaaatgtgcttttttaaaagtatatttcaaaaaacaactccataaaattacatatctgtcaatctttgttttatttctatgttactgttggaagctagctgttaattttgtttaggttgaaatggttttaccttttaaaaacctacccccgcccttgctccaacagcattgcatgctggaaaaaacactagagtaagaataagaaatgtgggttcttgctccaggctctgccactaactagtttgtgactttggataagtaatgtagttgtctgtgcctataaatagaagtagtagtagtagtagtagtagtagtagtagtagtagtagtggtcactgctatatggtgagcacttactacaccagcagaaggcctcatcacagccctgaaagttatccccgttttacagatgaggacgagaagtctcagagaggtagaaatttacctgctgtggcacagctgctcagcaagtggtcagggccaagggctgcaagtgaattctttttaactatctttctgtctgttccttagcttactttcaggtttagattgactttgctttgttgaaaatactaatggctcacacacataaaggtcagacatgatggagccctttcctcgttttagaatttggtccttgttacagccctgtgaagatagtgacataattatcctatggtattagtgaaactgattttctttaagtgtgcccctgtcattacttgtcacttgccttttgaattaaaataatgctacaagaactgctttttaatctatatattccatcattcaaattcaagtgtcttaagccttttacataccaaaataggtatatttgaatacaggagaagtcaaagaaaggcaatctggaccagaattctgatttttctgggtagtaaagtttccttcagaatgctggtggccagcataggattgccagttctttattttgccaagtaagaacataaaaaaaaaaaaaaaa

SEQ ID NO: 1536 - DNA, 1793 bp, Homo sapiens
acgcttgtcacttacctgagcgcagccaatcagcacctagaggttgggctactttcggccaaaggagaacggggacttgtgggggacgctccctgcgcaccaatgaatgtgcatggagatggagaggcgggcctgcaagtgcgaacaagccaatcacggaatcccggcggccggcggcccgggaggcagtcgcgcgctcgcatccccaagatggcggccgttaaggacagttgtggcaaaggagaaatggccacagggaatgggcggcggctccacctggggattcctgaggccgtgtttgtggaagatgtagattccttcatgaaacagcctgggaatgagactgcagatacagtattaaagaagctggatgaacagtaccagaagtataagtttatggaactcaaccttgctcaaaagaaaagaaggctaaaaggtcagattcctgaaattaaacagactttggaaattctaaaatacatgcagaagaaaaaagagtccaccaactcaatggagaccagattcttgctggcagataacctgtattgcaaagcttcagttcctcctaccgataaagtgtgtctgtggttgggggctaatgtaatgcttgaatatgatattgatgaagctcaggcattgttggaaaagaatttatcgactgccacaaagaatcttgattccctggaggaagaccttgactttcttcgagatcaatttactaccacagaagtcaatatggccagggtttataattgggatgtaaaaagaagaaacaaggatgactctaccaagaacaaagcataatgctggcaattaaaaatgtggtttagttttccaaacatgttatcttaaatacccctttatccttacaggttgacataactttgaatgttttaacagcaagaattttaagaaaagataaacaccattttatttatttataaaaacaaaattagtttcaaatatttttgacattgtgatttttttttccacatttctcagcaaagctaatggtattttaatcattatttttgcctgtcataagaaaactcttagctgaaatggccgaaaactgtgagacatgctatggaagctgaatgccggacgctagcacagtttactttttccctttctaatcggctgatgttactctcacttgatgtggttaaaccattttagaggtagagaagacagacagtttgaatatttgtaaacttgtttttctttggtatatttaggacttagtggtcctctgttgctattgtcttctataagtggagtttcatgacttactgcttaacgaataactaactactatgatattctggacattttaggaaatggtaatttgccttgctacacattaagagggctattaagactacattttttctaacctcagataagtgcagtgtctttgcaatgccaacataagggagatcttggccaacgtgaaataaaattactcattcaaaactctgcctaaggtgattttgtagttcttaacagttctccagagcatcttgaacaggaatattaagataaatgtgaatctgcaatggctgaaaagagttgtgagcttttttattcatgataaaaccttataggaatagtataaaaaatccctgtggaaagctactagtacattgaccagcgctgggtgatacagattctgataaaaacataaatgtattagttcatctccatgtagtaaaaagtatacttatacaatgttttgtacttgtatttcatgaaattaaaacagtgatgctaaaactaaaaaaaaaaaaaaa

SEQ ID NO: 1537 - DNA, 6541 bp, Homo sapiens
agccgtttccggagtctgcgctgcgcccggttccgccattgcggctctcctggcccctggagcctccgcccccgacccgagctctttcgtctgcctgccagtttcctgcgtccccggagaggatcctgctgagcccagcctcccccctccccttctcctcctctcccttggagagcccgggcagccactgccccgcagccccagtgacaggaggagaccataacccccgacagcgccatggcccagattctgccaattcgttttcaggagcatctccagctccagaacctgggtatcaacccagcaaacattggcttcagtaccctgactatggagtctgacaaattcatctgcattagagaaaaagtaggagagcaggcccaggtggtaatcattgatatgaatgacccaagtaatccaattcgaagaccaatttcagcagacagcgccatcatgaatccagctagcaaagtaattgcactgaaagctgggaaaactcttcagatttttaacattgaaatgaaaagtaaaatgaaggctcataccatgactgatgatgtcaccttttggaaatggatctctttgaatacggttgctcttgttacggataatgcagtttatcactggagtatggaaggagagtctcagccagtgaaaatgtttgatcgccattctagccttgcagggtgccagattatcaattaccgtacagatgcaaaacaaaagtggttacttctgactggtatatctgcacagcaaaatcgtgtggtgggagctatgcagctatattctgtagataggaaagtgtctcagcccattgaaggacatgcagctagctttgcacagtttaagatggaaggaaatgcagaagaatcaacgttattttgttttgcagttcggggccaagctggagggaagttacatattattgaagttggcacaccacctacagggaaccagccctttccaaagaaggcagtggatgtcttctttcctccagaagcacaaaatgattttcctgttgcaatgcagatcagtgaaaagcatgatgtggtgttcttgataaccaagtatggttatatccacctctatgatcttgagactggtacctgcatctacatgaatagaatcagtggagaaacaatttttgttactgcacctcatgaagccacagctggaataattggagtaaacagaaagggacaagttctgtcagtgtgtgtggaagaagaaaacataattccttacatcaccaatgttctacaaaatcctgatttggctctgagaatggctgtacgtaataacttagccggtgctgaagaactctttgcccggaaatttaatgctctttttgcccagggaaattactcggaggcagcaaaggtggctgctaatgcaccaaagggaattcttcgtactccagacactatccgtcggttccagagtgtcccagcccagccaggtcaaacttctcctctacttcagtactttggtatccttttggaccagggacagctcaacaaatacgaatccttagagctttgtaggcctgtacttcagcaagggcgaaaacagcttttggagaaatggttaaaagaagataagctggaatgttctgaagaactgggtgatcttgtgaaatctgtggaccctacattggcacttagtgtgtacctaagggctaacgtcccaaataaagtcattcagtgctttgcagaaacaggtcaagtccaaaagattgttttatatgctaaaaaagttggatacactccagattggatatttctgctgagaaatgtaatgcgaatcagtccagatcagggacagcagtttgcccaaatgttagttcaagatgaagagcctcttgctgacatcacacagattgtagatgtctttatggaatacaatctaattcagcagtgtactgcattcttgcttgatgctctgaagaataatcgcccatctgaaggtcctttacagacgcggttacttgagatgaaccttatgcatgcgcctcaagttgcagatgctattctaggcaatcagatgttcacacattatgaccgggctcatattgctcaactgtgtgaaaaggctggcctactgcagcgtgcattagaacatttcactgatttatatgatataaaacgtgcagtggttcacacccatcttcttaaccctgagtggttagtcaactactttggttccttatcagtagaagactccctagaatgtctcagagccatgctgtctgccaacatccgtcagaatctgcagatttgtgttcaggtggcttctaaatatcatgaacaactgtcaactcagtctctgattgaactttttgaatctttcaagagttttgaaggtctcttttattttctgggatccattgttaactttagccaggacccagatgtgcactttaaatatattcaggcagcttgcaagactgggcaaatcaaagaagtagaaagaatctgtagagaaagcaactgctacgatcctgagcgagtcaagaattttcttaaggaagcaaaactaacagatcagctaccacttatcattgtgtgtgatcgatttgactttgtccatgatttggtgctctatttatatagaaataatcttcaaaagtatatagagatatatgtacagaaggtgaatccaagtcgacttcctgtagttattggaggattacttgatgttgactgttctgaagatgtcataaaaaacttgattcttgttgtaagaggtcaattctctactgatgagcttgttgctgaggttgaaaaaagaaacagattgaaactgcttctgccttggctagaggccagaattcatgagggctgtgaggagcctgctactcacaatgccttagccaaaatctacatagacagtaataacaacccggagagatttcttcgtgaaaatccctactatgacagtcgcgttgttggaaagtattgtgagaagagagatccacatctggcctgtgttgcttatgaacgtggccaatgtgatctggaacttattaatgtttgcaatgagaattccctcttcaaaagtctttctcgctacctggtacgtcgaaaggatccagaattgtggggcagcgtgctgctggaaagcaatccttacaggagacccctaattgaccaggttgtacaaacagctttgtctgagactcaggaccctgaagaagtgtcagtaactgtaaaggctttcatgactgcagaccttcctaatgaactcattgaactgctggagaaaattgtccttgataactctgtattcagtgaacacaggaatctgcaaaacctccttatcctcactgcaattaaggctgaccgtacacgtgttatggagtatattaaccgcctggataattatgatgccccagatattgccaatatcgccatcagcaatgagctgtttgaagaagcatttgccattttccggaaatttgatgtcaatacttcagcagttcaggtcttaattgagcatattggaaacttggatcgggcatatgagtttgctgaacgttgcaatgaacctgcggtctggagtcaacttgcaaaagcccagttgcagaaaggaatggtgaaagaagccattgattcttatatcaaagcagatgatccttcctcctacatggaagttgttcaggctgccaatactagtggaaactgggaagaactggtgaagtacttgcagatggcccgtaagaaggctcgagagtcctatgtggagacagaactgatattcgcactggctaaaacaaaccgccttgcagagttagaagaatttatcaatggaccaaataatgctcatatccaacaagttggtgaccgttgttatgatgaaaaaatgtatgatgctgctaagttgttgtacaataatgtttccaattttggacgtttggcatctaccctggttcacctgggtgaatatcaggcagctgttgatggggctaggaaagctaacagtactcgaacatggaaagaggtctgcttcgcctgtgtagatgggaaagaattccgtcttgctcagatgtgtggacttcatattgttgtacatgcagatgaattagaagaacttatcaactactatcaggatcgtggctattttgaagagctgatcaccatgttggaagcagcactgggacttgagcgagctcacatgggaatgtttactgaattagctattctatactctaaatttaagcctcagaaaatgagggagcacctggagctgttctggtctagagtgaatattcccaaggtgctaagagctgcagaacaagctcatctttgggcagaactggtgtttttgtatgacaagtatgaagaatatgataatgccataattaccatgatgaatcatccaactgatgcctggaaagaagggcaattcaaagatatcattaccaaggttgccaatgtggaactatactacagagcaatacagttctacttagaattcaagcctctgttgttaaatgatttgctgatggtgctgtctccacggttggatcacactcgtgcagtcaattatttcagcaaggttaaacagctaccactggtgaaaccgtatttgcgttcagttcagaaccataacaacaaatctgtgaatgaatcattgaacaatctttttattacagaagaagattatcaggctctgcgaacatcaatagatgcttatgacaactttgacaatatctcgcttgctcagcgtttggaaaaacatgaactcattgagttcaggagaattgctgcttatctcttcaaaggcaacaatcgctggaaacagagtgtagagctgtgcaagaaagacagcctttacaaggatgcaatgcagtatgcttctgaatctaaagatactgaattggctgaagaactcctgcagtggtttttgcaggaagaaaaaagagagtgctttggagcttgtctgtttacctgttacgatcttttaaggccagatgtcgtcctagaaactgcatggaggcacaatatcatggattttgccatgccctatttcatccaggtcatgaaggagtacttgacaaaggtggataaattagatgcttcagaatcactgagaaaagaagaagaacaagctacagagacacaacccattgtttatggtcagccccagttgatgctgacagcaggacccagtgttgccgtccctccccaggcaccttttggttatggttataccgcaccaccgtatggacagccacagcctggctttgggtacagcatgtgagatgaagcgctgatcctgtagtcacctattttcgtactgaaacatcgtctttacccacttctcagtttataatgggggaaaacaggcaacgtgttcttgtaacctttatttcatgaaggacttctttttgtttctaactataaacttggatcacctatgttaaaaccttatttcacattccacatcattttagaatttattttcgaaggggaatagtttcaatgttttattcacttgggctttttttcttccccctctttctttaaagaactgctcaatattcaatctgttgtgaagaacctgatttgcactctgtagtgtttaaagaaacaaagaaactctaatattgaatctcttaaatttagtgtatgtaaacagcttacaaatacgtattgtctaaatgcatttaaatctgttttattcaaagaaaagctaaagcaaaaacactggcatatgaccatgcaagactgtcagtgccaacaaagacaacactaatcagcacatcgtacactggattgcagtgcttcccagattattgaaaaatgttacagacaacttgcctgatttttaaatgagcgtaaaaggccctctaacctatgcaggtttccccattatgcatatagaaaatgctagtatgttttgctcacttcatatgtaacaggtgcccttatgttgtgctgtatcctgtgctttttctgtgggaccattccattcaggagcaaagagcaccatgattccaatcttgtgtgtgtttactaacccttccctgaggtttgtgtatgttggatattgtggtgttttagatcactgagtgtacagaagagagaaattcaaacaaaatattgctgttcttcagttttgtttgtggaatttgaaattactcaaatttaaaataaattactggactgtggaaataacatagaattgaagttttaattaaataccactcaaacgaaaagaacagtagtttttgtagttttatattggatactgaggcattagggaggcatgaaaggaagaggaatgaggattgagacatgtgaagacattgtgcattatatcaatgtgcattcctgtagttcattaacaaggtacatgcaatagtctaaagaaccagagtcactactatagtggcttaacatttaatctgtctccaatattttaaccaagtgacaccgaggtttttatcgaagcatttcacttaaatgaacaaatcatggctgttatattaacttgaaataaaatatatttaaacatgtaaaaaaaaaaaaaaaaa

SEQ ID NO: 1538 - DNA, 1787 bp, Homo sapiens
ttcttgacttgatgcaggcacagatttatcaagctcctcagtcaacaaacacatcaccggaagaaacatggaaggaaaggaattttaaaaggaaataccaatctctgtgcaaacaaagccttgtatattcatgtttgcaccaatctactgtgagatttatgaagaaaaacaaattgcggacaactctctatgtacacttacaaatgcctcagttgatgcttgtgggctgtttgtcagcgttctgtgataatgaacacatggacttctgtttattaaattcagttgacccctttagccaattgccaggagcctggatttttacttccaactgctgatatctgtgtaaaaattgatctacatccaccctttaaaagcattgatgaattaattagaactttagacaacaaagaaaaattgaaaaagaattctcagtaaaagcgaattcgatgttcaaaacaaactacaaagagacaagacttctctgtttactttctaagaactaatataattgctaccttaaaaaggaaaaaatgaacagcacatgtattgaagaacagcatgacctggatcactatttgtttcccattgtttacatctttgtgattatagtcagcattccagccaatattggatctctgtgtgtgtctttcctgcaagcaaagaaggaaagtgaactaggaatttacctcttcagtttgtcactatcagatttactctatgcattaactctccctttatggattgattatacttggaataaagacaactggactttctctcctgccttgtgcaaagggagtgcttttctcatgtacatgaatttttacagcagcacagcattcctcacctgcattgccgttgatcggtatttggctgttgtctaccctttgaagttttttttcctaaggacaagaagatttgcactcatggtcagcctgtccatctggatattggaaaccatcttcaatgctgtcatgttgtgggaagatgaaacagttgttgaatattgcgatgccgaaaagtctaattttactttatgctatgacaaataccctttagagaaatggcaaatcaacctcaacttgttcaggacgtgtacaggctatgcaatacctttggtcaccatcctgatctgcaaccggaaagtctaccaagctgtgcggcacaataaagccacggaaaacaaggaaaagaagagaatcataaaactacttgtcagcatcacagttacttttgtcttatgctttactccctttcatgtgatgttgctgattcgctgcattttagagcatgctgtgaacttcgaagaccacagcaattctgggaagcgaacttacacaatgtatagaatcacggttgcattaacaagtttaaattgtgttgctgatccaattctgtactgttttgtaaccgaaacaggaagatatgatatgtggaatatattaaaattctgcactgggaggtgtaatacatcacaaagacaaagaaaacgcatactttctgtgtctacaaaagatactatggaattagaggtccttgagtagaaccaaggatgttttgaagggaagggaagtttaagttatgcattattatatcatcaagattacattttgaaaaggaaatctagcatgtgaggggactaagtgttctcagagtgatgttttaatccagtccaataaaaatatcttaaaactgcattgtacagctccctccctgcgttttattaaatgatgtatattaaacaaagatcaataaaaaaaaaaaaaaaaaaaaaaaaaaaaaaaaaa

SEQ ID NO: 1539 - DNA, 2768 bp, Homo sapiens
ccggatcgggaagtgtcaagcgggcgctcccccatctccgccgctattaccactgaacccggaccccctacccaggtccagggccagccgccatgacgaacgtgtactccttggatgggattctggtgtttggtttgctctttgtttgcacctgtgcctacttcaagaaagtacctcgtctcaaaacctggctgctatcagagaagaagggtgtttggggtgtgttttacaaagccgctgtgattggaaccaggctgcatgctgctgtggcaattgcttgtgttgtaatggccttttacgtcctgtttataaaatgaattccaaagcacccaagtcatcaactgccaaccaaggggacggggatgaagaacctgttggagacctgaacccagtgtaggagagttcagctgaaatcatcggtccccaggatgacaccacagcatctgcccctgctatatgtggggaaaactcatggtcacgaacattatttatgcttcaggggactacagaaagccagcttcctttgatctatgtgtaaatcagtccttggcagagtgcatataatgtccggataaattacacccctcggtgataagattacatacctccttcataaaaacctgtcatcctgttttgttcttcagctcctcatcaggatcttttcaaactgaggctcattagggaaggaactaggctgtgttcagacttcttttgaagagagagaattttcaagacttcttttcactctttgatttggatctggcaaattggggaggggatgctgggtgggaaacagttatgaaatgccaagaaattctttggctttagaaatttatctttcatgtacccatccgggaacataaaagagaggcatagtgctcattgcaaaaagagaacagatgaagtagctgtgttatgtgctggtatcttgagagttttgccaagaaaatctgggcctacataaaatttgagaattatctgtgtgatgagaccagaaagcagtggcttagacaagaaaaaatctttctgttcaccagtatcctcaaatggagacttcacttgatcagatggtatatgaaaaatgaatcaactattgctatttcgtaaaacctttttatattttctaaatttacttagtgctaaatactgttactcagttttaaatgccacgactaggggaaaaagaaactattgaagaaataattgtttagtatatttgcagttggggtagaagaaagaaatctagtatattgattcatatactagtaaattcatctagtataagaacttgtgatgttagattgaagttttgtcatcttataaaagacaacaaacttattttctgtttaagtctgagtgttatggcaatttttagttgattacttatttttcttagccaaattttaattttcttcatattgcattgctctttagttgtctctggaaattctatttactttaaggacatgagaaattcaaatgagagaagttgctgatattcatcagtgtgtttggacagttcatagggtccacaaatcaaatgaggttgtttcctgaagtagaagaaaacagaactttgcaattgatactgaagtactttgccatggagttagtaactcctgagcagaccattttagatggctcagcatttggcaggaagacttctccattccctgcttatatctatggaaggatcagctgttggatgtctagaacttctctatttaaaaaaaaagagtaggtctaaaattaaattattataagcaagcatagacatgggtcttccagttgaattgtccattaccgtaaaacttaatggtggacaagttagctgtggttgattcctgtgtggcagtaaattgtcttctgtctgcttactccaaataataaaagctgctaggaagtttagattttgaaataggcagtttaatgctttgagggtttctagaaatacagaaagtcatcaagtaaacactgcatgtctaatcatctcagagttgtggctgttatctcttcaggaattggtccacagggtaaatttcaacaattcatacgttttccattgtcatttctgaggacctttgagatgagagaaaggaaatctagtggaacaggaaagagagttacaccttgtgggtgtgagtttgggacctgttggcagaagggaatgtcactccctggaaacaggttcagcatgtttgcacttgttattttgtagctttaatgatttttgttttctaatagggcaaatgtctctaagcttggtgtttagagctgcttcatattttaaactagttccattccacagttctagttcaaaccagtttttacagcctcctgggtgggtcgtcttgacccaaactcttgtgttgttacattttgagaggttttcataccagaatgtaccaaaaagtgcacaaggtaaaggtaatttacagccagaaacaaatatacatttgtttcatttcttgactttccctaagcagataagcagaaacttgtttaactcattactttgtttgatgtgtcttacatatttttgactaaaagttatagaatgttattcctctgggggaatcttttacaggtggaggaatggggatagcagtattgcctcagattcaaactggcatcaccataaaccctgtaggccagggtggaatgaagtcagctcctttttatagttgaaatacaattttttattcaccattgtctgcacaaatccttgaaaataaacctttttttccctaaaaaaaaaaaaaaaaaaa

SEQ ID NO: 1540 - DNA, 2154 bp, Homo sapiens
tccgcttccgtccacttggcgagtgagacgctgatgggaggatggacgtactggtgtctgagtgctccgcgcggctgctgcagcaggaagaagagattaaatctctgactgctgaaattgaccggttgaaaaactgtggctgtttaggagcttctccaaatttggagcagttacaagaagaaaatttaaaattaaagtatcgactgaatattcttcgaaagagtcttcaggcagaaaggaacaaaccaactaaaaatatgattaacattattagccgcctacaagaggtctttggtcatgcaattaaggctgcatatccagatttggaaaatcctcctctgctagtgacaccaagtcagcaggccaagtttggggactatcagtgtaatagtgctatgggtatttctcagatgctcaaaaccaaggaacagaaagttaatccaagagaaattgctgaaaacattaccaaacacctcccagacaatgaatgtattgaaaaagttgaaattgctggtcctggttttattaatgtccacttaagaaaggattttgtatcagaacaattgaccagtcttctagtgaatggagttcaactacctgctctgggagagaataaaaaggttatagttgacttttcctcccctaatatagctaaagagatgcatgtaggccacctgaggtcaactatcataggagagagtataagccgcctctttgaatttgcagggtatgacgtgctcaggttaaatcatgtaggagactgggggacccagtttggcatgctcatcgctcacctgcaagacaaatttccagattatctaacagtttcacctcctattggggatcttcaggtcttttataaggaatctaagaagaggtttgatactgaggaggaatttaagaagcgagcatatcagtgtgtagttctgctccagggtaaaaacccagatattacaaaagcttggaagcttatctgtgatgtctcccgccaagagttaaataaaatctatgatgcattggacgtctctttaatagagagaggggaatccttctatcaagataggatgaatgatattgtaaaggaatttgaagatagaggatttgtgcaggtggatgatggcagaaagattgtatttgtcccagggtgttccataccattaaccatagtaaaatcagatggaggttatacctatgatacatctgacctggctgctattaaacaaagactatttgaggaaaaagcagatatgattatctatgttgtggacaatggacaatctgtgcacttccagacaatatttgctgctgctcaaatgattggttggtatgaccctaaagtaactcgagtcttccatgctggatttggtgtggtgctaggggaagacaagaaaaagtttaaaacacgttcgggtgaaacagtgcgcctcatggatcttctgggagaaggactaaaacgatccatggacaagttgaaggaaaaagaaagagacaaggtcttaactgcagaggaattgaatgctgctcagacatccgttgcgtatggctgcatcaaatatgctgacctttcccataaccggttgaatgactacatcttctcctttgacaaaatgctagatgacagaggaaatacagctgcttacttgttgtatgccttcactagaatcaggtctattgcacgtctggccaatattgatgaagaaatgctccaaaaagctgctcgagaaaccaagattcttttggatcatgagaaggaatggaaactaggccggtgcattttacggttccctgagattctgcaaaagattttagatgacttatttctccacactctctgtgattatatatatgagctggcaactgctttcacagagttctatgatagctgctactgtgtggagaaagatagacagactggaaaaatattgaaggtgaacatgtggcgtatgctgctatgtgaagcagtagctgctgtcatggccaaggggtttgatatcctgggaataaaacctgtccaaaggatgtaatccttcataggtttgaacactgtgtgtttttaccaaagtggccattggcactgtttgcttttttacaatcatgtggacacaagcataagtaaagaaaatttgtcaaccaggcaaaaaaaaaaaaaaaaaa

SEQ ID NO: 1541 - DNA, 1819 bp, Homo sapiens
atggggcggggcctctgggaggcgtggcctccggccggctcctctgctgttgccaagggaaactgccgcgaggaggcggaaggagcagaggaccggcagccggcgtcgaggcggggcgcgggaacgacggcggccatggcggcctcggggcccgggtgtcgcagctggtgcttgtgtcccgaggtgccatccgccaccttcttcactgcgctgctctcgctgctggtttccgggcctcgcctgttcctgctgcagcagcccctggcgccctcgggcctcacgctgaagtccgaggcccttcgcaactggcaagtttacaggctggtaacctacatctttgtctacgagaatcccatctccctgctctgcggcgctatcatcatctggcgctttgctggcaatttcgagagaaccgtgggcaccgtccgccactgcttcttcaccgtgatcttcgccatcttctccgctatcatcttcctgtcattcgaggctgtgtcatcactgtcaaagctgggggaagtggaggatgccagaggtttcaccccagtggcctttgccatgctgggagtcaccaccgtccgttctcggatgaggcgggccctggtgtttggcatggttgtgccctcagtcctggttccgtggctcctgctgggtgcctcgtggctcattccccagacctctttcctcagtaatgtctgcgggctgtccatcgggctggcctatgctcacctactgctattccatcgacctctcagagcgagtggcgctgaagctcgatcagaccttccccttcagcctgatgaggaggatatccgtgttcaagtacgtctcagggtcttcagccgagaggagggcagcccagagccggaaactgaacccggtgcctggctcctaccccacacagagctgccaccctcacctgtccccaagccaccctgtgtcccagacgcagcacgccagtggtcagaagctggcctcctggcctcctgcacccccgggcacatgcccaccttgcctccgtaccagcctgcctccggcctgtgctatgtgcagaaccactttggtccaaaccccacctcctccagtgtctacccagcttctgcgggcacctccctgggcatccagccccccacgcctgtgaacagccctggcacggtgtattctggggccttgggacaccaggggctgcaggctccaaggagtcctccagggtccccatgccctgagagaatttctagggaagtcatctcacttggccttctgaaggtcctccctaagagtctcctgacaaaagttacttattgaacacctctatgtgccaggctctgtgttgggtactttgatcaatgcccctgtttcagtctcatctgtactcacggcagccctgtggagtacggtgtactggcccagcttacagatgcagaaagcgagacgttctgccatcagataaagtcacgtggctctttagtaacacggacaaggctcctcgccaaggaactcgtggcagaagagggcagcagttggcagtagctgccgatgtctgtccccagctccaccattcctccctgtggctgtgccatgctcgtggtttcagtgtccgtgtgtccatgtgtctgcccttcaggagctcgcagctggtgtgcttggcggtcccaggcctgtgtagtgtctctcccctgctgcgggcgcccccaccccgattcctctccccagaagcggtgggatgggcccccatgaactgcagcagcatgctgaggtgtccatgttgtctgcctttgtataaagaaacagcctctgaaaagaaaagaaaaagtcgacg

SEQ ID NO: 1542 - DNA, 1645 bp, Homo sapiens
agtcaagatggaggagtacgcgcgagagccttgcccatggcgaattgtggatgactgtggtggggcctttacgatgggtaccattggtggtggtatctttcaagcaatcaaaggttttcgcaattctccagtgggagtaaaccacagactacgagggagtttgacagctattaaaaccagggctccacagttaggaggtagctttgcagtttggggagggctgttttccatgattgactgtagtatggttcaagtcagaggaaaggaagatccctggaactccatcacaagtggtgccttaacgggagccatactggcagcaagaaatggaccagtggccatggttgggtcagccgcaatgggtggcattctcctagctttaattgaaggagctggtatcttgttgacaagatttgcctctgcacagtttcccaatggtcctcagtttgcagaagacccctcccagttgccttcaactcagttaccttcctcaccttttggagactatcgacaatatcagtaggacttctttcctaggatttctttaacagaacgagttgtggttcgagaaggatttcagaagatcaagttacagtctgtttttaaaaccataggtgggacagctatggccaataggctataaagagacatttagcacttttttctatttaaaggaacaagcggggaagggtgctaaaagataatacgtttatttattcacacttgaattgcatttgtgatcaaaataaatgtttaaatcgctaaaggaaaatacagtaagtgcttgaaagatgaaggaccaaaaggccaaaaaacagtgaaatatgatcatcatctcttgcggacttctctgcctggttttgtgtgttctgttattcaaacaataaaaagctggtggaacttactctttcttttaagataagttgtagacttcgatgtttcatgctcatgtacttcaaataatgcatgttttatagttagtccctcatcacttgaagtgacttctgagaattatgcagagtcaacatggatcatttcacagtgagatgctttatggattgaaggatatggtaaaatgtttatagtttactttgaaagtaaaatatactatgtcttggttttgaggatattggatacaaaactctcttcctttagggctactgagtcttgattcctgatcatcagaaatttcaccagaaacaacttgcttccaatatacccaattctatatgaagaattcatggagagtgtactggcactggaagagtttagtgtttcttgtatgcttgaaaataaagtatgtactgttttgaatgtgttccaagtcctctgcataaacgatgtattttggggtctggttgggcctggaaaatggatgagcacttcagaacaggtcattttcctgatattggaagtgacatgtggccctataggaggcatgatgttagttaattacacatttgcctacatctgtgggaaatggagaacaaagccatgtgggtactgtaaacacacgtttatcttttggcccaatgccatacatatggtaggcatttaattactgattgtgtttggataatttgggaattttcgactgtggtaaaatatacataaaataatacttattaaaaaaaaaaaaaaaaaa

SEQ ID NO: 1543 - DNA, 4187 bp, Homo sapiens
cgtagcgcccgcagagcaacgcaaagaggaagaacagagaaacggctatgagaaaaagggccgaagagtgagaagcagagggccttacccgagggggcggcaaccgggggccccacggtctccggccgcgcccgcgctggccgctgatagcgggctcacaacgatgacgtagcgaggagcggaaaacgcggtaaccaaggcggccccaggcgcgcacttccgcccggccttccaccggtccaggtctgcccctccgcagcgatagttcacgctctcggcggggctgtaccggaagttgcctctacttccgcccgttccggggcggggcttacttcgcagcgactacttgccgcacttccgggctgccaggcagctgctgtggctccaggatgatggagacagagcgacttgtgctaccccctccagatcccctggacctaccccttcgggccgtggagctcggatgcacggggcactgggagctgctgaacttgcctggagctccagagagtagccttccccatggcctccctccttgtgccccagatctgcagcaagaagcagaacagttgtttctgtcatccccagcctggctgcctctgcatggtgtggagcactcagcccgaaaatggcagaggaagacggatccctggtctcttttggctgtcctgggagccccagtcccatccgacctacaggcccaaagacacccaaccacaggccagatactgggttacaaagaggtcttgctggagaacacaaatctctcggctacaacctccttgtctcttcgccggcctccagggccagcctcccagtccttatggggaaatccaactcagtatcccttctggccaggggggatggatgaacccaccataacagatctgaacacacgggaggaggctgaggaggagatagactttgagaaagatcttcttactattccacctggtttcaagaaaggcatggactttgcaccaaaagattgtccaactccagctcctggactactaagccttagctgtatgttggagcctctggatttgggtgggggtgacgaggatgagaatgaggcagtgggacagccaggaggtcccagaggggacactgtttcagcctctccctgcagtgctcccctggcccgagcaagcagcttggaagacctagtgttgaaggaagcgtccacagctgtatccaccccagaggccccagagcctccatctcaggagcagtgggccatccctgtggacgccacctcccctgttggtgatttctatcgcctcattccccagccagccttccagtgggcatttgagccagatgtgtttcagaaacaggccatcctgcacttggaacggcatgactctgtctttgtcgcagctcacacatctgcaggaaaaacagttgtggctgaatatgccattgccctggcccagaaacacatgacacgcaccatctacacttcgcccatcaaggccctgagcaaccagaagttccgggacttccgaaacacattcggggatgtggggctgctcaccggggatgtacagctgcatccggaggcctcctgcctcatcatgaccacagagatccttcgctccatgctgtacagtggctcagatgttattcgggacctggagtgggtcatctttgatgaggttcactatatcaacgatgtcgagcgtggggtcgtgtgggaggaggtgcttatcatgctacctgaccacgtttctatcatccttctgagtgccaccgtccccaacgcccttgagtttgctgactggattgggcggctgaagcgtcgtcagatctatgtgattagcactgtaacccgccccgtgcccctggagcactatcttttcacagggaacagctccaagacccagggggagctctttttgttgctggactcccgaggagccttccatacaaaagggtactatgcagctgtggaggccaagaaggagagaatgagcaaacacgcccagacctttggggccaagcagcccacacatcaggggggccctgcacaggaccgcggagtgtacctgtccctcctggcctccctccgcacacgtgcccagttgcccgtggtggtgttcaccttctcccggggccgctgtgatgagcaggcctcaggcctcacctcccttgacctcaccaccagttcggagaagagcgagatccacctcttcctgcagcgctgccttgctcgcctccgtggctctgaccgccagctgccccaggtcctgcacatgtcagagctcctgaatcgcggcctgggtgtgcaccatagcggcatcctgcccatcctcaaggagatcgtggagatgctcttcagccgtggcctggtcaaggtcttgtttgccacagagacctttgccatgggagtaaacatgcctgctcgtacagtagtgtttgactccatgcgcaaacacgatggctccaccttccgggacctgctccctggggagtatgtgcagatggcaggccgggcagggcggaggggcctggaccccacaggcaccgttatcctgctctgcaagggccgagtgcccgagatggcagacctgcaccgcatgatgatggggaagccgtcccagctgcagtcccagttccgcctcacgtacactatgatcctcaacttgctgcgagtggatgccctcagggtggaggacatgatgaagaggagcttctctgagtttccctcccgcaaagacagcaaggcccatgaacaggccctggctgaactgaccaagaggctgggagctttggaggagcctgacatgactggccaactggtcgacctgcctgaatattacagctggggggaggaactgacagagacccagcacatgatccagcgacgcatcatggagtctgtgaacgggctgaagtctctctcagcaggaagggtggtggttgtgaagaatcaggagcatcacaacgcattgggagtgatcctacaggtctcctcgaactccaccagcagagtattcacaaccctggtcttgtgtgataagcccttgtcccaggacccacaggacagggggccagccactgcagaggtgccctatccagatgacctcgtgggattcaagctgttcctgcctgaagggccttgtgaccacaccgtggtcaagctccagccaggagatatggctgccatcaccaccaaggtgctccgggtgaatggggagaagatcttggaggacttcagcaagaggcagcagccaaaattcaagaaggatcctccccttgcagccgtgaccactgctgtccaggaactgctgcgtctggctcaggcccacccagccggacctcccaccctcgaccctgtcaatgacctgcagctcaaagatatgtcagttgtagagggtgggctccgggcccggaagctggaggagctgatccagggggctcagtgtgtacacagcccccgttttcctgcccagtacctgaagctgcgggagcgaatgcagatacagaaggagatggagcggctgcgcttcctactgtcggatcagtcattgctgctgcttcctgagtaccatcagcgagtagaggtgctccgaaccctgggttatgtggacgaggcgggcactgtgaagctggcagggcgggtggcttgtgccatgagcagccatgagttgctcctcactgagctcatgtttgacaatgcactgagcaccctgcggcctgaggagattgctgccttgctctctggcctggtctgccagagccctggggacgctggggatcagctcccaaacaccctcaagcagggaatagaacgtgtccgggctgtggccaagcggattggtgaggtccaggtggcttgtggcctgaaccagacggtggaggaatttgtgggggagctgaattttgggctggttgaggttgtatatgagtgggcccggggcatgcccttctccgagttggcagggctctcagggacccctgagggcctggtggtccgctgcattcagcgcctggctgagatgtgtcgctcactgcggggggcagcccgcctggtaggagagcctgtgctgggtgccaagatggagacagcggctaccttgctacggcgggacatcgtatttgcggccagcctctacacccagtgaatgccccatgtaaaaacatgatgataaaacagcaaagcacaaaaaaaaaaaaaaaaa

SEQ ID NO: 1544 - DNA, 2709 bp, Homo sapiens
gggaatagcagaataggagcaagccagcactagtcagctaactaagtgactcaaccaaggccttttttccttgttatctttgcagatacttcattttcttagcgtttctggagattacaacatcctgcggttccgtttctgggaactttactgatttatctcccccctcacacaaataagcattgattcctgcatttctgaagatctcaagatctggactactgttgaaaaaatttccagtgaggctcacttatgtctgtaaagatgggaaaaaaatacaagaacattgttctactaaaaggattagaggtcatcaatgattatcattttagaatggttaagtccttactgagcaacgatttaaaacttaatttaaaaatgagagaagagtatgacaaaattcagattgctgacttgatggaagaaaagttccgaggtgatgctggtttgggcaaactaataaaaattttcgaagatataccaacgcttgaagacctggctgaaactcttaaaaaagaaaagttaaaagtaaaaggaccagccctatcaagaaagaggaagaaggaagtgcatgctacttcacctgcaccctccacaagcagcactgtcaaaactgaaggagcagaggcaactcctggagctcagaaaagaaaaaaatcaaccaaagaaaaggctggacccaaagggagtaaggtgtccgaggaacagactcagcctccctctcctgcaggagccggcatgtccacagccatgggccgttccccatctcccaagacctcattgtcagctccacccaacagttcttcaactgagaacccgaaaacagtggccaaatgtcaggtaactcccagaagaaatgttctccaaaaacgcccagtgatagtgaaggtactgagtacaacaaagccatttgaatatgagaccccagaaatggagaaaaaaataatgtttcatgctacagtggctacacagacacagttcttccatgtgaaggttttaaacaccagcttgaaggagaaattcaatggaaagaaaatcatcatcatatcagattatttggaatatgatagtctcctagaggtcaatgaagaatctactgtatctgaagctggtcctaaccaaacgtttgaggttccaaataaaatcatcaacagagcaaaggaaactctgaagattgatattcttcacaaacaagcttcaggaaatattgtatatggggtatttatgctacataagaaaacagtaaatcagaagaccacaatctacgaaattcaggatgatagaggaaaaatggatgtagtggggacaggacaatgtcacaatatcccctgtgaagaaggagataagctccagcttttctgctttcgacttagaaaaaagaaccagatgtcaaaactgatttcagaaatgcatagttttatccagataaagaaaaaaacaaacccgagaaacaatgaccccaagagcatgaagctaccccaggaacagcgtcagcttccatatccttcagaggccagcacaaccttccctgagagccatcttcggactcctcagatgccaccaacaactccatccagcagtttcttcaccaagaaaagtgaagacacaatctccaaaatgaatgacttcatgaggatgcagatactgaaggaagggagtcattttccaggaccgttcatgaccagcataggcccagctgagagccatccccacactcctcagatgcctccatcaacaccaagcagcagtttcttaaccacgttgaaaccaagactgaagactgaacctgaagaagtttccatagaagacagtgcccagagtgacctcaaagaagtgatggtgctgaacgcaacagaatcatttgtatatgagcccaaagagcagaagaaaatgtttcatgccacagtggcaactgagaatgaagtcttccgagtgaaggtttttaatattgacctaaaggagaagttcaccccaaagaagatcattgccatagcaaattatgtttgccgcaatgggttcctggaggtatatcctttcacacttgtggctgatgtgaatgctgaccgaaacatggagatcccaaaaggattgattagaagtgccagcgtaactcctaaaatcaatcagctttgctcacaaactaaaggaagttttgtgaatggggtgtttgaggtacataagaaaaatgtaaggggtgaattcacttattatgaaatacaagataatacagggaagatggaagtggtggtgcatggacgactgaacacaatcaactgtgaggaaggagataaactgaaactcaccagctttgaattggcaccgaaaagtgggaataccggggagttgagatctgtaattcatagtcacatcaaggtcatcaagaccaggaaaaacaagaaagacatactcaatcctgattcaagtatggaaacttcaccagactttttcttctaaaatctggatgtcattgacgataatgtttatggagataaggtctaagtccctaaaaaaatgtacatatacctggttgaaatacaacactatacatacacaccaccatatatactagctgttaatcctatggaatgggggtattgggagtgcttttttaatttttcatagtttttttttaataaaatggcatattttgcatctacaacttctataataagaaaaaataaataaacattatcttttttgtgaaaaaaa

SEQ ID NO: 1545 - DNA, 5537 bp, Homo sapiens
gaacccggcgaggaaatacatgcactggctgagaatcgcccgcgccagggcgcaacgccacaaggtgtagggagtgtgcggggtggggcgaaaggggacccaagagtccctgtggctcggagtgccgggccgtcggttcttcattcctgccctcggggcagacggagtgaccccggcccccactccccgccccgaccatggtagtgttcaatggccttcttaagatcaaaatctgcgaggccgtgagcttgaagcccacagcctggtcgctgcgccatgcggtgggaccccggccgcagactttccttctcgacccctacattgccctcaatgtggacgactcgcgcatcggccaaacggccaccaagcagaagaccaacagcccggcctggcacgacgagttcgtcaccgatgtgtgcaacggacgcaagatcgagctggctgtctttcacgatgcccccataggctacgacgacttcgtggccaactgcaccatccagtttgaggagctgctgcagaacgggagccgccacttcgaggactggattgatctggagccagaaggaagagtgtatgtgatcatcgatctctcagggtcgtcgggtgaagcccctaaagacaatgaagagcgtgtgttcagggaacgcatgcggccgaggaagcggcagggggccgtcaggcgcagggtccatcaggtcaacggccacaagttcatggccacctatcttcggcagcccacctactgctcccattgcagagacttcatctggggtgtcataggaaagcagggataccagtgtcaagtctgcacctgcgtggtccacaagcggtgccacgagctcataatcacaaagtgtgctgggttaaagaagcaggagacccccgaccaggtgggctcccagcggttcagcgtcaacatgccccacaagttcggtatccacaactacaaggtccctaccttctgcgatcactgtgggtccctgctctggggactcttgcggcagggtttgcagtgtaaagtctgcaaaatgaatgttcaccgtcgatgtgagaccaacgtggctcccaactgtggagtggatgccagaggaatcgccaaagtactggccgacctgggcgttaccccagacaaaatcaccaacagcggccagagaaggaaaaagctcattgctggtgccgagtccccgcagcctgcttctggaagctcaccatctgaggaagatcgatccaagtcagcacccacctccccttgtgaccaggaaataaaagaacttgagaacaacattcggaaagccttgtcatttgacaaccgaggagaggagcaccgggcagcatcgtctcctgatggccagctgatgagccccggtgagaatggcgaagtccggcaaggccaggccaagcgcctgggcctggatgagttcaacttcatcaaggtgttgggcaaaggcagctttggcaaggtcatgttggcagaactcaagggcaaagatgaagtatatgctgtgaaggtcttaaagaaggacgtcatccttcaggatgatgacgtggactgcacaatgacagagaagaggattttggctctggcacggaaacacccgtaccttacccaactctactgctgcttccagaccaaggaccgcctctttttcgtcatggaatatgtaaatggtggagacctcatgtttcagattcagcgctcccgaaaattcgacgagcctcgttcacggttctatgctgcagaggtcacatcggccctcatgttcctccaccagcatggagtcatctacagggatttgaaactggacaacatccttctggatgcagaaggtcactgcaagctggctgacttcgggatgtgcaaggaagggattctgaatggtgtgacgaccaccacgttctgtgggactcctgactacatagctcctgagatcctgcaggagttggagtatggcccctccgtggactggtgggccctgggggtgctgatgtacgagatgatggctggacagcctccctttgaggccgacaatgaggacgacctatttgagtccatcctccatgacgacgtgctgtacccagtctggctcagcaaggaggctgtcagcatcttgaaagctttcatgacgaagaatccccacaagcgcctgggctgtgtggcatcgcagaatggcgaggacgccatcaagcagcacccattcttcaaagagattgactgggtgctcctggagcagaagaagatcaagccacccttcaaaccacgcattaaaaccaaaagagacgtcaataattttgaccaagactttacccgggaagagccggtactcacccttgtggacgaagcaattgtaaagcagatcaaccaggaggaattcaaaggtttctcctactttggtgaagacctgatgccctgagagcccactgcagttggactttgccgatgctgcaagaaggggtgcagagaagactcctgtgttggagacactcagcaggtcttgaactacttctcctcctcggagccccagtcccatgtccactgtctatttattgcattcccttgccccaggccacctcctccccctcccacctggtgaccagaaggcgctctcggttcttgtctcaccagtaatgcagactcattgggtcagcaattagctgtatacactgccgtgtttggaccattggcaagcctggttccactcctcaggggctcctggcagtgaagcaacttcagttcttttactgcaaagaacagaaaaaagaaagaaagcaaacaagaagactccggctctgctatcggacacagatcctgatccctcttgcttcttttccctcctgcaccgcagcttgccatccctgcccttctgtcctggagaagagactggtgcttctccgcacacacgagggagggcgcccttgaggcatgccctctgagggagggagaccagagatgcagggattggccagctgggttggtttgctctggaatggctaactcttgcctgctttggttttagcttttcagcatgccaaagtcatgtaagtttgtgtcttgtggaagaaatcctctttgtggaaaaagaaacagggttttgaactctgttaacatttgaaaaatatattttcaaattcactttctaattggccaaaagagatgagttccagtctgaatacaggtagatattaaagggctaataaaaaatgagaaaccggtcgtccaaggtggatgctgtcaatgcccgagtgacacatgagagctgtatgaattgagagaaaaggcaacaagtagcattcttcatcattcaagttctacctggacacaaaggcgaggaccctggggttccaacaaagctcagctcccagattctctttccagtttcatcctaagttcctagcataaacactatttattttctgcagcagtgtgttatttttgcgcacttatacaaaatggtagtactactgtgttgtggtttttaaacattaaacatgtaaagttatatacgaaatatctgcttttggaataagcagaatgaggctaaacatgggttatacaaagggtatctggaaactgaagagcaacttgttagaaaactgacaatgtcgcaagatgtactcagttttgtttctgtgtgacatgcaatggcaactcatgtggacactattgaagggatgtgacattacctcctgtagatatgctaacagtgttattctttcatttccaagggttctctgtggctttgtgtatatgtttcccagaggtcatttgattacctaatttactgaactgatttagcagggaatggaatccattccaactattgcacgtggatttcccagctgcccctaaatatatatacttgtgagtggcaaagtggcactaatgaagcttttgccttttgtacatttgagatttttgtatatagtgtttgctgcaaggcctgtggaattaattcgttgcatatagaggtatcaactgctgcatgttcaggcatattataaaactttagtctatgaaagaataattataataatgtccaggtgcaatactctgtaagtctattggttcaagttaccgagagataggtgtgttcctttatgggggatgggggggtgtgttggggattctttgtattgtttatttcattttggtttattttaaaagatgtaaacatatattaagctatattaaatctcacatacagttcttctgtgctctattataccctgatagagatgggggagagaaaggaatgtttttgatggtggtttcaaagctcggacagtaactatcttgagcccattagagagtctgtgtccatatttgcatctggctggtcatagcctttgttactaatgatgacattcagttctcttttgtttttattttttaaaaactcaggtgtaattattatctgttcttaagataattgcaaatattaaatattatgatatatcaattcatgtgtttggcataccagtgaatgatgaagaacatgagattaatttaatttatcttcggtaacttgacattctggagagagactatcttctggagttgagtacaagcacagaaacatctttacggtggcatcatctcattttttaggaagacatgataatactgcccatcatattcatgtgtaactactgttctttcttctgctttcttcaccataataaactttggacaaccaagcaagctctaaccgcaatgccagatggccttgtccgagggcctagtgtttgcacggcagtgggaactgggcctttcctacaggacaactggcaagtttgctgggaagtcaaataatacattccacctggcagctgaaggcagccagtcagtctgtcccagaaagggcccttttcagcacccaaagctgggctggctgggatgcctctggctggtgaagttctcacataggctgatttaaatccagcaaaggtctatagaaaaaggcttgcgtgttcgttgagtaatcattgtttcattttcatttttacgagagtttgaaaatagacacactgttaacacttctgccagttttttctgatctttccagccccaccccctttctctttctctctctctctcaaagaaaaaaaaaatgggagtgcaaaaaaaacaaagccaaaaaatatatgaaggatagctgttcttctgtgttctctcattatggactttgtgaagtagaaacataattttttttcctccaaaggtgaaaaaacaatgcattcttgctttaaaaaaaaaaaagaaggctaaaaaattacctctttttaaattatgtgcaaaataattctggctaactgtaaaatgtattcaattttaggattttttttttttgtattgtgatgctttatttgtacatttttttcctttctggatgtaattttaatctcttgccattcattagtgttatttcattgtaaacgttattgtgccaaatgtactgtattcaaaaggatgtgaatgtgtattgtttcagaacctaataaatacaatgacgttaagtcttaaaaaaaaaaaaaaaaaa

SEQ ID NO: 1546 - DNA, 2390 bp, Homo sapiens
agagggagacggacgttgagagaacgaggaggaaggagagaaaatggcgtccacggattacagtacctatagccaagctgcagcgcagcagggctacagtgcttacaccgcccagcccactcaaggatatgcacagaccacccaggcatatgggcaacaaagctatggaacctatggacagcccactgatgtcagctatacccaggctcagaccactgcaacctatgggcagaccgcctatgcaacttcttatggacagcctcccactggttatactactccaactgccccccaggcatacagccagcctgtccaggggtatggcactggtgcttatgataccaccactgctacagtcaccaccacccaggcctcctatgcagctcagtctgcatatggcactcagcctgcttatccagcctatgggcagcagccagcagccactgcacctacaagaccgcaggatggaaacaagcccactgagactagtcaacctcaatctagcacagggggttacaaccagcccagcctaggatatggacagagtaactacagttatccccaggtacctgggagctaccccatgcagccagtcactgcacctccatcctaccctcctaccagctattcctctacacagccgactagttatgatcagagcagttactctcagcagaacacctatgggcaaccgagcagctatggacagcagagtagctatggtcaacaaagcagctatgggcagcagcctcccactagttacccaccccaaactggatcctacagccaagctccaagtcaatatagccaacagagcagcagctacgggcagcagagttcattccgacaggaccaccccagtagcatgggtgtttatgggcaggagtctggaggattttccggaccaggagagaaccggagcatgagtggccctgataaccggggcaggggaagagggggatttgatcgtggaggcatgagcagaggtgggcggggaggaggacgcggtggaatgggcagcgctggagagcgaggtggcttcaataagcctggtggacccatggatgaaggaccagatcttgatctaggccctcctgtagatccagatgaagactctgacaacagtgcaatttatgtacaaggattaaatgacagtgtgactctagatgatctggcagacttctttaagcagtgtggggttgttaagatgaacaagagaactgggcaacccatgatccacatctacctggacaaggaaacaggaaagcccaaaggcgatgccacagtgtcctatgaagacccacccactgccaaggctgccgtggaatggtttgatgggaaagattttcaagggagcaaacttaaagtctcccttgctcggaagaagcctccaatgaacagtatgcggggtggtctgccaccccgtgagggcagaggcatgccaccaccactccgtggaggtccaggaggcccaggaggtcctgggggacccatgggtcgcatgggaggccgtggaggagatagaggaggcttccctccaagaggaccccggggttcccgagggaacccctctggaggaggaaacgtccagcaccgagctggagactggcagtgtcccaatccgggttgtggaaaccagaacttcgcctggagaacagagtgcaaccagtgtaaggccccaaagcctgaaggcttcctcccgccaccctttccgcccccgggtggtgatcgtggcagaggtggccctggtggcatgcggggaggaagaggtggcctcatggatcgtggtggtcccggtggaatgttcagaggtggccgtggtggagacagaggtggcttccgtggtggccggggcatggaccgaggtggctttggtggaggaagacgaggtggccctggggggccccctggacctttgatggaacagatgggaggaagaagaggaggacgtggaggacctggaaaaatggataaaggcgagcaccgtcaggagcgcagagatcggccctactagatgcagagaccccgcagagctgcattgactaccagatttattttttaaaccagaaaatgttttaaatttataattccatatttataatgttggccacaacattatgattattccttgtctgtactttagtatttttcaccatttgtgaagaaacattaaaacaagttaaatggtagtgtgcggagtttttttttcttccttcttttaaaaatggttgtttaagactttaacaatgggaaccccttgtgagcatgctcagtatcattgtggagaaccaagagggcctcttaactgtaacaatgttcatggttgtgatgttttttttttttttttaaaataaaattccaaatgtttaataaaaaaaaaaaaaaaaaaa

SEQ ID NO: 1547 - DNA, 1807 bp, Homo sapiens
agagggaaagcgagagggagacggacgttgagagaacgaggaggaaggagagaaaatggcgtccacggattacagtacctatagccaagctgcagcgcagcagggctacagtgcttacaccgcccagcccactcaaggatatgcacagaccacccaggcatatgggcaacaaagctatggaacctatggacagcccactgatgtcagctatacccaggctcagaccactgcaacctatgggcagaccgcctatgcaacttcttatggacagcctcccactggttatactactccaactgccccccaggcatacagccagcctgtccaggggtatggcactggtgcttatgataccaccactgctacagtcaccaccacccaggcctcctatgcagctcagtctgcatatggcactcagcctgcttatccagcctatgggcagcagccagcagccactgcacctacaagaccgcaggatggaaacaagcccactgagactagtcaacctcaatctagcacagggggttacaaccagcccagcctaggatatggacagagtaactacagttatccccaggtacctgggagctaccccatgcagccagtcactgcacctccatcctaccctcctaccagctattcctctacacagccgactagttatgatcagagcagttactctcagcagaacacctatgggcaaccgagcagctatggacagcagagtagctatggtcaacaaagcagctatgggcagcagcctcccactagttacccaccccaaactggatcctacagccaagctccaagtcaatatagccaacagagcagcagctacgggcagcagagacccatggatgaaggaccagatcttgatctaggccctcctgtagatccagatgaagactctgacaacagtgcaatttatgtacaaggattaaatgacagtgtgactctagatgatctggcagacttctttaagcagtgtggggttgttaagatgaacaagagaactgggcaacccatgatccacatctacctggacaaggaaacaggaaagcccaaaggcgatgccacagtgtcctatgaagacccacccactgccaaggctgccgtggaatggtttgatgggaaagattttcaagggagcaaacttaaagtctcccttgctcggaagaagcctccaatgaacagtatgcggggtggtctgccaccccgtgagggcagaggcatgccaccaccactccgtggaggtccaggaggcccaggaggtcctgggggacccatgggtcgcatgggaggccgtggaggagatagaggaggcttccctccaagaggaccccggggttcccgagggaacccctctggaggaggaaacgtccagcaccgagctggagactggcagtgtcccaatccgggttgtggaaaccagaacttcgcctggagaacagagtgcaaccagtgtaaggccccaaagcctgaaggcttcctcccgccaccctttccgcccccgggtggtgatcgtggcagaggtggccctggtggcatgcggggaggaagaggtggcctcatggatcgtggtggtcccggtggaatgttcagaggtggccgtggtggagacagaggtggcttccgtggtggccggggcatggaccgaggtggctttggtggaggaagacgaggtggccctggggggccccctggacctttgatggaacagatgggaggaagaagaggaggacgtggaggacctggaaaaatggataaaggcgagcaccgtcaggagcgcagagatcggccctactag

SEQ ID NO: 1548 - DNA, 5118 bp, Homo sapiens
ttctaatgatcccatcaccaaagtagcaaacgtagtacccaggattttttttttcctagttagtcttcatgttaagtacaatcttacctcaaaattgttaatgtctgtggtttaaaaaaaaacatgaatcagaaatggtgtgggtagtttagaaaatgagttaggttcaggtggccggttagctcagttggtcagaaaatgagttaggttcatctgggaagacttcctgggagaaaagaccctgggttctgaggtaaagtggagtagggataagatgtgcaaggcaggaagggagttgattccttaggtaagtgaattattggaggtgaggggtatgtctggctcctgagtcagccacgatgtgcctccttgtcttcccccttgtccccaggagtccagattacatcctaccctgcagtcctggatggcgcctccgacttgcagcttccttcctgctttccgtcttcccgctgctagaccttcttccagttgctttgccaccaggggcaggcccaggacccatagggctagaggtgttggcagggtgcgtggcagctgtggcctggatcagccacagcctggccctgtgggtgttggcacattcccctcatggccactcccggggtcccttggccttggccctggtagccttgctgccagctccagccctagtgctgaccgtgttgtggcattgccagcgaggcacacttctgcccccacttctcccagggcccatggcccgcctatgcttgctcatcctgcagctggctgcactcttggcctatgcactgggatgggcagctcctgggggaccacgagaaccctgggctcaggagcccctcctgcccgaggatcaagaacctgaggtggctgaagatggggagagttggctgtcacgcttttcctatgcctggctggcacccttgctggcccgtggggcctgtggagagctccggcagcctcaggacatttgccgcctcccccacagactgcagccaacctacctggctcgtgtcttccaggcacactggcaggagggggcacggctgtggagggccttgtatggggcctttggacggtgctatctggcacttggactgctgaagctggtggggaccatgttgggattctcagggcccctgttgctctccctactggtgggcttcctggaagaggggcaggagccactaagccacggcctgctctatgctctggggctagccggtggggctgtgctgggtgctgtgctgcagaatcagtatgggtatgaggtatataaggtaacacttcaggcacggggggctgtgctgaacatcctgtactgcaaggctttacagctggggcccagccgccctcctactggggaggccctgaacctactaggcactgactctgaacggctgcttaactttgctgggagcttccatgaagcctggggcctgcccctgcaactggccatcaccctctacctgctgtaccagcaggtaggcgtggccttcgtgggtggtctcatcttggcactgctgctggtacccgtcaacaaagtgattgccacccgcatcatggccagcaaccaggaaatgctacagcacaaggatgcgcgggttaagcttgtgacagagctgctgagtggcattcgggtcatcaagttctgcgggtgggagcaggcactgggagcccgagtagaggcctgccgggctcgagagctggggcgactccgggtcatcaaatacctggatgcggcctgtgtatacctgtgggctgccctaccggttgtcatctccatcgttatcttcatcacctatgtcctcatggggcaccagctcactgccaccaaggtgttcacggccctggcactggtgcgaatgctcattcttcctctcaacaacttcccttgggtgatcaatggtctcctggaggccaaagtgtccttggaccggatccagcttttcctcgaccttccaaaccacaacccccaggcctactacagcccagattgtggtagattaggagcccaaatcaagtggcttctctgttcagatccccctgcagagccatctacagtattggagctgcatggagccttgttctcctgggacccagttggaaccagcctggagaccttcatcagtcatctcgaagtgaaaaagggtatgctggtgggcatcgtggggaaggtcggctgtgggaagagctccctgctggctgccatcgctggagagctccacaggctgcgtgggcatgtggcagtgcgggggctgtccaagggctttggcctggccacccaggaaccctggatccagtttgccaccatccgagacaacatcctctttgggaagacatttgatgcacagctgtacaaggaggtgctagaagcctgcgccctcaatgatgacctcagtatcctgcctgctggagaccagacagaggtgggggagaagggtgtcacccttagcggaggacagcgtgcccggattgcccttgctcgtgctgtctaccaggaaaaggagctctatctcctcgatgaccctctggccgctgtggatgcagatgtggccaaccacctgctgcacaggtgcatcctgggcatgctgagctacaccacacggctgctctgcacccaccgcactgagtacctggagagggctgacgcggtgctgctgatggaggccgggcgcctcatccgggctggacctccctctgagattctgccactggtacaagctgtccccaaagcctgggctgagaatggacaagagtctgactcagccacagcccagtcagtacagaacccagagaaaacaaaggaggggctggaggaggagcagagcacatctggtcgcctgctgcaggaagaaagcaagaaggagggcgccgtggccttgcacgtgtaccaagcttactggaaggccgtgggccagggcttggccttagccatcctcttctctctgcttctcatgcaagccacgcggaacgctgctgactggtggctctcccactggatctctcagctgaaggctgagaatagctcccaggaggcgcaaccctccaccagcccagcttctatggggctcttctctccgcagctgctcctcttttcccctggaaacctctacatcccagtgttcccactgcccaaagctgcccccaatggctcctcagacatccgtttctacctcaccgtgtatgcgaccattgctggtgtaaattccctctgcacccttctccgggcagtgctctttgcagcaggcacccttcaagcagctgccactctgcatcgccgcctgctgcatcgagtccttatggcaccagtgactttcttcaatgccacacccacgggccggatcctaaaccgcttctcctctgatgtggcctgtgcggatgacagcctgcccttcatcctcaacatcctcctggccaacgcggcaggcctgctggggctcctggccgtgctgggctctggcctgccctggctgctgctcctgctgccgcctttgagcatcatgtactatcacgtgcagcgccactacagggcctcctcacgggagctgcggcgcctgggcagcctcaccctgtctccactgtatagccatctggccgataccttggctggcctctctgtgctccgggccacaggggccacctacaggtttgaggaggagaacctgcgactccttgagctaaaccagaggtgccagtttgccaccagtgccacaatgcagtggctggacattcggctacagctcatgggggcggcagtggtcagcgctatcgcaggcatcgctctggtgcagcaccagcagggcctcgctaacccagggctggtgggcttgtcgctgtcttatgccctgtccctgacgggcctgctctcgggcctggtgagcagcttcacacagacagaggccatgctggtgagcgtcgagcggctggaagagtacacctgtgacctgccccaggaaccccagggccagccactgcagctgggcaccggctggctgacccaggggggcgtggagttccaggacgtggtgttggcgtaccggccagggctgccgaatgccctggatggagtgaccttctgcgtgcagcctggagagaagttgggcatcgtgggccgcacaggctccggcaagtcttccctgttgttggtgctcttccggctgctagagcccagttcagggcgagtgctgctggacggcgtggacaccagccagctggagctggcccagctcagatcccagttggctatcatcccccaggagccctttttgttcagtgggactgttcgggaaaacctggacccccagggcctacataaggacagggccttgtggcaggccctgaagcagtgccacctgagtgaggtgattacatccatgggtggtctggatggtgagctgggtgaggggggccggagcttatctcttgggcagaggcagctgttgtgtttggccagggctctcctcacagatgccaagatcctgtgtatcgatgaggccacagcaagtgtggaccagaagacagaccagctgctccagcagaccatctgcaaacgctttgccaacaagacagtgctgaccattgcccataggctcaacacgatcctgaactcagaccgggtgctggtgctacaagcggggagagtggtagagctggactccccggccaccctgcgcaaccagccccactccctgttccagcagctgctgcagagcagccagcagggagtccctgcctcactcggaggtccctgagcccaatcccacaccctgcagagttctcccctctctctgatccaggccgggcctatacagaggtgctggctgcttgtttacattctcctctggggctctacctctccacacttccccagaagggaaaagggcaccctggattactctttggaaatcactccttggtgggcagcatcctgaggcttccccagaaccaggcctctgctctggccctcttgcatctggaacgccaggtgggtttttctggcataggagcccacttgcattttcatagttttatttgataaaattccatcttacattctgtgtattaaaaaaataatatttctggtgtaaaaaaaaaaaaaaaaaaaaaaaaaaaaaa

SEQ ID NO: 1549 - DNA, 2104 bp, Homo sapiens
gatgggaatgtggagcagaccctcgtccactccggaggccgagggtcctccgggcttccgaaggaagccgacctcaacgctggacgcttcttggagaatgattgcgttgagtggagatgtggtctgtctataaaaggccgggagggaacaatatctgttaccactcagtccgtctctaaagagacactctttaccgctgaaaacctcaagagtgagcactcccacgcccccgtctctggtcctacctgggtccaaggccgatgtgaagtggacaagtccagtaaggcaggcatcatgccacagcagctcctgatcaccctgcctaccgaggccagcacctgggtgaagctgcaacatccaaagaaggccgtggagggggcgcccctgtgggaggatgtgactaaaatgtttgaaggagaagctctgctgtctcaggatgctgaggacgtaaagacccagagagaaagtttagaggatgaagtgacccctggactcccgacagcagaatcccaggaattgttgactttcaaggacatatctattgacttcacccaggaagagtgggggcagctggctcctgctcaccagaatctataccgagaggtgatgctggagaactacagcaacttggtgtcagtgggatatcaactttccaaacctagtgtgatatcccagttagagaaaggagaagagccatggatggcagagaaagaaggcccaggagatcccagttcagacttgaagagtaaaatagaaaccattgagtcaactgcaaagagtaccatttcacaggagcgcttatatcatggcattatgatggaaagtttcatgagggatgatataatttattccacgttgagaaaagtctccacatatgatgatgtcttagaaaggcaccaggaaacttgtatgagagatgtgagacaagccatcttgacccataagaagagagtccaagaaactaacaaatttggggaaaatatcattgtgcattcaaatgttattattgaacagaggcaccataaatatgatacacctacaaagcggaacacatacaaattagatctgattaatcatccaacaagttacataagaacaaaaacctatgaatgtaatatatgtgaaaaaatcttcaaacaacctattcaccttactgaacatatgagaattcatactggtgagaaacctttcagatgtaaggaatgtggaagggcctttagtcaaagtgcatccctcagtacacaccagagaatccatactggtgagaaaccctttgaatgtgaggaatgtgggaaagccttcagacatcgctcatcacttaatcagcatcatagaactcacactggggagaaaccctatgtatgtgataaatgtcagaaagctttcagccagaacattagcttggttcaacatttgaggactcattctggagagaaaccttttacttgcaatgaatgtgggaaaacctttagacagattagacaccttagtgaacatataagaattcataccggggagaagccctatgcatgcactgcatgttgtaaaacctttagtcatagagcgtatctaacacatcaccagagaatccatactggggagagaccctacaaatgtaaagaatgtggaaaagcctttaggcagaggatacaccttagcaaccataaaactgttcatacaggagtgaaagcatatgaatgcaaccgctgtggaaaagcctataggcatgattcatcctttaaaaaacatcagagacatcacactggagaaaaaccttacgaatgtaacgaatgtggaaaagccttcagctaaaactcttcacttagtcgacatcatgaaatacacaggaggaacgccttccgaaataaggtgtaaaaacagatatttgacttgagaacaaaagccaagtgtaaattggtgatttagagtgctttaaaatttcaggactcagatatgaggaattgatgtaatgatgccaacttttaatttttcccattgtaaataaacattacattgacaggtattgactactaacacctctaaaaagtacttaagattaaaatctggtccttaaaattaaatgaattcagcattatgaaaaatt

SEQ ID NO: 1550 - DNA, 2343 bp, Homo sapiens
gtctcaaaggctggctggagtggagccaaaggaaaagatcgttagagacagcgcccctgaccaaccacttagagcagcgcaggggtgggagggcggccgcaggctctcctctcgttagtgccccctgtgtttggggccccgtgatctcaacggtcctgccctcggtctccctcttcccccgccccgccctgggccaggtgttcgaatcccgactccagaactggcggcgtcccagtcccgcgggcgtggagcgccggaggacccgccctcgggctcatggcggccccggtccgcctgggccggaagcgcccgctgcctgcctgtcccaacccgctcttcgttcgctggctgaccgagtggcgggacgaggcgacccgcagcaggcaccgcacgcgcttcgtatttcagaaggcgctgcgttccctccgacggtacccactgccgctgcgcagcgggaaggaagctaagatcctacagcacttcggagacgggctctgccggatgctggacgagcggctgcagcggcaccgaacatcgggcggtgaccatgccccggactcaccatctggagagaacagtccagccccgcaggggcgacttgcggaagtccaggactcttccatgccagttcctgcccagcccaaagcgggaggctctggcagctactggccagctcggcactcaggagcccgagtgatactgctggtgctctaccgggagcacctgaatcctaatggtcaccacttcttaaccaaggaggagctgctgcagaggtgtgctcagaagtcccccagggtagcccctgggagtgccccaccctggccagccctccgctccctccttcacaggaacctggtcctcaggacacaccagccagccaggtactcattgaccccagagggcctggagctggcccagaagttggccgagtcagaaggcctgagcttgctgaatgtgggcatcgggcccaaggagccccctggggaggagacagcagtgccaggagcagcttcagcagagcttgccagtgaagcaggggtccagcagcagccactggagctgaggcctggagagtacagggtgctgttgtgtgtggacattggcgagacccgggggggcgggcacaggccggagctgctccgagagctacagcggctgcacgtgacccacacggtgcgcaagctgcacgttggagattttgtgtgggtggctcaggagaccaatcctagagacccagcaaaccctggggagttggtactggatcacattgtggagcgcaagcgactggatgacctttgcagcagcatcatcgacggccgcttccgggagcagaagttccgactgaagcgctgtggtctggagcgccgggtatacctggtggaagagcatggttccgtccacaacctcagccttcctgagagcacactgctgcaggctgtcaccaacactcaggtcattgatggcttttttgtgaagcgcacagcagacattaaggagtcagccgcctacctggccctcttgactcggggcctgcagagactctaccagggccacaccctacgcagccgcccctggggaacccctgggaaccctgaatcaggggccatgacctctccaaaccctctctgctcactcctcaccttcagtgacttcaacgcaggagccatcaagaataaggcccagtcggtgcgagaagtgtttgcccggcagctgatgcaggtgcgcggagtgagtggggagaaggcagcagccctggtggatcgatacagcacccctgccagcctcctggccgcctatgatgcctgtgccacccccaaggaacaagagacactgctgagcaccattaagtgtgggcgtctacagaggaatctggggcctgctctgagcaggaccttatcccagctctactgcagctacggccccttgacctgagcttatgccgtgaaacagcccccagcccccgtctgtcccccaacccaggctagccagccttttaacaacatcttttggggtacaattagaatctaagtgtttgcagccatatgtgtcatgtagaagatgcctagccctggggaccttgtgaaatacgcaggaaccagggataccatctggtccagtggtttttaaacaaagctgcttagcacctggaattccctggtcagggagatggagtcagtggggcattgcagcttggaatctattttatgtcaccagttggtcctcatcaaataaaatttccttaggagtgcagagggctcattgggaaaataaaaataataaaaataaataaaacttcctaaaagaaaagattgaaacccaaaaaaaaaaaaaaaaaaaaaaaaa

SEQ ID NO: 1551 - DNA, 2783 bp, Homo sapiens
ggaggcccaagacccgcgggcttgcggaccggacgcaggcggcagatttgcagcccgggatgcgccagggaacagcctgcgcccccctccctcctctccgcccgctggccgggccaactccggcttctgccgcgcgtgcctggctcggagctccgctgcggaaaacccgagcgcgggcggctccccgcctcgccgcccgggaaaatccgggggtggccgccagggatctccaagcggcctgggctgggcggccggagcttccctcccggatttgcgccccgaacctggcgccctgaagctagaggcccgtcggtccagtccttgcctcccatcttctctccgcagagcgcccagacgacggcgagatgacggccgggagccccgaagaatgcggggaggtgcggaggagccccgagggccgcgtctctcgcttgggccgccgcctgggccgccgccggcgcccgcgctccccgcccgagcctctgcgggtgcgggcgcggctgcggctgcgctcgccgtcgggggcgttcgcggcgctgggggcgctcgtggtactggtgggtatgggcattgcagtggccggctactggccgcaccgggccggggccccagggtcccgggccgccaatgccagctcgccccagatgagcgagctgcgacgcgagggtcgcggcgggggccgggctcacggcccgcacgagcggctgcggctcctcgggccggtgatcatgggcgtcggcctgttcgtgttcatctgcgccaacacactgctgtatgagaaccgagacttggagacgcgacggctccgccagggggtgctgcgggcccaggcgctccggccccccgacggcccgggctgggactgcgccctccttcccagccccggccctaggagtccccgagccgtaggctgcgcagagccagaaatctgggacccgtccccgcgtcggggtacttcacccgtcccgtcagtgcggagtctgcgttcagagcccgctaatcctcgcttggggttacctgccttgctcaacagctacccgctgaagggccccgggctgcccccaccctggggtccacggacgcagactggccatgtgatcatcaccgtgcagccgtctggctcctgcattgaacattccaagtctctggatctgggccttggggagctcctccttggggccccagcagctcgggactgtgctcaccgaagctggccacggctggaccgcctcagtcttgggggctatgccaaattgggaggaggaggggacttgggggcccgggtctgaagagaggggagacagcctgctctgaggctgcagcatggaccatgctaataggaccaaaggaccaggagtcccaacgtctaatagatgtttcagtcacatcccaggctggggatggatgctctgaccacagcagctgtgaagggcatcctgacctgcatgcgggcagagaaatgccagctgcaccagggctcagtgagctggagagggtgcgtttcactgtggggtgtggaggactcgcctcaggaatttcttcagcctctgtaagtggccttagccctaacagggctggaggtccaggccagggtgactgggagatgtacccagtgtcttggcaaacccaagaaagtggtgggcaagggcccctaagactgggaggtaggttgggatgttacaggctggggcaggctccctccaaggcggcactggtgatggagtgtggggcctctgggaagatggaccacgggatgagactctccactgccatctgggacggggactgagccttgaactcctaccacctcaatccctttcttccctcagccatctggggtatatccctctagagctacactactgccaatgccttcatactgagttctgggcccctctgcaaataagtctgagaagccccttctctccttcctttatcgtggcctatgctgcagaatctcactgcagctggcaaaaggcattggccagctctcagaaatccctttactcaacgttgaagctgcattttggtcaatgtgggtaacttactttagaaaatgacttgagtttaggtctcccccacccatatttaatttttcccaagttgctggtagaagagaaatttaaaagtggatcaatcctcacagagagagttctttttgttgttgtttattgaaaaaaatgcaatacaagaagcaagaccaaacagatatctaaacactacaaccacttctactacgaaaggccaaaacagcagacttgattattgcctgtgtagtctaaagattctgccaatctgattctgctgcccgagttcctattttttcaagaaatgtaaacaactacttgatatgattcataattttaaaaaaatttacaaagctccttcatttttgtcaccaaaataatacatttgagagagatttgtagaaacaaccagcctggggctgagatcctgggcagaaatttcccgtgagcatcaaaaggcgtcagtcaggccgcagctctggctccagttcccgaggtttgttgtctcctcacccccagctgccaagcatccccccaacacacactgatgggcccagcggtggaggggggggtggggacggggatgggtcacggggccctgacgggtcccgcagttaggctccctgagccctcggcttataaatacaggtcttgctttgtgggtgggtgccagagtcctcatgtggcttggaggaaatctttatttctcaaattaaaataaaattgcagcgagaaaaaaaaaaaaaaaaaaaaaaa

SEQ ID NO: 1552 - DNA, 1124 bp, Homo sapiens
ccagggcgcgacgcgctgcggctcagcgacgcggcttctagaaccgggtgattgaactaaaccttcgccgcaccgagtttgcagtacggccgtcacccgcaccgctgcctgcttgcggttggagaaatcaaggccctaccgggcctccgtagtcacctctctatagtgggcgtggccgaggccggggtgaccctgccggagcctccgctgccagcgacatgttcaaggtaattcagaggtccgtggggccagccagcctgagcttgctcaccttcaaagtctatgcagcaccaaaaaaggactcacctcccaaaaattccgtgaaggttgatgagctttcactctactcagttcctgagggtcaatcgaagtatgtggaggaggcaaggagccagcttgaagaaagcatctcacagctccgacactattgcgagccatacacaacctggtgtcaggaaacgtactcccaaactaagcccaagatgcaaagtttggttcaatgggggttagacagctatgactatctccaaaatgcacctcctggattttttccgagacttggtgttattggttttgctggccttattggactccttttggctagaggttcaaaaataaagaagctagtgtatccgcctggtttcatgggattagctgcctccctctattatccacaacaagccatcgtgtttgcccaggtcagtggggagagattatatgactggggtttacgaggatatatagtcatagaagatttgtggaaggagaactttcaaaagccaggaaatgtgaagaattcacctggaactaagtagaaaactccatgctctgccatcttaatcagttataggtaaacattggaaactccatagaataaatcagtatttctacagaaaaatggcatagaagtcagtattgaatgtattaaattggctttcttcttcaggaaaaactagaccagacctctgttatcttctgtgaaatcatcctacaagcaaactaacctggaatcccttcacctagagataatgtacaagccttagaactcctcattctcatgttgctatttatgtacctaattaaaacccaagttaaaaaaaaaaaaaaaaaaaaaaaaaaaaaaa

SEQ ID NO: 1553 - DNA, 1785 bp, Homo sapiens
atgacacgtggcaccgggggaactgcccagcgtggaaggtctgggccagattctcaggggctgctagattcatccctgatggcatcaggcactgccagccgctcagaggatgaggagtcactggcagggcagaagcgagcctcctcccaggccttgggcaccatccctaaacggagaagctcctccaggttcatcaagaggaagaagttcgatgatgagctggtggagagcagcctggcaaaatcttctacccgggcaaagggggccagtggggtggaaccagggcgctgttcggggagtgaaccctcctccagtgagaagaagaaggtatccaaagcccccagcactcctgtgccacccagcccagccccagcccctggactcaccaagcgtgtgaagaagagtaaacagccacttcaggtgaccaaggatctgggccgctggaagcctgcagatgacctcctgctcataaatgctgtgttgcagaccaacgacctgacctccgtccacctgggcgtgaaattcagctgccgcttcacccttcgggaggtccaggagcgttggtacgccctgctctacgatcctgtcatctccaagttggcctgtcaggccatgaggcagctgcacccagaggctattgcagccatccagagcaaggccctgtttagcaaggctgaggagcagctgctgagcaaagtgggatcgaccagccagcccaccttggagaccttccaggacctgctgcacagacaccctgatgccttctacctggcccgtaccgcgaaggccctgcaggcccactggcagctcatgaagcagtattacctgctggaggaccagacagtgcagccgctgcccaaaggggaccaagtgctgaacttctctgatgcagaggacctgattgatgacagtaagctcaaggacatgcgagatgaggtcctggaacatgagctgatggtggctgaccggcgccagaagcgagagattcggcagctggaacaggaactgcataagtggcaggtgctagtggacagcatcacaggcatgagctctccggacttcgacaaccagacactggcagtgctgcggggccgcatggtgcggtacctgatgcgctcgcgtgagatcaccctgggcagagcaaccaaggataaccagattgatgtggacctgtctctggagggtccggcctggaagatatcccggaaacaaggtgtcatcaagctgaagaacaacggtgatttcttcattgccaatgagggtcgacggcccatctacatcgatggacggccggtgctctgtggctccaaatggcgcctcagcaacaactctgtggtggagatcgccagcctgcgattcgtcttccttatcaaccaggacctcattgccctcatcagggctgaggctgccaagatcacaccacagtgaggagtggtggcaggactcgtgggccctctccggcctgtttcccctgccactccagcccccttgagctgggaactcaggctcctggaaaaacctgggcagtgggaggctcagctgcgggccattgatttgagcctttgagggaggatagggctggcctttgtgaagccagcagaggctgagaacctcaggcttccctagatccagagcccctccccatcttcctctctctaaaaacaaccctaccccccattgccaccttcactcctgtgtctccagctgattagcctcagactcttcttttattgtttttcttttgtaaataaaaagcaccaggttccaaaaaaaaaaaaaaaaaaa

SEQ ID NO: 1554 - DNA, 1937 bp, Homo sapiens
gtacctcacggaagccggctttggccctgcggctgctaccgtcgccgcggagaaattgttggatctggcagtctaggaatgaatctcctctcagcctttaagctcacctggtcagaatccttggatgagcctgtgggaccgttcctcctagcccggtggtttggaaccagtggctttgggactgtaagaggatggacaaagattctcaggggctgctagattcatccctgatggcatcaggcactgccagccgctcagaggatgaggagtcactggcagggcagaagcgagcctcctcccaggccttgggcaccatccctaaacggagaagctcctccaggttcatcaagaggaagaagttcgatgatgagctggtggagagcagcctggcaaaatcttctacccgggcaaagggggccagtggggtggaaccagggcgctgttcggggagtgaaccctcctccagtgagaagaagaaggtatccaaagcccccagcactcctgtgccacccagcccagccccagcccctggactcaccaagcgtgtgaagaagagtaaacagccacttcaggtgaccaaggatctgggccgctggaagcctgcagatgacctcctgctcataaatgctgtgttgcagaccaacgacctgacctccgtccacctgggcgtgaaattcagctgccgcttcacccttcgggaggtccaggagcgttggtacgccctgctctacgatcctgtcatctccaagttggcctgtcaggccatgaggcagctgcacccagaggctattgcagccatccagagcaaggccctgtttagcaaggctgaggagcagctgctgagcaaagtgggatcgaccagccagcccaccttggagaccttccaggacctgctgcacagacaccctgatgccttctacctggcccgtaccgcgaaggccctgcaggcccactggcagctcatgaagcagtattacctgctggaggaccagacagtgcagccgctgcccaaaggggaccaagtgctgaacttctctgatgcagaggacctgattgatgacagtaagctcaaggacatgcgagatgaggtcctggaacatgagctgatggtggctgaccggcgccagaagcgagagattcggcagctggaacaggaactgcataagtggcaggtgctagtggacagcatcacaggcatgagctctccggacttcgacaaccagacactggcagtgctgcggggccgcatggtgcggtacctgatgcgctcgcgtgagatcaccctgggcagagcaaccaaggataaccagattgatgtggacctgtctctggagggtccggcctggaagatatcccggaaacaaggtgtcatcaagctgaagaacaacggtgatttcttcattgccaatgagggtcgacggcccatctacatcgatggacggccggtgctctgtggctccaaatggcgcctcagcaacaactctgtggtggagatcgccagcctgcgattcgtcttccttatcaaccaggacctcattgccctcatcagggctgaggctgccaagatcacaccacagtgaggagtggtggcaggactcgtgggccctctccggcctgtttcccctgccactccagcccccttgagctgggaactcaggctcctggaaaaacctgggcagtgggaggctcagctgcgggccattgatttgagcctttgagggaggatagggctggcctttgtgaagccagcagaggctgagaacctcaggcttccctagatccagagcccctccccatcttcctctctctaaaaacaaccctaccccccattgccaccttcactcctgtgtctccagctgattagcctcagactcttcttttattgtttttcttttgtaaataaaaagcaccaggttccaaaaaaaaaaaaaaaaaaa

SEQ ID NO: 1555 - DNA, 2001 bp, Homo sapiens
agatggcgatggagatgaggcttccagtggctcgcaagcctcttagcgagagactgggccgcgacactaagaaacatctagtggtgccgggggatacaatcactacggacacaggattcatgcggggccatggaacgtatatgggagaagagaagctcattgcatctgttgctggctctgtggagagagtaaacaagttgatctgtgtgaaagctttgaaaaccagatacattggtgaagtaggagacatcgtagtgggacgaatcacagaggttcaacagaagaggtggaaggtggagaccaactccaggctggattcggtcttgctgctctcgtccatgaaccttcctggaggagagctgaggagaagatctgcagaagatgagcttgcaatgagaggtttcttacaggaaggggaccttatcagtgctgaggtccaggcagtgttctctgacggagctgtctctttgcacacgaggagcctgaaatatggaaaactaggtcagggggttttggtccaggtttccccctccctggtgaaacggcagaagacccactttcatgatttgccatgtggtgcctcagtgattctcggtaacaacggcttcatctggatttacccaacacctgagcacaaagaagaggaagcagggggcttcattgcaaacctggagcctgtctctcttgctgatcgagaggtgatatcccggcttcggaactgcatcatctcgctggtaactcagaggatgatgctgtatgataccagcatcctgtactgctatgaagcatcccttccacatcagatcaaagacatcttaaagccagaaataatggaggagattgtgatggaaacacgccagaggcttttggaacaggagggataaggaggtgctccagaagcacgggactgtggaccttgcaggagtgaagactgtgatgtgtggtccccatatgtggctcagcaaagactcgagagatcatccctttgtctgcattgacggccctgtgacggcctccagcccacaggcctgctttctcctgtcctaacaccaagcctgggtggcagatgaacagtgcttccttgggttgccagctgagtcccggtattagggaatagtttcagctctttcaaagtgcacagtgttacagtcgaatgggctcccatcctggaataatatggagaatcctttgtcttccactcactgtcattcacaaggcacagtgccccatgaaattgccccaatagaaaacatggcatccctgacctccaaatggtctgttttggcctccattcctatatcctttaaatgactgagaatgcagctggtaaagttggaagaataaagttaaccaagcaggccaggcacggtggctcacgcctataatcccagcacttagggaggccaaggcgggcagatcacctgaggtcaatagttcgagaccagcctggccaacaaggtgaaaccccatctctactaaaaatacaaaaaattagccaggtgtggtggtgtgcacctgtagtcccagctatttgggaggctgaggtgggagaatcacttgaacctgggaggcggaggttgcagtgagctgaaatcgcgtaccacactccagcctgggtgacagagcgagactgtgtttcaaagaaaaaaaaaaacaagcagccttttgcttggttggaatctgattttctgttgcgtgttccttgtagccatagatgtgattatgtccacaccgggctgccttaatctgtcctgcttggagagtgacttgtaagatgctgaattattcatgataatacagtgaatgttctgggtccatgtactcagataaacatgaagaaaataagcaaagaaaaatggagactgggaaagcaaagctgttttcatcctataattgaagtagtgtggagcattaacttgtggatgattcagagttaaaagataaaaagacgccagagttctcgctgaagaatgtgagaaaaaaaaaaaaaaaaaaaaaaaa

SEQ ID NO: 1556 - DNA, 2219 bp, Homo sapiens
actgctgcgggggccgcggggggcgcagctggggcgcggctcggaggggaggctagggggccgtgccaggcccgaagccgaggcggggccgggatgcggcgctgaggcccagcatggccggcccgggccccaccttcccgctgcaccggctcgtctgggcgaaccggcatcgcgaactggaggccgcactgcacagccaccaggttccgccaaactcctgacaacctgcagctctgcctgaccaggccccgccgccagaccccggctctgcccctgccttccctcctgccccctcctctcccctgccaggacacgcaggccaccctctgccatctccctgcacgacattgaacaggaggacccccgcgggcggaccccactggagctggccgtgtctctgggaaacctggagtctgtgagagtgctccttcgacacaatgccaacgtgggcaaagagaaccgccagggctgggcagtcctgcaggaggcagtcagcactggagaccccgagatggtgcagctggtgctccagtatcgggactaccagagggccacgcagaggctggcgggcattccggaactgctcaacaaacttcgccaggcccccgatttctacgttgagatgaagtgggagttcaccagctgggtgccccttgtgtctaagatgtgcccaagcgatgtgtaccgcgtgtggaagcggggtgagagcctgcgagtagacaccagtctcctgggcttcgagcacgtgacctggcagcggggccggaggagcttcatcttcaagggccaggaggcaggagccctggtgatggaagtggaccatgaccggcaggtggtgcatgtggagacactggggctcactctgcaggagcccgaaacactgctggccgccatgcggcccagcgaggagcatgtggccagtcgcctcacctctcctatcgtctccacccacctggacactcgtaatgtggcctttgagaggaacaaatgtggtatctggggctggcggtctgagaagatggaaactgttagcggctacgaggccaaggtgtacagtgccaccaacgtggagctggtgacacgcacacgcacggagcacctctctgatcaggacaagtcgaggagcaaagcggggaagactccattccagtccttcctggggatggcgcagcagcattcctcccacaccggggcccccgtgcagcaggcagccagccccaccaaccccacagccatctcccctgaggagtacttcgaccccaacttcagcctggagtcacggaacattggccgccccatcgagatgtccagcaaagtacagaggttcaaggcaacactgtggctgagtgaagagcacccgctctccctgggtgaccaggtgacccccatcatcgacctaatggccatcagcaacgctcactttgccaagctgcgcgacttcatcactctgcgccttccacctggcttccccgtcaaaattgagattccccttttccacgtgctcaatgcccgcatcaccttcagcaacctgtgtggctgtgatgagcccctgagctccgtgtgggtgccggcccccagctctgctgtcgccgcatcagggaaccctttcccgtgcgaggtggaccccaccgtgtttgaagtgcccaacgggtacagcgtgctgggcatggagcgcaacgagcccctccgggacgaggacgatgacctcctgcagttcgccatccagcagagcctgcttgaagcgggcactgaggcggagcaggtgaccgtctgggaagccctgaccaacacccggcccggtgcccgccctcctccccaggccacggtttatgaggaacagcttcagctggagcgggccctccaggaaagcctgcagctgtccacagagcccaggggcccaggatcccctcccaggacacccccagcccccggtccacccagctttgaagagcagctgcgcctggccctggagttgtcttcacgggagcaggaggagcgggagcggcgcgggcagcaggaggaggaggacttacagcggatcctgcagctgtcactcactgagcactgagccatagccccgggagggctggccaggccactccctgcccacttttgtaatttatttatttataaactctctgctgctgagcttggggcctggagccccaggaatgagcaggcaggggagactgagatggaaataaagagactgtcgcagc

SEQ ID NO: 1557 - DNA, 7401 bp, Homo sapiens
aagcagtttagacaaacactgggcgacggtggctccagcatgtatcagccgaggtggagctgcggggccctggcatgaaaggcatgagccatgagcccaagtccccttcgctagggatgctttccaccgcgaccaggaccaccgccaccgtcaaccccctcaccccctcgccgctcaatggcgccctggtgcccagcggcagccccgccaccagcagcgcgctgtcggcccaggccgcgccatcctccagctttgccgccgcgctgcgcaagctcgccaaacaggcggaggagcccagagggtcctcactgagcagcgagtcgtcccccgtgtcctctccggccaccaaccacagctcccccgccagcacacccaagcgcgtgcccatgggccctatcatcgtcccccctgggggccacagcgtgcccagcaccccccccgtggtgaccatcgctccaaccaaaaccgtgaatggtgtctggaggagtgagagccggcaggatgccggctccaggagcagcagtggaggtcgggaacgcctcattgtggagcccccgctccctcaggagaaggcagggggaccagccatcccctcgcacctgctcagcaccccctaccccttcggcctctcccccagctcagttgtgcaggattcccgcttcccgccactcaacctccagcggcccgtgcaccacgtggtgccccccagtaccgtgaccgaggactacctgagaagcttccggccctaccacaccaccgacgacctccgcatgtcctcactgcctcccctcggcctggacccggccactgctgcagcctactaccaccccagctacctggccccacaccccttcccccacccggccttcaggatggacgactcctactgcctgtctgccctgaggtccccgttctaccccatccccacccccggctccctgcccccactgcacccatcagcgatgcacctgcacctctctggggtccgctaccctcccgagctctcccactcatccctggcagcgctgcactcggagcgcatgtctggcctcagcgcggagaggctgcagatggacgaggagctaaggcgggagagggagcgcgagcgcgagcgcgagcgtgagcgtgaggctgaccgcgagcgggagaaggaacgtgagcgcgaacgcgagaaggagcgcgagcaagagaaggagcgtgagcgtgagaaggagcgcgagcgcgagctggagcgccagcgggagcagcgggcccgggagaaggagctgctggccgccaaggccctggagcccagcttcctgcccgtggccgagctgcatgggctgcgtggccatgccactgaggagcggggcaagccctcggagcagctgaccccaacccgagcagagaagctgaaggatgccggcctgcaggcgcccaagcccgtccaacaccccttgcatccggtgcccaccccacaccacacggtgcccagcctcatctccaaccatggcatcttctctctgcctagcagcagtgctgccacagccctgctgatccagcgcaccaatgaggaggagaagtggctggcgcggcagcggcggctgcggcaggagaaggaggaccggcagtctcaggtgtccgagttccggcagcaggtgctggagcagcacctggatatgggccggcccccggtgccggcggaggcagagcacaggccggagagcaccaccaggccaggaccaaaccgtcacgagccaggtggccgtgaccctccgcagcactttggggggccaccacctctgatttcgcccaagccccagctccatgctgcacccacggccctctggaaccccgtgtccctgatggacaacaccttggagacgcggcgggccgaaagccactctctgcacagccacccggctgcatttgagcccagccgccaggcagccgtgccgctggtgaaggtggagcgggtcttctgcccggagaaagcagaggaggggccacggaagcgtgagcctgcccctctggacaagtaccagccacctccgccgccaccacgagagggagggagcctggagcaccagcccttcctgcccgggcccgggcccttcctggctgagctcgagaagtccacccagaccatcctgggccagcagcgggcctccctcccacaggcggccaccttcggggagctcagcggacccctgaagcctggctcgccctaccggcccccagtgccacgggcccccgaccctgcctacatctatgatgagttcctgcagcagcgccggaggctggtcagcaagctggacctggaggagcgcaggcggcgggaggcccaggagaaagggtactactacgacctcgatgactcttacgacgagagcgatgaggaggaggtcagggcccacctccgttgcgtggccgagcagccgcccctcaaactggacacgtcctctgagaagctagagtttttgcaactttttggcttgaccacccaacagcagaaggaggaattggtggcccagaagcggaggaagcggcggaggatgctgcgagagagaagcccgtcgcccccaacaattcagagcaagcggcagacgccttcaccgagactggcgctgtctacccgctacagccctgatgagatgaacaacagtcccaacttcgaagaaaagaagaagttcctgaccatcttcaacctgacccacatcagcgctgagaagaggaaagacaaagagagacttgttgaaatgctccgtgccatgaagcagaaggcactgtcagcagcagtggccgactccttgacaaactctccgagggacagtcctgccgtctccctgagtgaaccagccacgcagcaagcctctctggatgtggagaagccggttggtgttgctgcttccttgtctgacatcccaaaggccgcggagcctgggaagctggaacaggtccggccccaggagctgtcgagagtccaggagctagctcctgccagcggggagaaggccaggctgagcgaggcccctggaggcaaaaagagtctgagcatgcttcactatatccggggcgctgcacccaaggacattcctgtgccgctgtcccacagcaccaatgggaagagcaagccgtgggagccctttgtggcagaagagtttgcacatcagttccacgagtcagtgctgcagtccacccagaaggccctgcagaagcataaagggagcgtggctgtgctgtctgcagagcagaaccacaaggttgacacgtccgtccactacaacattcctgagctgcagtcctccagccgcgcccctccaccccagcacaatgggcagcaggagccccccactgcaaggaagggccccccaacccaggagttggaccgggactcggaggaggaggaagaggaggatgatgaagatggagaagatgaggaggaagtccccaagcgcaagtggcaagggatcgaggccgtttttgaagcttaccaggaacacatagaagagcaaaatctggagcggcaggtgttacagacacaatgtagacgactggaggcccggcactacagcctcagcctgacggcagagcagctctcccacagcgtggcggagttgaggagccagaaacagaagatggtctcagaaagggagcggctccaggcagaactggaccacttacgaaagtgccttgccttgcctgcaatgcactggcctaggggctacctgaagggatatcccaggtgacggtttcccttgcactaggccgaacctatagtatagaaatattatctattttattaccttgaatatttaatatttttcactgggaggtttgaagcttacaaaatgagaatgtgccatgcatgaagcaaaggattccaggctccagaaaaaatgaatgaactcaccttgacgtcaatgcaattgaatcaccgttgtcattcagcgagcaaccaatgtaggattgcccacagtttttctttttaaaggtggttttcgcccttcctctcccacattatttcttaatctgaacatgaaggctccattagcaacactaaaacttgatcattaacagccccctgtgcatatgagtggatcaaaccggttctgttctttcttgtgttgccatgttactatgcctcaagcccagtttgcttttgccgcagcgatggggccagtctcattcctccccaggagtgaaacttgcttcagctgaaaaggttgggtgcattgtcagtaaaaagggcttatttgtttcattttactttcctgcaaaattttcttcaaagcaacaagtcctaggagcacacaaagcaacccaaaggcttttccctggaaaagctctttcttacctaaagataaaaccaattcacaaactgaaggtagctttttattactccgtggggagcatgtacagagctctgtgtatacacagcttcacacccaccagattgttactacagtgggttgggttttcatacagacgtaaattttgagagaaaagtcaaaggtgcttcagccttgtactgtgtatatatattaaaaaaaaaacaaagttttgtatgtttttattactttaactattgttataaaaagcctgccatttttaatatgtggtttgggggatttttgtttgtttttcctgtttgggggttttgtttgttgttttggttttttttgggcaaaaaaaaaaaaaaaaccttgcttttagtgtttgtactgctgctggtcaggacattaaaatattgaagtgtttttaaaaattaaagaagaagaaaagtaaaagagcttaccactggcgcctatgcgatcacttcatttttagtttgagttgcaccagaagctgccgtagaaagccatgcgctactgcttacctcctccactccccctgcctgcccccagcatctggacaagctaatagcaaatattacccattgctatcaagggaggagggggtagtctgtagaacccatgtgtgacagtcatgtgcacacatgggcgggggcttttaaaaacctttcaggaagtcaatgatttctgtgattgatataattctaaggtgtctgagagcaggtacagaataggaacttcagaggctttgtttaaacgcaaagctttgtaaaagccacaaggtctgagctgaacccctcctttttgaacttactgtgacaagcacaggaacggtcagaaactgggctcatcacaccaaggcaaagcaacgggcgagtcttcctccttgtcctagttactgcctatggaggcagtgtttagatcaagaaggcctctcttgctcccaagggccctcaccagaggccagggctgccagtcactggtctggggggtggaggcctgagctgagggcagggtgcctgacctgtgtgccggctgctcactgctgtgaccagcagccgagcccttggccctagcccttgctgcgcagaacagcttgctggcagctggcatcgtgtcgctttatctgcccccgcacagtttgctttgtacgtctgccaagaatcttccagttattagcaaactcagacgaatgtaccgccagtattatcagcagtcaacaagcaccttcctctccacagaagcagctggaagagaactcgaggggctgtgctgcaggcctcccctcgaaagacactgggaggtcagcatgttccacaggtgttcagagggagtctgctacaaactatcagggcaaaatctcactggatttctccactgaaaacctacttgaggtttctggtctgaaggcttaagagtcacatcttagcacttccgctctcaggcctcctcctccatcacagatgtctggatgcttttggaaatggccttggctaaagtaaaagggaaaagtagatccgataacttaaaaacgtagctcatcccttaccatccaaggggcactcccttggttggattttctatgacagcacaggggacaggtggcacaccatgagaggtctgcccagggtgggagcagtgtcactgtgctagcaatagttggcttctcccctgtcagtggaaaccccacttctgcccggcccttgagcttcttgcccactgtctccccatccttccacctacttgtggcgatctgagtactctactcttgctcaagaagtaatacgacaatcagaatacaaaccagtaaggcaacacgaataaactaagaaaaaggtaagaactgtctcaaaaacgaaagcacaccacccaagacacagtacccagtcatggtttccccatccaactattagtttcatactttgaaaacttactttcagattattctcaaagaacacagtagcacctaaatctgttttcaattgggcttaaaaattgacatgcaatctcttaagttttttgttcagctacttcacactgagtacctcaaatctgctctggagtcgattatgccacctgtgtgtcaggatgcacctgaaagccctcggctcggtccttagaccatcttcctacattacctggaagggagctgccatctgtccctctgcagagggataccttccaatagtaaattatctggttcctcactgaaacaagttatttttgcttcatatagtcagagtcagactgacatgataaaatatcatgttcctaatctgttgtctcagataagtgaccaagacgggactttccacattttagtctacattctaatcttaaaggaataaagcactgaattgggactaacattctgataggttgcacccttaagagtattcagagagcatcaaaaggagcccacaccttcagcagtgaaggattctaacacagggaatctgcagtttgtagcagaatggtattttcctcaagtagctcataatactgccaaatctcaaaagttaagctgaatttcacaccagatcctacccctttccctgagccacatgtttcacacaagtgtagaaaatgccagggatccaccacaagatggagatggtcagcacaaaccgattctgttcctctttaaagtgtatattagccacttagcaatctctatattctttcaagtaaccaagctgttgactttcttactacttgcagtagcctgtccccaacttttccatccagtgcttaacctaaaaaactccttaactctgccttgacctgaggaagaccatgctaactggtgttattttgtatgtaccctgtgcttaattctataacagtaaaccccatacgcaggtgggagggaggaacaccggtgcctcggtcactctgggggcagtttagatgctgtgaaattaaacctgttctaagtgtacttgtttgaattaattgtattgtaatattatttgttgaatgtagtaattaggtatttatgaatatattgctgtaatttctgacaacatccaaaaaataaaatcttcctaaattatgttaaaaaaaa

SEQ ID NO: 1558 - DNA, 2749 bp, Homo sapiens
atccccgtgtgggggaggggggccttcggtctctccccagcctcttccttccccctggcctgagggtgggtggggaggggcagttcctctttccttcccaagcaccgaggaggccccagctccctaggggctgagaagctggagtcctgggcaaggggaggagctgagccctactcttgcaagacccccggcctcctcaccccacgcgggaagcatgaacagaaaagacagtaagaggaagtcccaccaggaatgcaccggaaaaataggagggcgaggccggccccgccaagtgcgccgccacaagacatgccccagccctcgggaaatcagcaaggtcatggcttccatgaacctgggcctgctgagtgagggcggctgcagcgaagatgagctgctggagaaatgcatccagtccttcgattcagctggcagcctgtgccacgaggaccacatgctcaacatggtgctggccatgcacagctgggtgctgccgtccgccgacctggctgcccgcctgctgacctcataccagaaggccacaggggacacccaggagctgagacggctgcagatctgtcacctggtcaggtactggctgatgcgacaccctgaggtgatgcaccaggatccccagctagaagaagtcataggtcgtttctgggccaccgtggcccgggagggcaactcagcccagagaagactgggagactcttctgacctgtgagtcagccctgtgctcccctcttccctgccccatcgccattctgccatctccctctatatccccaagccctcaactgtgagccactccaataccctgcccctcttggcccccagcctgagccctggtggccctggccccccactcccaatgagcagcccaggcctgggcaaaaagcgcaaagtgtccttgcttttcgaccacttggagacgggggagctggctcagcacctcacctacctggagttccggtccttccaggctatcacgccccaggacctgcggagctacgttttgcagggctcagtacgaggctgcccggccctggagggctccgtaggtctcagcaacagcgtgtcccgctgggtgcaggtgatggtgctgagccgtcccgggcccctacagcgtgcacaggtgctggacaagttcattcacgtggcacaggctccaccagctgcagaatttcaacacgctgatggcagtcacagggggcctgtgtcacagtgccatctccagactcaaggactcccatgcccacctgagccctgacagcaccaaggccctcctggagctcactgagctccttgcctcccacaacaactacgcccgctaccgccgcacctgggctggctgcgcgggtttccggctgcctgtactgggcgtgcacctcaaggacctggtgtccctgcatgaggcacagcccgacaggttgcctgacggccgcctgcacctacccaagctgaacaacctctacctgcggctgcaggagctggtggccctccaagggcagcatccaccctgcagcgccaatgaggatctgctgcacctgctcacgctctccctggacctcttctacacggaagacgagatctatgagctttcttatgcccgggagccgcgttgtcccaagagcctgccaccctcccccttcaatgcacctctggtggtggagtgggcccctggtgtgacacccaagccggacagggtcacactgggtcggcatgtggagcagctggtggagtctgtgttcaagaattatgaccctgaaggccgaggaacaatctctcaggaggactttgagcgactctcgggcaattttcccttcgcctgccatgggcttcacccacccccacgccaggggagaggatccttcagcagagaggagctgacagggtacctgctccgggccagcgccatctgctccaagttgggcctggccttcctgcacaccttccatgaggtcaccttccgaaagcctaccttctgcgacagctgcagtggcttcctctggggtgtcaccaagcaaggctaccgctgtcgggagtgcgggctgtgttgccacaaacactgcagagaccaggtgaaggtagaatgtaagaagaggccaggggccaagggcgatgcaggaccccccggagctcctgtcccatccacaccagctccccatgccagctgtggctccgaggaaaatcactcctacacgctatccctggagcctgagactgggtgccagcttcgccatgcctggacccagactgaatccccacacccttcctgggaaacagatacggtcccctgcccggtgatggacccaccatcaactgcatcctccaagctggattcctagacatctcttggtctcctctcttcctcactcccttcccccagtcagtcctgagtcctgccgtcagactctggcagggctcccagaggagcatcaactccaggagaacagggatttctatcaatgtcattcactgctgcatccccagtgcctagaacagggctggcaggtggtaggcgcctgacagatgcttgtctgatgcctgaatgtctccttacccatgcccacggcacaggatagatgtgctatagggcaaagaactttgagggtcgagcagcaggggcccattcagtcccagggagcagagacccccccaaccccttcacaaaccccaacacccctgacttggcccccacagagagaggtcctacagctgtcataaattaaatttattctctgga

SEQ ID NO: 1559 - DNA, 2592 bp, Homo sapiens
atccccgtgtgggggaggggggccttcggtctctccccagcctcttccttccccctggcctgagggtgggtggggaggggcagttcctctttccttcccaagcaccgaggaggccccagctccctaggggctgagaagctggagtcctgggcaaggggaggagctgagccctactcttgcaagacccccggcctcctcaccccacgcgggaagcatgaacagaaaagacagtaagaggaagtcccaccaggaatgcaccggaaaaataggagggcgaggccggccccgccaagtgcgccgccacaagacatgccccagccctcgggaaatcagcaaggtcatggcttccatgaacctgggcctgctgagtgagggcggctgcagcgaagatgagctgctggagaaatgcatccagtccttcgattcagctggcagcctgtgccacgaggaccacatgctcaacatggtgctggccatgcacagctgggtgctgccgtccgccgacctggctgcccgcctgctgacctcataccagaaggccacaggggacacccaggagctgagacggctgcagatctgtcacctggtcaggtactggctgatgcgacaccctgaggtgatgcaccaggatccccagctagaagaagtcataggtcgtttctgggccaccgtggcccgggagggcaactcagcccagagaagactgggagactcttctgacctcccaggcctgggcaaaaagcgcaaagtgtccttgcttttcgaccacttggagacgggggagctggctcagcacctcacctacctggagttccggtccttccaggctatcacgccccaggacctgcggagctacgttttgcagggctcagtacgaggctgcccggccctggagggctccgtaggtctcagcaacagcgtgtcccgctgggtgcaggtgatggtgctgagccgtcccgggcccctacagcgtgcacaggtgctggacaagttcattcacgtggcacagaggctccaccagctgcagaatttcaacacgctgatggcagtcacagggggcctgtgtcacagtgccatctccagactcaaggactcccatgcccacctgagccctgacagcaccaaggccctcctggagctcactgagctccttgcctcccacaacaactacgcccgctaccgccgcacctgggctggctgcgcgggtttccggctgcctgtactgggcgtgcacctcaaggacctggtgtccctgcatgaggcacagcccgacaggttgcctgacggccgcctgcacctacccaagctgaacaacctctacctgcggctgcaggagctggtggccctccaagggcagcatccaccctgcagcgccaatgaggatctgctgcacctgctcacgctctccctggacctcttctacacggaagacgagatctatgagctttcttatgcccgggagccgcgttgtcccaagagcctgccaccctcccccttcaatgcacctctggtggtggagtgggcccctggtgtgacacccaagccggacagggtcacactgggtcggcatgtggagcagctggtggagtctgtgttcaagaattatgaccctgaaggccgaggaacaatctctcaggaggactttgagcgactctcgggcaattttcccttcgcctgccatgggcttcacccacccccacgccaggggagaggatccttcagcagagaggagctgacagggtacctgctccgggccagcgccatctgctccaagttgggcctggccttcctgcacaccttccatgaggtcaccttccgaaagcctaccttctgcgacagctgcagtggcttcctctggggtgtcaccaagcaaggctaccgctgtcgggagtgcgggctgtgttgccacaaacactgcagagaccaggtgaaggtagaatgtaagaagaggccaggggccaagggcgatgcaggaccccccggagctcctgtcccatccacaccagctccccatgccagctgtggctccgaggaaaatcactcctacacgctatccctggagcctgagactgggtgccagcttcgccatgcctggacccagactgaatccccacacccttcctgggaaacagatacggtcccctgcccggtgatggacccaccatcaactgcatcctccaagctggattcctagacatctcttggtctcctctcttcctcactcccttcccccagtcagtcctgagtcctgccgtcagactctggcagggctcccagaggagcatcaactccaggagaacagggatttctatcaatgtcattcactgctgcatccccagtgcctagaacagggctggcaggtggtaggcgcctgacagatgcttgtctgatgcctgaatgtctccttacccatgcccacggcacaggatagatgtgctatagggcaaagaactttgagggtcgagcagcaggggcccattcagtcccagggagcagagacccccccaaccccttcacaaaccccaacacccctgacttggcccccacagagagaggtcctacagctgtcataaattaaatttattctctgga

SEQ ID NO: 1560 - DNA, 2634 bp, Homo sapiens
atccccgtgtgggggaggggggccttcggtctctccccagcctcttccttccccctggcctgagggtgggtggggaggggcagttcctctttccttcccaagcaccgaggaggccccagctccctaggggctgagaagctggagtcctgggcaaggggaggagctgagccctactcttgcaagacccccggcctcctcaccccacgcgggaagcatgaacagaaaagacagtaagaggaagtcccaccaggaatgcaccggaaaaataggagggcgaggccggccccgccaagtgcgccgccacaagacatgccccagccctcgggaaatcagcaaggtcatggcttccatgaacctgggcctgctgagtgagggcggctgcagcgaagatgagctgctggagaaatgcatccagtccttcgattcagctggcagcctgtgccacgaggaccacatgctcaacatggtgctggccatgcacagctgggtgctgccgtccgccgacctggctgcccgcctgctgacctcataccagaaggccacaggggacacccaggagctgagacggctgcagatctgtcacctggtcaggtactggctgatgcgacaccctgaggtgatgcaccaggatccccagctagaagaagtcataggtcgtttctgggccaccgtggcccgggagggcaactcagcccagagaagactgggagactcttctgacctcctgagccctggtggccctggccccccactcccaatgagcagcccaggcctgggcaaaaagcgcaaagtgtccttgcttttcgaccacttggagacgggggagctggctcagcacctcacctacctggagttccggtccttccaggctatcacgccccaggacctgcggagctacgttttgcagggctcagtacgaggctgcccggccctggagggctccgtaggtctcagcaacagcgtgtcccgctgggtgcaggtgatggtgctgagccgtcccgggcccctacagcgtgcacaggtgctggacaagttcattcacgtggcacagaggctccaccagctgcagaatttcaacacgctgatggcagtcacagggggcctgtgtcacagtgccatctccagactcaaggactcccatgcccacctgagccctgacagcaccaaggccctcctggagctcactgagctccttgcctcccacaacaactacgcccgctaccgccgcacctgggctggctgcgcgggtttccggctgcctgtactgggcgtgcacctcaaggacctggtgtccctgcatgaggcacagcccgacaggttgcctgacggccgcctgcacctacccaagctgaacaacctctacctgcggctgcaggagctggtggccctccaagggcagcatccaccctgcagcgccaatgaggatctgctgcacctgctcacgctctccctggacctcttctacacggaagacgagatctatgagctttcttatgcccgggagccgcgttgtcccaagagcctgccaccctcccccttcaatgcacctctggtggtggagtgggcccctggtgtgacacccaagccggacagggtcacactgggtcggcatgtggagcagctggtggagtctgtgttcaagaattatgaccctgaaggccgaggaacaatctctcaggaggactttgagcgactctcgggcaattttcccttcgcctgccatgggcttcacccacccccacgccaggggagaggatccttcagcagagaggagctgacagggtacctgctccgggccagcgccatctgctccaagttgggcctggccttcctgcacaccttccatgaggtcaccttccgaaagcctaccttctgcgacagctgcagtggcttcctctggggtgtcaccaagcaaggctaccgctgtcgggagtgcgggctgtgttgccacaaacactgcagagaccaggtgaaggtagaatgtaagaagaggccaggggccaagggcgatgcaggaccccccggagctcctgtcccatccacaccagctccccatgccagctgtggctccgaggaaaatcactcctacacgctatccctggagcctgagactgggtgccagcttcgccatgcctggacccagactgaatccccacacccttcctgggaaacagatacggtcccctgcccggtgatggacccaccatcaactgcatcctccaagctggattcctagacatctcttggtctcctctcttcctcactcccttcccccagtcagtcctgagtcctgccgtcagactctggcagggctcccagaggagcatcaactccaggagaacagggatttctatcaatgtcattcactgctgcatccccagtgcctagaacagggctggcaggtggtaggcgcctgacagatgcttgtctgatgcctgaatgtctccttacccatgcccacggcacaggatagatgtgctatagggcaaagaactttgagggtcgagcagcaggggcccattcagtcccagggagcagagacccccccaaccccttcacaaaccccaacacccctgacttggcccccacagagagaggtcctacagctgtcataaattaaatttattctctgga

SEQ ID NO: 1561 - DNA, 2436 bp, Homo sapiens
atccccgtgtgggggaggggggccttcggtctctccccagcctcttccttccccctggcctgagggtgggtggggaggggcagttcctctttccttcccaagcaccgaggaggccccagctccctaggggctgagaagctggagtcctgggcaaggggaggagctgagccctactcttgcaagacccccggcctcctcaccccacgcgggaagcatgaacagaaaagacagtaagaggaagtcccaccaggaatgcaccggaaaaataggagggcgaggccggccccgccaagtgcgccgccacaagacatgccccagccctcgggaaatcagcaaggtcatggcttccatgaacctgggcctgctgagtgagggcggctgcagcgaagatgagctgctggagaaatgcatccagtccttcgattcagctggcagcctgtgccacgaggaccacatgctcaacatggtgctggccatgcacagctgggtgctgccgtccgccgacctggctgcccgcctgctgacctcataccagaaggccacaggggacacccaggagctgagacggctgcagatctgtcacctggtcaggtactggctgatgcgacaccctgaggtgatgcaccaggatccccagctagaagaagtcataggtcgtttctgggccaccgtggcccgggagggcaactcagcccagagaagactgggagactcttctgacctcctgagccctggtggccctggccccccactcccaatgagcagcccaggcctgggcaaaaagcgcaaagtgtccttgcttttcgaccacttggagacgggggagctggctcagcacctcacctacctggagttccggtccttccaggctatcacgccccaggacctgcggagctacgttttgcagggctcagtacgaggctgcccggccctggagggctccgtaggtctcagcaacagcgtgtcccgctgggtgcaggtgatggtgctgagccgtcccgggcccctacagcgtgcacaggtgctggacaagttcattcacgtggcacagaggctccaccagctgcagaatttcaacacgctgatggcagtcacagggggcctgtgtcacagtgccatctccagactcaaggactcccatgcccacctgagccctgacagcaccaaggccctcctggagctcactgagctccttgcctcccacaacaactacgcccgctaccgccgcacctgggctggctgcgcgggtttccggctgcctgtactgggcgtgcacctcaaggacctggtgtccctgcatgaggcacagcccgacaggttgcctgacggccgcctgcacctacccaagctgaacaacctctacctgcggctgcaggagctggtggccctccaagggcagcatccaccctgcagcgccaatgaggatctgctgcacctgctcacgctctccctggacctcttctacacggaagacgagatctatgagctttcttatgcccgggagccgcgttgtcccaagagcctgccaccctcccccttcaatgcacctctggtggtggagtgggcccctggtgtgacacccaagccggacagggtcacactgggtcggcatgtggagcagctggtggagtctgtgttcaagaattatgaccctgaaggccgaggaacaatctctcaggaggactttgagcgactctcgggcaattttcccttcgcctgccatgggcttcacccacccccacgccaggggagaggatccttcagcagagaggagctgacagggtacctgctccgggccagcgccatctgctccaagttgggcctggccttcctgcacaccttccatgaggtcaccttccgaaagcctaccttctgcgacagctgcagtggcttcctctggggtgtcaccaagcaaggctaccgctgtcgggagtgcgggctgtgttgccacaaacactgcagagaccaggtgaaggtagaatgtaagaagaggccaggggccaagggcgatgcaggaccccccggagctcctgtcccatccacaccagctccccatgccagctgtggctccgaggaaaatcactcctacacgctatccctggagcctgagactgggtgccagcttcgccatgcctggacccagactgaatccccacacccttcctgggaaacagatacggtcccctgcccggtgatggacccaccatcaactgcatcctccaagctggattcctagacatctcttggtctcctctcttcctcactcccttcccccagtcagtcctgagtcctgccgtcagactctggcagggctcccagaggtaggcctccagaggcatccgccttcccatccacactgcctttagtggtacgtccgtcatctttttccctggaagtgactttcctcttttgcatcctggtggatgctaatcctgc

SEQ ID NO: 1562 - DNA, 1720 bp, Homo sapiens
actgcagggtgcgaaggggccggcgccgctgccgagttacgagtcggcgaaagcggcgggaagttcgtactgggcagaacgcgacgggtctgcggcttaggtgaaaatgcctcgtgtaaaagcagctcaagctggaagacagagctctgcaaagagacatcttgcagaacaatttgcagttggagagataataactgacatggcaaaaaaggaatggaaagtaggattacccattggccaaggaggctttggctgtatatatcttgctgatatgaattcttcagagtcagttggcagtgatgcaccttgtgttgtaaaagtggaacccagtgacaatggacctctttttactgaattaaagttctaccaacgagctgcaaaaccagagcaaattcagaaatggattcgtacccgtaagctgaagtacctgggtgttcctaagtattgggggtctggtctacatgacaaaaatggaaaaagttacaggtttatgataatggatcgctttgggagtgaccttcagaaaatatatgaagcaaatgccaaaaggttttctcggaaaactgtcttgcagctaagcttaagaattctggatattctggaatatattcacgagcatgagtatgtgcatggagatatcaaggcctcaaatcttcttctgaactacaagaatcctgaccaggtgtacttggtagattatggccttgcttatcggtactgcccagaaggagttcataaagaatacaaagaagaccccaaaagatgtcacgatggcactattgaattcacgagcatcgatgcacacaatggcgtggccccatcaagacgtggtgatttggaaatacttggttattgcatgatccaatggcttactggccatcttccttgggaggataatttgaaagatcctaaatatgttagagattccaaaattagatacagagaaaatattgcaagtttgatggacaaatgttttcctgagaaaaacaaaccaggtgaaattgccaaatacatggaaacagtgaaattactagactacactgaaaaacctctttatgaaaatttacgtgacattcttttgcaaggactaaaagctataggaagtaaggatgatggcaaattggacctcagtgttgtggagaatggaggtttgaaagcaaaaacaataacaaagaagcgaaagaaagaaattgaagaaagcaaggaacctggtgttgaagatacggaatggtcaaacacacagacagaggaggccatacagacccgttcaagaaccagaaagagagtccagaagtaattcagatgctgtgaaccagatttccttttctttgttttcttttgacttttttctccttttctatttgaactgttttattttcctgtgagtcttgcgaggtggaagtaatgattaaatactcatgtgttcagaaaacataaactttttttataaaaatattttgtacaattcattaaaggctaatttatgaaatttgaaaatcttcaggttatactccttaagttatcccaaagccgtgtgtttgtgatgttttggagtacatatatatgaaaattattatgacacgcacttttctaatcattgtacatttctcagagtggataaaaatgtttgacaaagtcctcacttttaaggaaatgcaaagcttaaaataaaactctcttttgtttgatgcaaacacacagtaaaaaaaaaaaaaaaaaa

SEQ ID NO: 1563 - DNA, 3870 bp, Homo sapiens
ggggctccccagtcccggcaggtcctggcgccgctgtacatagaaaccgttgccacggcgggaggatgccgtttcttttcggtctccgactgcagggggcggtcggccctgtggatgcaggaaagagggtgcctcggtgggagagacccagcttttcgcgttagtaggcccgagcagtttgaactggagctatgaccaccaaagattatccatcattgtggggctttggaacaacaaaaacattcaaaattcccattgaacatctagatttcaaatacattgaaaaatgttcagatgttaaacatctggaaaaaattctttgcgtgctcagatctggtgaggaaggatattatcctgaacttacagaattttgtgaaaagcatcttcaagccttggcccctgaaagcagagctttgaggaaagataaaccagcagcaacagcagccagttttacagctgaagaatgggaaaaaattgatggtgatataaagagttgggtatcagaaattaaaaaagaagaagataaaatgcactttcatgaaactgagacatttccagcaatgaaagataatttgcctccagttcgtggttcaaacagctgtcttcatgtaggcaaggaaaaatattctaaaagaccaactaaaaagaaaactccaagggattacgcggaatgggataaatttgacgtggagaaggaatgtttaaaaattgatgaagattacaaagaaaagacggtaatagacaagtcacacttgtctaaaattgagacaagaatagatacagcaggtctaactgagaaagaaaaggattttcttgccactcgtgaaaaggagaaaggaaatgaagctttcaactcaggagattatgaagaagcagtgatgtattataccaggagcatatcagcgcttcccactgtagttgcctataacaatcgagctcaagcagaaatcaaattacagaactggaatagtgcttttcaggattgtgaaaaggtcttggagttagaacctggaaacgtaaaggctcttctgcgtcgtgctactacatataaacatcaaaacaagctccgggaagctacagaagatttgagtaaagtactagatgttgagcctgataatgatttggccaagaaaaccttgtcagaggttgaaagagatctgaaaaattctgaagctgcatctgagactcaaaccaaagggaaaaggatggttattcaggaaatagaaaactccgaagatgaagaaggaaaaagcggaagaaaacatgaagatggcggtggagataagaagcccgcggagccggcgggagccgcgcgcgccgcccagccgtgcgtcatgggcaacatccagaagaagctgactggcaaagccgaaggcggcaagcggccggcaaggggcgcgccgcagcggggccagaccccggaggccggcgcggacaagcggagcccacggcgggcctctgcggcggcggcggcgggcggcggcgccaccgggcatccgggcggcgggcagggcgcggagaaccctgccggcctgaagagccagggcaacgagctgttccgaagcgggcagttcgccgaggcggccggcaagtactcggcggcaatcgcgctcctggagccagcaggaagtgaaattgcagatgatctaagtatcttatattcaaatagagcagcatgttacctaaaagaaggaaactgcagtggctgcattcaagattgtaacagggctctggaacttcatccattctctatgaaacctcttctgaggcgggcgatggcctatgaaactctagagcagtatgggaaagcttatgtggattataaaacagtgttgcagatagactgtggactccagctagcaaatgacagtgttaacaggctatcaagaattttaatggagctggatggaccaaattggcgggagaagctgtcacctattcctgctgtgcctgcttctgtgccactgcaagcttggcatccggcaaaagagatgatctcaaaacaagcaggagactccagcagccatcgccagcagggcatcacagatgaaaaaacatttaaagcccttaaggaagaaggaaatcaatgtgtaaatgacaaaaactataaagacgccctcagtaaatacagcgaatgcttaaagattaacaataaggaatgtgccatatatacaaacagagctctctgttacttgaagctgtgccagtttgaagaagcaaagcaggactgtgatcaggcacttcagctagctgatgggaacgtgaaagccttctatagacgagctctggctcataaaggactcaagaattatcagaaaagcttaattgatctcaataaagttatcctactagatccaagtattattgaggcaaagatggaactggaagaggtaactagactccttaatcttaaggataagacagcaccattcaacaaagaaaaggagagaaggaaaattgagattcaagaggtgaatgaaggcaaggaggagcctggaagacctgcaggggaggtctccatgggatgccttgcttctgagaagggaggcaaaagcagcaggtcaccagaagaccctgagaaacttccgatagccaagcctaataatgcctatgaatttggtcagattataaatgctctcagtaccaggaaggataaagaagcctgtgcacatcttttagccatcactgcaccaaaagatttgccgatgtttttaagtaacaaacttgaaggggatacattccttctcctcattcagtctctgaaaaataatcttattgaaaaagatccctcattggtgtatcagcatcttttatacctgagtaaagcagaaaggtttaagatgatgttgacactaattagcaagggccaaaaggagctaattgaacagctgtttgaggacctttcggacacaccaaacaaccattttactttagaagatatacaggccctaaaaaggcagtatgagctttaaatcaagataattgttagatttcttccatgcatgtatgtgttccaggaatgttaatgagatggtattgtaaaagagttgcatggataaaacttggcctagaaaagtttggtctgcactataaaacattttacttattttcctacatagaacatgtatattctacaatctgctttttattagttgtaaatattttcttatgtaccagaaccaaataagtatatttagaacttgttaaaaatacattttaatttatgatatacatattattttaattacttgttaaaattttgagttaagttgcatttctttgggctatgaaggagtcctcttaagtttgatagaaatgaatttcttgtaacattcttttttaaaagtggaagtcattaacagtgattattatatcacttatatcctgctaagatacacataaatcccattttgtactagtacctgtggattacagtcagttaaaatgaaatgcaacactgaagtctataacatgaaatgattattaaattgtttattaatttagagctataagaggaacttattttttctaatacggaagcattgcctaataattaagaacaaaaattgccaaaaatttctaccactttttactagattttaaaaagctactttcttttatattgcctatataagcaaaaaaccaaccactgtattaaagcaaactaagcctgcatttatatctgaattattacctccatattttaccaaacatttgaatgtcccccttcccccttttttgttttctgcttttatgactgtatttattcctttactgtaaaagaatatgaagaactcatacatgttgaaagctcctttgttgactgggtcaaagtgaaggaatttcaatctcaaaaaaaaaaaaaaaaaa

SEQ ID NO: 1564 - DNA, 3765 bp, Homo sapiens
gacgagaccctccctcagcacctgcagtgcagccagagccggtgcggcggccgcgacttccccgacgcggggcgctgagaagcactatgaccaccaaagattatccatcattgtggggctttggaacaacaaaaacattcaaaattcccattgaacatctagatttcaaatacattgaaaaatgttcagatgttaaacatctggaaaaaattctttgcgtgctcagatctggtgaggaaggatattatcctgaacttacagaattttgtgaaaagcatcttcaagccttggcccctgaaagcagagctttgaggaaagataaaccagcagcaacagcagccagttttacagctgaagaatgggaaaaaattgatggtgatataaagagttgggtatcagaaattaaaaaagaagaagataaaatgcactttcatgaaactgagacatttccagcaatgaaagataatttgcctccagttcgtggttcaaacagctgtcttcatgtaggcaaggaaaaatattctaaaagaccaactaaaaagaaaactccaagggattacgcggaatgggataaatttgacgtggagaaggaatgtttaaaaattgatgaagattacaaagaaaagacggtaatagacaagtcacacttgtctaaaattgagacaagaatagatacagcaggtctaactgagaaagaaaaggattttcttgccactcgtgaaaaggagaaaggaaatgaagctttcaactcaggagattatgaagaagcagtgatgtattataccaggagcatatcagcgcttcccactgtagttgcctataacaatcgagctcaagcagaaatcaaattacagaactggaatagtgcttttcaggattgtgaaaaggtcttggagttagaacctggaaacgtaaaggctcttctgcgtcgtgctactacatataaacatcaaaacaagctccgggaagctacagaagatttgagtaaagtactagatgttgagcctgataatgatttggccaagaaaaccttgtcagaggttgaaagagatctgaaaaattctgaagctgcatctgagactcaaaccaaagggaaaaggatggttattcaggaaatagaaaactccgaagatgaagaaggaaaaagcggaagaaaacatgaagatggcggtggagataagaagcccgcggagccggcgggagccgcgcgcgccgcccagccgtgcgtcatgggcaacatccagaagaagctgactggcaaagccgaaggcggcaagcggccggcaaggggcgcgccgcagcggggccagaccccggaggccggcgcggacaagcggagcccacggcgggcctctgcggcggcggcggcgggcggcggcgccaccgggcatccgggcggcgggcagggcgcggagaaccctgccggcctgaagagccagggcaacgagctgttccgaagcgggcagttcgccgaggcggccggcaagtactcggcggcaatcgcgctcctggagccagcaggaagtgaaattgcagatgatctaagtatcttatattcaaatagagcagcatgttacctaaaagaaggaaactgcagtggctgcattcaagattgtaacagggctctggaacttcatccattctctatgaaacctcttctgaggcgggcgatggcctatgaaactctagagcagtatgggaaagcttatgtggattataaaacagtgttgcagatagactgtggactccagctagcaaatgacagtgttaacaggctatcaagaattttaatggagctggatggaccaaattggcgggagaagctgtcacctattcctgctgtgcctgcttctgtgccactgcaagcttggcatccggcaaaagagatgatctcaaaacaagcaggagactccagcagccatcgccagcagggcatcacagatgaaaaaacatttaaagcccttaaggaagaaggaaatcaatgtgtaaatgacaaaaactataaagacgccctcagtaaatacagcgaatgcttaaagattaacaataaggaatgtgccatatatacaaacagagctctctgttacttgaagctgtgccagtttgaagaagcaaagcaggactgtgatcaggcacttcagctagctgatgggaacgtgaaagccttctatagacgagctctggctcataaaggactcaagaattatcagaaaagcttaattgatctcaataaagttatcctactagatccaagtattattgaggcaaagatggaactggaagaggtaactagactccttaatcttaaggataagacagcaccattcaacaaagaaaaggagagaaggaaaattgagattcaagaggtgaatgaaggcaaggaggagcctggaagacctgcaggggaggtctccatgggatgccttgcttctgagaagggaggcaaaagcagcaggtcaccagaagaccctgagaaacttccgatagccaagcctaataatgcctatgaatttggtcagattataaatgctctcagtaccaggaaggataaagaagcctgtgcacatcttttagccatcactgcaccaaaagatttgccgatgtttttaagtaacaaacttgaaggggatacattccttctcctcattcagtctctgaaaaataatcttattgaaaaagatccctcattggtgtatcagcatcttttatacctgagtaaagcagaaaggtttaagatgatgttgacactaattagcaagggccaaaaggagctaattgaacagctgtttgaggacctttcggacacaccaaacaaccattttactttagaagatatacaggccctaaaaaggcagtatgagctttaaatcaagataattgttagatttcttccatgcatgtatgtgttccaggaatgttaatgagatggtattgtaaaagagttgcatggataaaacttggcctagaaaagtttggtctgcactataaaacattttacttattttcctacatagaacatgtatattctacaatctgctttttattagttgtaaatattttcttatgtaccagaaccaaataagtatatttagaacttgttaaaaatacattttaatttatgatatacatattattttaattacttgttaaaattttgagttaagttgcatttctttgggctatgaaggagtcctcttaagtttgatagaaatgaatttcttgtaacattcttttttaaaagtggaagtcattaacagtgattattatatcacttatatcctgctaagatacacataaatcccattttgtactagtacctgtggattacagtcagttaaaatgaaatgcaacactgaagtctataacatgaaatgattattaaattgtttattaatttagagctataagaggaacttattttttctaatacggaagcattgcctaataattaagaacaaaaattgccaaaaatttctaccactttttactagattttaaaaagctactttcttttatattgcctatataagcaaaaaaccaaccactgtattaaagcaaactaagcctgcatttatatctgaattattacctccatattttaccaaacatttgaatgtcccccttcccccttttttgttttctgcttttatgactgtatttattcctttactgtaaaagaatatgaagaactcatacatgttgaaagctcctttgttgactgggtcaaagtgaaggaatttcaatctcaaaaaaaaaaaaaaaaaa

SEQ ID NO: 1565 - DNA, 859 bp, Homo sapiens
ggttgggcagggcaatacgcctgcgtgttgccggatgcgcatgcgcaggcgccgtgtggcactcggcggtcgaaaggggagttcaaggagacgggggcgacgcggctgagggcttctcgtcggggtcggggctgcagccgtcatgccggggatagtggagctgcccactctagaggagctgaaagtagatgaggtgaaaattagttctgctgtgcttaaagctgcggcccatcactatggagctcaatgtgataagcccaacaaggagtttatgctctgccgctgggaagagaaagatccgaggcggtgtttagaggaaggcaaactggtcaacaagtgtgctttggacttctttaggcagataaaacgtcactgtgcagagccttttacagaatattggacttgcattgattatactggccagcagttatttcgtcactgtcgcaaacagcaggcaaagtttgacgagtgtgtgctggacaaactgggctgggtgcggcctgacctgggagaactgtcaaaggtcaccaaagtgaaaacagatcgacctttaccggagaatccctatcactcaagaccaagaccggatcccagccctgagatcgagggagatctgcagcctgccacacatggcagccgcttttatttctggaccaagtaaagatgggtccgtggcccacactcggtcatgtgctcagacaacgactgatgaaaacgcccatgcggtttgcatcgactgatagtgtgttctttccgggatcacaaacattaacaaaaaagttaacttatgtgacttggcagttattctataccatttcctgtccattaaaatttttaaaggaaaaaaaaaaaaaaaaaa

SEQ ID NO: 1566 - DNA, 4153 bp, Homo sapiens
atggccttttcctacctgtttgccacctgtgcccgcggcctccttccccgccggccgcgctccggagcctccgggccgcggtggagcgagggcccaggcgaggcgagggccgggcggcgggcgccgggccccgcggccggcacgacggagcccccgtacggccggcggcagcggttggcggcggcccccggcccccggcgcgggaagcggcggcggggcggcggcggcggtggcggtggcggtggcggcgacggtggcagcgccatggagccgggggaggtgaaggaccggatcctggagaacatctcgctgtcggtgaagaagttgcagagctattttgctgcatgtgaggatgagatccctgccatccggaaccatgacaaggtcctacagcgtctgtgtgagcacctggaccacgccctgctgtacggactgcaagacctctcctctggctactgggtgctcgtggtgcattttactcggagagaggccatcaagcagatcgaggtgctgcagcacgtggccaccaacctggggcgcagccgtgcctggctgtacctggccctcaacgagaactccttggagagctacctgcggttgttccaggagaacctgggcctgctgcataagtactacgtcaagaatgccctggtctgcagccacgatcacctgacgctcttcctgaccttggtgtccgggctagagttcattcgtttcgagctggatctggatgccccttacctagacctggccccctacatgcccgactactacaaacctcagtacctgctggactttgaagaccgccttcccagctcggtccacggctcagacagtctgtccctcaactctttcaactccgtcacctccaccaacctggagtgggatgacagtgcgattgccccatctagtgaggattatgattttggagatgtgtttccagcagtgccgtctgtacccagcacagactgggaagatggagacctcacagacacggtcagtggtccccgctccacagcctccgacctgaccagcagcaaggcctccaccaggagccccacccagcgccagaaccccttcaacgaggagccggcagagactgtgtcctcctctgacaccacccccgtgcacaccacctctcaggagaaggaggaggcccaggccctggacccgccggatgcctgcacggagctcgaggtcatcagggtcaccaagaagaagaaaattggcaagaagaaaaagagcagatcagatgaggaggcaagtccactccaccccgcctgcagccagaagaaatgtgccaagcagggggacggtgacagccgcaacggcagcccaagccttgggcgggactcgccagacactatgcttgcctccccccaggaggagggagaggggccgagcagcaccacggagagcagcgagcgctccgagccgggcctgctgatccctgagatgaaggacacctccatggagcgcttggggcagcccctgagcaaggttatcgaccagctcaacgggcagctggaccccagcacctggtgctcccgtgctgagcccccagaccagtcctttcggaccggctctcccggggatgccccggagaggccgccgctttgcgactttagtgaggggctttcagccccaatggacttctaccgctttaccgtcgagagtccaagcactgttacatcaggtggcggccaccatgaccctgcagggcttggccaaccgctgcatgttcctagtagccctgaggctgctggccaagaagaagagggaggaggaggagagggacagacgcctcggcccctagaggataccacgagggaggctcaggagctggaggcccagctgtccctggtcagggaggggcctgtgtctgagccagagcctgggacccaggaggttctctgccagctcaagcgagaccagcccagcccgtgtctgagtagcgctgaggattctggggtggatgagggacaggggagcccttcggagatggtccattcctcggagttcagagtagacaacaatcacctgctcctgctcatgatccacgtgttccgagaaaacgaagagcagctgttcaaaatgatccggatgagcaccgggcacatggagggcaacctgcagctgctgtacgtgctgctcacagactgctatgtctacctgctccggaaaggggccacagagaagccatacctggtggaagaggccgtttcttacaatgaacttgactatgtgtcggttggccttgaccagcagacggtgaagctggtgtgcaccaaccgcaggaagcagtttctgctggacacggctgatgtggcgctggctgagttctttttggcttctttgaagtcagccatgatcaaaggctgtcgagaacctccctaccccagcatcctgacggatgccaccatggagaagctggcactggccaaatttgtggcccaagaatcgaagtgtgaggcatctgctgtcaccgtgcgcttctacggccttgtgcactgggaggaccccacagacgagtccctgggccccacgccctgccactgctcaccccccgagggcaccatcaccaaagaaggcatgctgcactacaaggcgggcacctcctacctgggcaaggaacactggaagacgtgcttcgtggtgctcagcaacgggatcctctaccagtacccggaccgcaccgacgtcatccctctgctctcggtgaacatggggggggagcagtgcggtggctgccggagagccaacaccacggatcggccccacgccttccaggtcattctctccgaccggccctgcctggagctaagtgccgagagcgaggccgagatggccgagtggatgcagcatctctgccaggctgtgtccaaaggggtcatcccccagggcgtagctcccagcccctgcataccctgctgcctggtcctcacggatgaccgcctctttacgtgccatgaggattgccagaccagcttcttccgctctttgggcacagccaagctgggcgacatcagcgccgtctccaccgagccgggcaaggagtactgcgtcttggagttctcccaggacagccagcagctcctcccgccctgggtcatctacctgagctgcacttctgaactggaccgattgctgtctgcactgaactctgggtggaaaaccatctatcaggtggacctcccccacacggcgatccaggaagcctccaacaagaagaaattcgaggatgccttgagcctcatccacagcgcctggcagcggagcgacagtctctgccgcggccgagcctcccgagacccctggtgctgaggcagagctggttggcgtccctggtgggcaggaaaggaaggcacgccagccggcaggcacactgtcacggctgttgtcatgctgtcgggagcctacagtccacccctgccctgggcggcagaaccaccgagtgtggcttaagacagggtccctccactccagggatccagatcaggtgcccggcacccctgggcatcctgcccgacaggtagcgaatggaggtcgctgggggcagagggtccgagccctgtgggctctgcggatgcacgccctcctcccgggcctccgcctcagtctgcagaatttctgccgagtggcaccgagaacaccatccatctaaggacgaacaaaagaaccaggagggcgggacccccctcttcctctcctgggttgggggctggggccctgagtgcccagccatccttgttcgtgtttgaacactctcctggccacgtggggaagcgggaacacggggtgtctgcgcatgtttcctcctcctagctccatcactgcgcacacagctgcctgcctcgccagatgcaggggggcgggcagccctccctggctgccaggaggctctgcatgcccacagtcctgccctgcctgtcccctcaacccggcagtgcctgtagcaccgaggagcaaagggggtggatggggggcttggagaagggcggagcccaccagcctggcatccatgttgacatcttctgactgtcccctgcttggctggagccaggcccttccctagagtttcgtcaagagcctcctggggaaggggtcaggtggtttgggttttgttttttaaaataaaatagacatgttatat

SEQ ID NO: 1567 - DNA, 4153 bp, Homo sapiens; identical to SEQ ID NO: 1566

SEQ ID NO: 1568 - DNA, 5910 bp, Homo sapiens
agctccagccgcactgccccgatggctccctacccctgtggctgccacatcctgctgctgctcttctgctgcctggcggctgcccgggccaacctgctgaacctgaactggctttggttcaataatgaggacaccagccacgcagctaccacgatccctgagccccaggggcccctgcctgtgcagcccacagcagataccaccacacacgtgaccccccggaatggttccacagagccagcgacagcccctggcagccctgagccaccctcagagctgctggaagatggccaggacacccccacttctgccgagagcccggacgcgccagaggagaacattgccggtgtcggagccgagatcctgaacgtggccaaaggcatccggagcttcgtccagctgtggaatgacactgtccccactgagagcttggccagggcggaaaccctggtcctggagactcctgtgggcccccttgccctcgctgggccttccagcaccccccaggagaatgggaccactctctggcccagccgtggcattcctagctctccgggcgcccacacaaccgaggctggcaccttgcctgcacccaccccatcgcctccgtccctgggcaggccctgggcaccactcacggggccctcagtgccaccaccatcttcagagcgcatcagcgaggaggtggggctgctgcagctccttggggaccccccgccccagcaggtcacccagacggatgaccccgacgtcgggctggcctacgtctttgggccagatgccaacagtggccaagtggcccggtaccacttccccagcctcttcttccgtgacttctcactgctgttccacatccggccagccacagagggcccaggggtgctgttcgccatcacggactcggcgcaggccatggtcttgctgggcgtgaagctctctggggtgcaggacgggcaccaggacatctccctgctctacacagaacctggtgcaggccagacccacacagccgccagcttccggctccccgccttcgtcggccagtggacacacttagccctcagtgtggcaggtggctttgtggccctctacgtggactgtgaggagttccagagaatgccgcttgctcggtcctcacggggcctggagctggagcctggcgccgggctcttcgtggctcaggcggggggagcggaccctgacaagttccagggggtgatcgctgagctgaaggtgcgcagggacccccaggtgagccccatgcactgcctggacgaggaaggcgatgactcagatggggcattcggagactctggcagcgggctcggggacgcccgggagcttctcagggaggagacgggcgcggccctaaaacccaggctccccgcgccaccccccgtcaccacgccacccttggctggaggcagcagcacggaagattccagaagtgaagaagtcgaggagcagaccacggtggcttcgttaggagctcagacacttcctggctcagattctgtctccacgtgggacgggagtgtccggacccctgggggccgcgtgaaagagggcggcctgaaggggcagaaaggggagccaggtgttccgggcccacctggccgggcaggccccccaggatccccatgcctacctggtcccccgggtctcccgtgcccagtgagtcccctgggtcctgcaggcccagcgttgcaaactgtccccggaccacaaggacccccagggcctccggggagggacggcacccctggaagggacggcgagccgggcgaccccggtgaagacggaaagccgggcgacaccgggccacaaggcttccctgggactccaggggatgtaggtcccaagggagacaagggagaccctggggttggagagagagggcccccaggaccccaagggcctccagggcccccaggaccctccttcagacacgacaagctgaccttcattgacatggagggatctggctttgggggcgatctggaggccctgcggggtcctcgaggcttccctggacctcccggaccccccggtgtcccaggcctgcccggcgagccaggccgctttggggtgaacagctccgacgtcccaggacccgccggccttcctggtgtgcctgggcgcgagggtccccccgggtttcctggcctcccgggacccccaggccctccgggaagagaggggcccccaggaaggactgggcagaaaggcagcctgggtgaagcaggcgccccaggacataaggggagcaagggagcccccggtcctgctggtgctcgtggggagagcggcctggcaggagcccccggacctgctggaccaccaggcccccctgggccccctgggcccccaggaccaggactccccgctggatttgatgacatggaaggctccggggggcccttctggtcaacagcccgaagcgctgatgggccacagggacctcccggcctgccgggacttaagggggatcctggcgtgcctgggctgccgggggcgaagggagaagttggagcagatggaatccccgggttccccggcctccctggcagagagggcattgctgggccccaggggccaaagggagacagaggcagccggggagaaaagggagatccagggaaggacggagtcgggcagccgggcctccctggcccccccggacccccgggacctgtggtctacgtgtcggagcaggacggatccgtcctgagcgtgccgggacctgagggccggccgggtttcgcaggctttcccggacctgcaggacccaagggcaacctgggctctaagggcgaacgaggctccccgggacccaagggtgagaagggtgaaccgggcagcatcttcagccccgacggcggtgccctgggccctgcccagaaaggagccaagggagagccgggcttccgaggacccccgggtccatacggacggccggggtacaagggagagattggctttcctggacggccgggtcgccccgggatgaacggattgaaaggagagaaaggggagccgggagatgccagccttggatttggcatgaggggaatgcccggccccccaggacctccagggcccccaggccctccagggactcctgtttacgacagcaatgtgtttgctgagtccagccgccccgggcctccaggattgccagggaatcagggccctccaggacccaagggcgccaaaggagaagtgggcccccccggaccaccagggcagtttccgtttgactttcttcagttggaggctgaaatgaagggggagaagggagaccgaggtgatgcaggacagaaaggcgaaaggggggagcccgggggcggcggtttcttcggctccagcctgcccggcccccccggccccccaggcccacgtggctaccctgggattccaggtcccaagggagagagcatccggggccagcccggcccacctggacctcagggaccccccggcatcggctacgaggggcgccagggccctcccggccccccaggccccccagggcccccttcatttcctggccctcacaggcagactatcagcgttcccggccctccgggcccccctgggccccctgggccccctggaaccatgggcgcctcctcaggggtgaggctctgggctacacgccaggccatgctgggccaggtgcacgaggttcccgagggctggctcatcttcgtggccgagcaggaggagctctacgtccgcgtgcagaacgggttccggaaggtccagctggaggcccggacaccactcccacgagggacggacaatgaagtggccgccttgcagccccccgtggtgcagctgcacgacagcaacccctacccgcggcgggagcacccccaccccaccgcgcggccctggcgggcagatgacatcctggccagcccccctcgcctgcccgagccccagccctaccccggagccccgcaccacagctcctacgtgcacctgcggccggcgcgacccacaagcccacccgcccacagccaccgcgacttccagccggtgctccacctggttgcgctcaacagccccctgtcaggcggcatgcggggcatccgcggggccgacttccagtgcttccagcaggcgcgggccgtggggctggcgggcaccttccgcgccttcctgtcctcgcgcctgcaggacctgtacagcatcgtgcgccgtgccgaccgcgcagccgtgcccatcgtcaacctcaaggacgagctgctgtttcccagctgggaggctctgttctcaggctctgagggtccgctgaagcccggggcacgcatcttctcctttgacggcaaggacgtcctgaggcaccccacctggccccagaagagcgtgtggcatggctcggaccccaacgggcgcaggctgaccgagagctactgtgagacgtggcggacggaggctccctcggccacgggccaggcctcctcgctgctggggggcaggctcctggggcagagtgccgcgagctgccatcacgcctacatcgtgctctgcattgagaacagcttcatgactgcctccaagtagccaccgcctggatgcggatggccggagaggaccggcggctcggaggaagcccccaccgtgggcagggagcggccggccagcccctggccccaggacctggctgccatactttcctgtatagttcacgtttcatgtaatcctcaagaaataaaaggaagccaaagagtgtatttttttaaaagtttaaaacagaagcctgatgctgacattcacctgccccaactctcccctgacctgtgagcccagctgggtcaggcagggtgcagtatcatgccctgtgcaacctcttggcctgatcagaccacggctcgatttctccaggatttcctgctttgggaagccgtgctcgccccagcaggtgctgacttcatctcccacctagcagcaccgttctgtgcacaaaacccagacctgttagcagacaggccccgtgaggcaatgggagctgaggccacactcagcacaaggccatctgggctcctccagggtgtgtgctcgccctgcggtagatgggagggaggctcaggtccctggggctagggggagccccttctgctcagctctgggccattctccacagcaaccccaggctgaagcaggttcccaagctcagaggcgcactgtgacccccagctccggcctgtcctccaacaccaagcacagcagcctggggctggcctcccaaatgagccatgagatgatacatccaaagcagacagctccaccctggccgagtccaagctgggagattcaagggacccatgagttggggtctggcagcctcccatccagggcccccatctcatgcccctggctgggacgtggctcagccagcacttgtccagctgagcgccaggatggaacacggccacatcaaagaggctgaggctggcacaggacatgcggtagccagcacacagggcagtgagggagggctgtcatctgtgcactgcccatggacaggctggctccagatgcagggcagtcattggctgtctcctaggaaacccatatccttaccctccttgggactgaaggggaaccccggggtgcccacaggccgccctgcgggtgaacaaagcagccacgaggtgcaacaaggtcctctgtcagtcacagccacccctgagatccggcaacatcaacccgagtcattcgttctgtggagggacaagtggactcagggcagcgccaggctgaccacagcacagccaacacgcacctgcctcaggactgcgacgaaaccggtggggctggttctgtaattgtgtgtgatgtgaagccaattcagacaggcaaataaaagtgaccttttacactgaaaaaaaaaaaaaaaaa

SEQ ID NO: 1569 - DNA, 5781 bp, Homo sapiens
agctccagccgcactgccccgatggctccctacccctgtggctgccacatcctgctgctgctcttctgctgcctggcggctgcccgggccaacctgctgaacctgaactggctttggttcaataatgaggacaccagccacgcagctaccacgatccctgagccccaggggcccctgcctgtgcagcccacagcagataccaccacacacgtgaccccccggaatggttccacagagccagcgacagcccctggcagccctgagccaccctcagagctgctggaagatggccaggacacccccacttctgccgagagcccggacgcgccagaggagaacattgccggtgtcggagccgagatcctgaacgtggccaaaggcatccggagcttcgtccagctgtggaatgacactgtccccactgagagcttggccagggcggaaaccctggtcctggagactcctgtgggcccccttgccctcgctgggccttccagcaccccccaggagaatgggaccactctctggcccagccgtggcattcctagctctccgggcgcccacacaaccgaggctggcaccttgcctgcacccaccccatcgcctccgtccctgggcaggccctgggcaccactcacggggccctcagtgccaccaccatcttcagagcgcatcagcgaggaggtggggctgctgcagctccttggggaccccccgccccagcaggtcacccagacggatgaccccgacgtcgggctggcctacgtctttgggccagatgccaacagtggccaagtggcccggtaccacttccccagcctcttcttccgtgacttctcactgctgttccacatccggccagccacagagggcccaggggtgctgttcgccatcacggactcggcgcaggccatggtcttgctgggcgtgaagctctctggggtgcaggacgggcaccaggacatctccctgctctacacagaacctggtgcaggccagacccacacagccgccagcttccggctccccgccttcgtcggccagtggacacacttagccctcagtgtggcaggtggctttgtggccctctacgtggactgtgaggagttccagagaatgccgcttgctcggtcctcacggggcctggagctggagcctggcgccgggctcttcgtggctcaggcggggggagcggaccctgacaagttccagggggtgatcgctgagctgaaggtgcgcagggacccccaggtgagccccatgcactgcctggacgaggaaggcgatgactcagatggggcattcggagactctggcagcgggctcggggacgcccgggagcttctcagggaggagacgggcgcggccctaaaacccaggctccccgcgccaccccccgtcaccacgccacccttggctggaggcagcagcacggaagattccagaagtgaagaagtcgaggagcagaccacggtggcttcgttaggagctcagacacttcctggctcagattctgtctccacgtgggacgggagtgtccggacccctgggggccgcgtgaaagagggcggcctgaaggggcagaaaggggagccaggtgttccggcagggcctccggggagggacggcacccctggaagggacggcgagccgggcgaccccggtgaagacggaaagccgggcgacaccgggccacaaggcttccctgggactccaggggatgtaggtcccaagggagacaagggagaccctggggttggagagagagggcccccaggaccccaagggcctccagggcccccaggaccctccttcagacacgacaagctgaccttcattgacatggagggatctggctttgggggcgatctggaggccctgcggggtcctcgaggcttccctggacctcccggaccccccggtgtcccaggcctgcccggcgagccaggccgctttggggtgaacagctccgacgtcccaggacccgccggccttcctggtgtgcctgggcgcgagggtccccccgggtttcctggcctcccgggacccccaggccctccgggaagagaggggcccccaggaaggactgggcagaaaggcagcctgggtgaagcaggcgccccaggacataaggggagcaagggagcccccggtcctgctggtgctcgtggggagagcggcctggcaggagcccccggacctgctggaccaccaggcccccctgggccccctgggcccccaggaccaggactccccgctggatttgatgacatggaaggctccggggggcccttctggtcaacagcccgaagcgctgatgggccacagggacctcccggcctgccgggacttaagggggatcctggcgtgcctgggctgccgggggcgaagggagaagttggagcagatggaatccccgggttccccggcctccctggcagagagggcattgctgggccccaggggccaaagggagacagaggcagccggggagaaaagggagatccagggaaggacggagtcgggcagccgggcctccctggcccccccggacccccgggacctgtggtctacgtgtcggagcaggacggatccgtcctgagcgtgccgggacctgagggccggccgggtttcgcaggctttcccggacctgcaggacccaagggcaacctgggctctaagggcgaacgaggctccccgggacccaagggtgagaagggtgaaccgggcagcatcttcagccccgacggcggtgccctgggccctgcccagaaaggagccaagggagagccgggcttccgaggacccccgggtccatacggacggccggggtacaagggagagattggctttcctggacggccgggtcgccccgggatgaacggattgaaaggagagaaaggggagccgggagatgccagccttggatttggcatgaggggaatgcccggccccccaggacctccagggcccccaggccctccagggactcctgtttacgacagcaatgtgtttgctgagtccagccgccccgggcctccaggattgccagggaatcagggccctccaggacccaagggcgccaaaggagaagtgggcccccccggaccaccagggcagtttccgtttgactttcttcagttggaggctgaaatgaagggggagaagggagaccgaggtgatgcaggacagaaaggcgaaaggggggagcccgggggcggcggtttcttcggctccagcctgcccggcccccccggccccccaggcccacgtggctaccctgggattccaggtcccaagggagagagcatccggggccagcccggcccacctggacctcagggaccccccggcatcggctacgaggggcgccagggccctcccggccccccaggccccccagggcccccttcatttcctggccctcacaggcagactatcagcgttcccggccctccgggcccccctgggccccctgggccccctggaaccatgggcgcctcctcaggggtgaggctctgggctacacgccaggccatgctgggccaggtgcacgaggttcccgagggctggctcatcttcgtggccgagcaggaggagctctacgtccgcgtgcagaacgggttccggaaggtccagctggaggcccggacaccactcccacgagggacggacaatgaagtggccgccttgcagccccccgtggtgcagctgcacgacagcaacccctacccgcggcgggagcacccccaccccaccgcgcggccctggcgggcagatgacatcctggccagcccccctcgcctgcccgagccccagccctaccccggagccccgcaccacagctcctacgtgcacctgcggccggcgcgacccacaagcccacccgcccacagccaccgcgacttccagccggtgctccacctggttgcgctcaacagccccctgtcaggcggcatgcggggcatccgcggggccgacttccagtgcttccagcaggcgcgggccgtggggctggcgggcaccttccgcgccttcctgtcctcgcgcctgcaggacctgtacagcatcgtgcgccgtgccgaccgcgcagccgtgcccatcgtcaacctcaaggacgagctgctgtttcccagctgggaggctctgttctcaggctctgagggtccgctgaagcccggggcacgcatcttctcctttgacggcaaggacgtcctgaggcaccccacctggccccagaagagcgtgtggcatggctcggaccccaacgggcgcaggctgaccgagagctactgtgagacgtggcggacggaggctccctcggccacgggccaggcctcctcgctgctggggggcaggctcctggggcagagtgccgcgagctgccatcacgcctacatcgtgctctgcattgagaacagcttcatgactgcctccaagtagccaccgcctggatgcggatggccggagaggaccggcggctcggaggaagcccccaccgtgggcagggagcggccggccagcccctggccccaggacctggctgccatactttcctgtatagttcacgtttcatgtaatcctcaagaaataaaaggaagccaaagagtgtatttttttaaaagtttaaaacagaagcctgatgctgacattcacctgccccaactctcccctgacctgtgagcccagctgggtcaggcagggtgcagtatcatgccctgtgcaacctcttggcctgatcagaccacggctcgatttctccaggatttcctgctttgggaagccgtgctcgccccagcaggtgctgacttcatctcccacctagcagcaccgttctgtgcacaaaacccagacctgttagcagacaggccccgtgaggcaatgggagctgaggccacactcagcacaaggccatctgggctcctccagggtgtgtgctcgccctgcggtagatgggagggaggctcaggtccctggggctagggggagccccttctgctcagctctgggccattctccacagcaaccccaggctgaagcaggttcccaagctcagaggcgcactgtgacccccagctccggcctgtcctccaacaccaagcacagcagcctggggctggcctcccaaatgagccatgagatgatacatccaaagcagacagctccaccctggccgagtccaagctgggagattcaagggacccatgagttggggtctggcagcctcccatccagggcccccatctcatgcccctggctgggacgtggctcagccagcacttgtccagctgagcgccaggatggaacacggccacatcaaagaggctgaggctggcacaggacatgcggtagccagcacacagggcagtgagggagggctgtcatctgtgcactgcccatggacaggctggctccagatgcagggcagtcattggctgtctcctaggaaacccatatccttaccctccttgggactgaaggggaaccccggggtgcccacaggccgccctgcgggtgaacaaagcagccacgaggtgcaacaaggtcctctgtcagtcacagccacccctgagatccggcaacatcaacccgagtcattcgttctgtggagggacaagtggactcagggcagcgccaggctgaccacagcacagccaacacgcacctgcctcaggactgcgacgaaaccggtggggctggttctgtaattgtgtgtgatgtgaagccaattcagacaggcaaataaaagtgaccttttacactgaaaaaaaaaaaaaaaaa

SEQ ID NO: 1570 - DNA, 5398 bp, Homo sapiens
cgcggcggaggaggcagcatcccgcggcgctgacggtcctggggagagcatggcgccgaggtgcccctggccatggccgcggcggcggcgcctcctggacgtgctcgcgcccctggtcctgctgctcggggtccgcgcggcctccgcggagccagagcgcatcagcgaggaggtggggctgctgcagctccttggggaccccccgccccagcaggtcacccagacggatgaccccgacgtcgggctggcctacgtctttgggccagatgccaacagtggccaagtggcccggtaccacttccccagcctcttcttccgtgacttctcactgctgttccacatccggccagccacagagggcccaggggtgctgttcgccatcacggactcggcgcaggccatggtcttgctgggcgtgaagctctctggggtgcaggacgggcaccaggacatctccctgctctacacagaacctggtgcaggccagacccacacagccgccagcttccggctccccgccttcgtcggccagtggacacacttagccctcagtgtggcaggtggctttgtggccctctacgtggactgtgaggagttccagagaatgccgcttgctcggtcctcacggggcctggagctggagcctggcgccgggctcttcgtggctcaggcggggggagcggaccctgacaagttccagggggtgatcgctgagctgaaggtgcgcagggacccccaggtgagccccatgcactgcctggacgaggaaggcgatgactcagatggggcattcggagactctggcagcgggctcggggacgcccgggagcttctcagggaggagacgggcgcggccctaaaacccaggctccccgcgccaccccccgtcaccacgccacccttggctggaggcagcagcacggaagattccagaagtgaagaagtcgaggagcagaccacggtggcttcgttaggagctcagacacttcctggctcagattctgtctccacgtgggacgggagtgtccggacccctgggggccgcgtgaaagagggcggcctgaaggggcagaaaggggagccaggtgttccgggcccacctggccgggcaggccccccaggatccccatgcctacctggtcccccgggtctcccgtgcccagtgagtcccctgggtcctgcaggcccagcgttgcaaactgtccccggaccacaaggacccccagggcctccggggagggacggcacccctggaagggacggcgagccgggcgaccccggtgaagacggaaagccgggcgacaccgggccacaaggcttccctgggactccaggggatgtaggtcccaagggagacaagggagaccctggggttggagagagagggcccccaggaccccaagggcctccagggcccccaggaccctccttcagacacgacaagctgaccttcattgacatggagggatctggctttgggggcgatctggaggccctgcggggtcctcgaggcttccctggacctcccggaccccccggtgtcccaggcctgcccggcgagccaggccgctttggggtgaacagctccgacgtcccaggacccgccggccttcctggtgtgcctgggcgcgagggtccccccgggtttcctggcctcccgggacccccaggccctccgggaagagaggggcccccaggaaggactgggcagaaaggcagcctgggtgaagcaggcgccccaggacataaggggagcaagggagcccccggtcctgctggtgctcgtggggagagcggcctggcaggagcccccggacctgctggaccaccaggcccccctgggccccctgggcccccaggaccaggactccccgctggatttgatgacatggaaggctccggggggcccttctggtcaacagcccgaagcgctgatgggccacagggacctcccggcctgccgggacttaagggggatcctggcgtgcctgggctgccgggggcgaagggagaagttggagcagatggaatccccgggttccccggcctccctggcagagagggcattgctgggccccaggggccaaagggagacagaggcagccggggagaaaagggagatccagggaaggacggagtcgggcagccgggcctccctggcccccccggacccccgggacctgtggtctacgtgtcggagcaggacggatccgtcctgagcgtgccgggacctgagggccggccgggtttcgcaggctttcccggacctgcaggacccaagggcaacctgggctctaagggcgaacgaggctccccgggacccaagggtgagaagggtgaaccgggcagcatcttcagccccgacggcggtgccctgggccctgcccagaaaggagccaagggagagccgggcttccgaggacccccgggtccatacggacggccggggtacaagggagagattggctttcctggacggccgggtcgccccgggatgaacggattgaaaggagagaaaggggagccgggagatgccagccttggatttggcatgaggggaatgcccggccccccaggacctccagggcccccaggccctccagggactcctgtttacgacagcaatgtgtttgctgagtccagccgccccgggcctccaggattgccagggaatcagggccctccaggacccaagggcgccaaaggagaagtgggcccccccggaccaccagggcagtttccgtttgactttcttcagttggaggctgaaatgaagggggagaagggagaccgaggtgatgcaggacagaaaggcgaaaggggggagcccgggggcggcggtttcttcggctccagcctgcccggcccccccggccccccaggcccacgtggctaccctgggattccaggtcccaagggagagagcatccggggccagcccggcccacctggacctcagggaccccccggcatcggctacgaggggcgccagggccctcccggccccccaggccccccagggcccccttcatttcctggccctcacaggcagactatcagcgttcccggccctccgggcccccctgggccccctgggccccctggaaccatgggcgcctcctcaggggtgaggctctgggctacacgccaggccatgctgggccaggtgcacgaggttcccgagggctggctcatcttcgtggccgagcaggaggagctctacgtccgcgtgcagaacgggttccggaaggtccagctggaggcccggacaccactcccacgagggacggacaatgaagtggccgccttgcagccccccgtggtgcagctgcacgacagcaacccctacccgcggcgggagcacccccaccccaccgcgcggccctggcgggcagatgacatcctggccagcccccctcgcctgcccgagccccagccctaccccggagccccgcaccacagctcctacgtgcacctgcggccggcgcgacccacaagcccacccgcccacagccaccgcgacttccagccggtgctccacctggttgcgctcaacagccccctgtcaggcggcatgcggggcatccgcggggccgacttccagtgcttccagcaggcgcgggccgtggggctggcgggcaccttccgcgccttcctgtcctcgcgcctgcaggacctgtacagcatcgtgcgccgtgccgaccgcgcagccgtgcccatcgtcaacctcaaggacgagctgctgtttcccagctgggaggctctgttctcaggctctgagggtccgctgaagcccggggcacgcatcttctcctttgacggcaaggacgtcctgaggcaccccacctggccccagaagagcgtgtggcatggctcggaccccaacgggcgcaggctgaccgagagctactgtgagacgtggcggacggaggctccctcggccacgggccaggcctcctcgctgctggggggcaggctcctggggcagagtgccgcgagctgccatcacgcctacatcgtgctctgcattgagaacagcttcatgactgcctccaagtagccaccgcctggatgcggatggccggagaggaccggcggctcggaggaagcccccaccgtgggcagggagcggccggccagcccctggccccaggacctggctgccatactttcctgtatagttcacgtttcatgtaatcctcaagaaataaaaggaagccaaagagtgtatttttttaaaagtttaaaacagaagcctgatgctgacattcacctgccccaactctcccctgacctgtgagcccagctgggtcaggcagggtgcagtatcatgccctgtgcaacctcttggcctgatcagaccacggctcgatttctccaggatttcctgctttgggaagccgtgctcgccccagcaggtgctgacttcatctcccacctagcagcaccgttctgtgcacaaaacccagacctgttagcagacaggccccgtgaggcaatgggagctgaggccacactcagcacaaggccatctgggctcctccagggtgtgtgctcgccctgcggtagatgggagggaggctcaggtccctggggctagggggagccccttctgctcagctctgggccattctccacagcaaccccaggctgaagcaggttcccaagctcagaggcgcactgtgacccccagctccggcctgtcctccaacaccaagcacagcagcctggggctggcctcccaaatgagccatgagatgatacatccaaagcagacagctccaccctggccgagtccaagctgggagattcaagggacccatgagttggggtctggcagcctcccatccagggcccccatctcatgcccctggctgggacgtggctcagccagcacttgtccagctgagcgccaggatggaacacggccacatcaaagaggctgaggctggcacaggacatgcggtagccagcacacagggcagtgagggagggctgtcatctgtgcactgcccatggacaggctggctccagatgcagggcagtcattggctgtctcctaggaaacccatatccttaccctccttgggactgaaggggaaccccggggtgcccacaggccgccctgcgggtgaacaaagcagccacgaggtgcaacaaggtcctctgtcagtcacagccacccctgagatccggcaacatcaacccgagtcattcgttctgtggagggacaagtggactcagggcagcgccaggctgaccacagcacagccaacacgcacctgcctcaggactgcgacgaaaccggtggggctggttctgtaattgtgtgtgatgtgaagccaattcagacaggcaaataaaagtgaccttttacactgaaaaaaaaaaaaaaaaa

SEQ ID NO: 1571 - DNA, 2598 bp, Homo sapiens
gccgggccgaggccgcggcggaggccgcggctggtactgggagggtggcagggagggacggggaaggaagatggcgacgtcgggggcgaacgggcctggttcggccacggcctcggcttccaatccgcgcaaatttagtgagaagattgcgctgcagaagcagcgtcaggccgaggagacggcggccttcgaggaggtgatgatggacatcggctccacccggttacaggcccaaaaactgcgactggcatacacaaggagctctcattatggtgggtctctgcccaatgttaaccagattggctctggcctggccgagttccagagccccctccactcacctttggattcatctcggagcactcggcaccatgggctggtggaacgggtgcagcgagatcctcgaagaatggtgtccccacttcgccgatacacccgccacattgacagctctccctatagtcctgcctacttatctcctcccccagagtctagctggcgaaggacgatggcctggggcaatttccctgcagagaaggggcagttgtttcgactaccatctgcacttaacaggacaagctctgactctgcccttcatacaagtgtgatgaaccccagtccccaggatacctacccaggccccacacctcccagcatcctgcccagccgacgtgggggtattctggatggtgaaatggaccccaaagtacctgctattgaggagaacttgctagatgacaagcatttgctgaagccatgggatgctaagaagctatcctcatcctcttcccgacctcggtcctgtgaagtccctggaattaacatctttccatctcctgaccagcctgccaatgtgcctgtcctcccacctgccatgaacacggggggctccctacctgacctcaccaacctgcactttcccccaccactgcccacccccctggaccctgaagagacagcctaccctagcctgagtgggggcaacagtacctccaatttgacccacaccatgactcacctgggcatcagcaggggcatgggcctgggcccaggctatgatgcaccaggacttcattcacctctcagccacccatccctgcagtcctccctaagcaatcccaacctccaggcttccctgagcagtcctcagccccagcttcagggctcccacagccacccctctctgcctgcctcctccttggcccgccatgtactgcccaccacctccctgggccacccctcactcagtgctccggctctttcctcctcctcttcctcctcctccacttcatctcctgttttgggcgccccctcttaccctgcttctacccctggggcctccccccaccaccgccgtgtgcccctcagccccctgagtttgctcgcgggcccagccgacgccagaaggtcccaacagcagctgcccaaacagttttcgccaacaatgtcacccaccttgtcttccatcactcagggcgtccccctggataccagtaaactgtccactgaccagcggttacccccatacccatacagctccccaagtctggttctgcctacccagccccacaccccaaagtctctacagcagccagggctgccctctcagtcttgttcagtgcagtcctcaggtgggcagcccccaggcaggcagtctcattatgggacaccgtacccacctgggcccagtgggcatgggcaacagtcttaccaccggccaatgagtgacttcaacctggggaatctggagcagttcagcatggagagcccatcagccagcctggtgctggatccccctggcttttctgaagggcctggatttttagggggtgaggggccaatgggtggcccccaggatccccacaccttcaaccaccagaacttgacccactgttcccgccatggctcagggcctaacatcatcctcacaggggactcctctccaggtttctctaaggagattgcagcagccctggccggagtgcctggctttgaggtgtcagcagctggattggagctagggcttgggctagaagatgagctgcgcatggagccactgggcctggaagggctaaacatgctgagtgacccctgtgccctgctgcctgatcctgctgtggaggagtcattccgcagtgaccggctccaatgagggcacctcatcaccatccctcttcttggccccatcccccaccaccattcctttcctcccttccccctggcaggtagagactctactctctgtccccagatcctctttctagcatgaatgaaggatgccaagaatgagaaaaagcaaggggtttgtccaggtggcccctgaattctgcgcaagggatgggcctgggggaactcaagggagggcctaaagcacttgtaactttgaaccgtctgtctggaggtcagagcctgttggaaagcaggggtagaggggagccctggaagcagggcttttccggatgcctaggggtgggcagtgccagcccctcctcaccactcttccccttgcagtggaggagagagccagagtggatactattttttattaaatatattattatatgttaataaaaaaatcatatcaaaaaaaaaaaaaaa

SEQ ID NO: 1572 - DNA, 2682 bp, Homo sapiens
tctcctgtacctgggcatccagaaaaatggtggtgatggcgcgactctcgcggcccgagcggccggaccttgtcttcgaggaagaggacctcccctatgaggaggaaatcatgcggaaccaattctctgtcaaatgctggcttcgctacatcgagttcaaacagggcgccccgaagcccaggctcaatcagctatacgagcgggcactcaagctgctgccctgcagctacaaactctggtaccgatacctgaaggcgcgtcgggcacaggtgaagcatcgctgtgtgaccgaccctgcctatgaagatgtcaacaactgtcatgagagggcctttgtgttcatgcacaagatgcctcgtctgtggctagattactgccagttcctcatggaccaggggcgcgtcacacacacccgccgcaccttcgaccgtgccctccgggcactgcccatcacgcagcactctcgaatttggcccctgtatctgcgcttcctgcgctcacacccactgcctgagacagctgtgcgaggctatcggcgcttcctcaagctgagtcctgagagtgcagaggagtacattgagtacctcaagtcaagtgaccggctggatgaggccgcccagcgcctggccaccgtggtgaacgacgagcgtttcgtgtctaaggccggcaagtccaactaccagctgtggcacgagctgtgcgacctcatctcccagaatccggacaaggtacagtccctcaatgtggacgccatcatccgcgggggcctcacccgcttcaccgaccagctgggcaagctctggtgttctctcgccgactactacatccgcagcggccatttcgagaaggctcgggacgtgtacgaggaggccatccggacagtgatgaccgtgcgggacttcacacaggtgtttgacagctacgcccagttcgaggagagcatgatcgctgcaaagatggagaccgcctcggagctggggcgcgaggaggaggatgatgtggacctggagctgcgcctggcccgcttcgagcagctcatcagccggcggcccctgctcctcaacagcgtcttgctgcgccaaaacccacaccacgtgcacgagtggcacaagcgtgtcgccctgcaccagggccgcccccgggagatcatcaacacctacacagaggctgtgcagacggtggaccccttcaaggccacaggcaagccccacactctgtgggtggcgtttgccaagttttatgaggacaacggacagctggacgatgcccgtgtcatcctggagaaggccaccaaggtgaacttcaagcaggtggatgacctggcaagcgtgtggtgtcagtgcggagagctggagctccgacacgagaactacgatgaggccttgcggctgctgcgaaaggccacggcgctgcctgcccgccgggccgagtactttgatggttcagagcccgtgcagaaccgcgtgtacaagtcactgaaggtctggtccatgctcgccgacctggaggagagcctcggcaccttccagtccaccaaggccgtgtacgaccgcatcctggacctgcgtatcgcaacaccccagatcgtcatcaactatgccatgttcctggaggagcacaagtacttcgaggagagcttcaaggcgtacgagcgcggcatctcgctgttcaagtggcccaacgtgtccgacatctggagcacctacctgaccaaattcattgcccgctatgggggccgcaagctggagcgggcacgggacctgtttgaacaggctctggacggctgccccccaaaatatgccaagaccttgtacctgctgtacgcacagctggaggaggagtggggcctggcccggcatgccatggccgtgtacgagcgtgccaccagggccgtggagcccgcccagcagtatgacatgttcaacatctacatcaagcgggcggccgagatctatggggtcacccacacccgcggcatctaccagaaggccattgaggtgctgtcggacgagcacgcgcgtgagatgtgcctgcggtttgcagacatggagtgcaagctcggggagattgaccgcgcccgggccatctacagcttctgctcccagatctgtgacccccggacgaccggcgcgttctggcagacgtggaaggactttgaggtccggcatggcaatgaggacaccatcaaggaaatgctgcgtatccggcgcagcgtgcaggccacgtacaacacgcaggtcaacttcatggcctcgcagatgctcaaggtctcgggcagtgccacgggcaccgtgtctgacctggcccctgggcagagtggcatggacgacatgaagctgctggaacagcgggcagagcagctggcggctgaggcggagcgtgaccagcccttgcgcgcccagagcaagatcctgttcgtgaggagtgacgcctcccgggaggagctggcagagctggcacagcaggtcaaccccgaggagatccagctgggcgaggacgaggacgaggacgagatggacctggagcccaacgaggttcggctggagcagcagagcgtgccagccgcagtgtttgggagcctgaaggaagactgacccgtccctcccccatcccccctccccaccccctccccaatacagctacgtttgtacatcaaaaaaaaaaaaaaaaaaaaaaaaaaaa

SEQ ID NO: 1573 - DNA, 6110 bp, Homo sapiens
cacacacaccgcacaagtgcttaatacgtgtgtcttttgtcttaagcactctcttcagttcctttaaatgagccgaggtcatggtggttcggagatgacagaaggcaggcactgccaggtgcacctcctggatgataggagactggagctgctggttcagcccaaacttctagcaagagagttgctggacctagtggcttcacatttcaacctgaaagaaaaggagtattttggaataacattcatagatgacacaggtcagcagaactggctgcagttagatcaccgagttcttgaccacgatttgcccaagaaaccaggcccaaccattttgcactttgctgtgaggttttacattgagagcatatcgtttttaaaggataaaaccaccgtggagctgtttttcctgaatgcaaaggcctgtgtgcacaaggggcaaatcgaagtagagagcgaaaccatcttcaagttagcagcgtttattttacaggaagccaagggagattataccagtgatgaaaatgccaggaaagatttaaagacattaccagcctttccaaccaaaactcttcaggagcatccatcccttgcctactgtgaggacagggtaattgagcattatttgaaaatcaaaggtctcactcgaggtcaagctgtggttcagtatatgaaaatagtagaagctctaccgacttacggtgtccattattatgcagtaaaggataagcaaggacttccttggtggcttggaataagctataagggaattggccaatatgatatacaagacaaggtgaagcctcggaagttattccaatggaaacagctggagaacttatatttccgtgagaaaaaatttgctgttgaagttcatgatccacgaaggatttcagtttcaagaagaacctttgggcaaagtggcttgtttgtgcaaacatggtatgctaactcttctctcatcaagtccatttgggtaatggcaattagtcagcatcagttttacttggaccggaagcaaagcaaagcaaaaattccttcagccaggagtttagatgagattgcaatggatttgacagagacaggaacacaaagggcctccaagctggtgacactggagacgaaaagtcagttcatcatggcaagtaatggcagtttaatctcctcaggttctcaagactcagaagttagtgaagagcaaaagagagaaaaaatccttgaactaaagaagaaggagaaactattacaagaaaaacttctgaaaaaagttgaggagcttaagaagatctgtctgcgggaggctgagctcacaggcaaaatgccaaaggagtatcccctgaacataggcgagaagcctcctcaggtcagaagacgtgtgggtactgcgttcaaattagatgacaacttgctgccgagtgaagaagatcctgctttgcaagaactggagagtaattttctaatacaacaaaagctggtggaagctgcaaagaaacttgccaatgagccagacctttgtaaaactgtgaagaaaaagcgaaagcaagattacacagatgcgatgaaaaagcttcaggagattgaaaatgcaataaacgaataccgaattaggtgtggaaagaaacccagccagaaagcaacagtgttaccagaagacataatcccctcagagagtagctctttgtctgacaccaccacctatgatgatcccagtgatgccttcacttttcctgggcagcgatcaagttcagtacctcattctccaagaattcttccccccaagtctcttggtattgagcgaatccatttcagaaagtcgtccatcaatgaacagtttgtggataccaggcagtccagagaaatgctgtccacacacagcagcccttacaaaactctggagaggcggccccagggaggacgaagcatgcccaccacgccagttcttacccgaaacgcctacagcagcagccacttggaacccgaatcttcatctcagcactgccgccagcggagtggaagcctggagtcccagtcccacctgctctccgagatggacagcgataagccatttttctccctctccaaatcccaaagaagcagcagcacagaaatcctcgatgacgggtcttcttatacaagccaatcaagcacagagtattactgtgtgacaccagttaccggcccctattacaccacccagaccctggacactcgcaccaggggtcggaggaggtcaaagaaacagaatgtttctacttcaaattcaggaagcatgcccaacctagcacaaaaggatagtttgaggaatggtgtttactcaaagagtcaggagccaccgtcttccagttactacattgccgggtacacaccctatgcagagtgtgacttttattacagtggtggttatgtctatgagaatgacaccgagggacagtatagtgtcaacccttcctaccggtcctcagcccactatggatatgagcgccagagggactacagcagatcctttcacgaagatgaggtcgaccgggtaccccataacccatatgcaactctccggctgccaaggaaggctgctgcaaaatcggagcacatcaccaaaaacatccacaaggccttagttgccgagcacttgcgtggctggtaccagcgggcctctgggcagaaggatcagggacacagcccgcagaccagctttgactcagacaggggatcacagagatgcctggggtttgcggggctgcaagtaccttgttctccaagcagtcgtgcatcctcgtactcttcagtgtcttctacaaatgcttctgggaactggaggacccagttaaccatagggctgtcggattacgagactccagcacattcttcttacaccagctgctatggcaatgtctataatcctttaccctctccaagcagacaatacacagaaatcagtcaactggatggtacagatggaaaccagctggaagacaacctggagagtagtgagcagagactcttttggcatgaagattcaaagcctggaacattagtctgaactgcagttggacctcctgaccaagcactgcgttctcacactagtgtgccttgcaaattgtatttgtcttccgagaggatgttcgttttagaaacctaaagacatcaaaggttgaagagaagacttagttgccctggaagtgaatcagtgaatcacacaccaagccccacaaagcccctaaaggaggatttggcctttcaaactctaggcactaacgtaactgtagggtctgcccacatgttgaagtattgccaagagaggactcagtgtgaagccttcatcaatagcaagcactttttaagggagtaaaagttgttaaaggcaaacctcaaaaacatgaaagggcattcaggatgtcccatggcaataagaacaggggaaatctcagagcacaattcagcaggatgagagaaggggaaccagaagctccggagtcattgctcacttcagagtttgaattcgtgagctgacaaagagtaacatgctctttctacacagacatggacaatttagacagtattggaaaattacttgaagctggattttcatgaagttctgaatgagtgtaaatgttttttaggatactataaagagtgatgtttttcataagcaccataaaatgggttctggaaaaactgattaccttagcatcctgtaatataacttatggtagcagattggggaaaatgaagcagcccactgaataattgacaaagtctgcttggagaacattctaaggtacaatatcatggagctcctttttcctttctccactaattgcgtgatgagctattgttctggctgttaattctccaactcggctgtcatttgaagtggcagacttaatatggaaagtttttataattatgagtttgaaaaagcattttaagatgatacagaaagtatccaaaacaacagaaaaaaaaagccacgtcattttagatgaattgcgtgccttaaaatggtgaacgttagaaaattaaacaagtctggattccacaagtagttccaagtcaccaagtgacaaaaacaaggttaacattaaaaaagaaaaacaacaacaacgacaaaaagctccaagctgcagtggatttaattatgaggctaaaactacctcatactttccttggaagaactaattagctatggtttattgtagggttttgtttgtttgttttttaaagcaaatgatttccatattccagattgatcttttttgtcatctttgcttcaaaattacataaaaggtgctcctttcccccttcttttatacaagtttcttgttcatattgtgaatagaaaagtttctgaacaacttttttggaacattttctatctatattccaaagcatgtaatatatacataaaaacgatttgttaaactggtccttagtcatttgtataattagaaatgaagtttgggaaaaaattttggaaaaaagacaagcaaaaaaaaataacttattccttttttgcatatttgtatagccttctagaatcagaaataacctttttgcatattcttttattgttctgacttttcaagacctattatttttttacataggtcaataaacaaaaggtgtgctactgaaaatgtttacgttttcttccatttatgtcaggggttcatgtgaagcaggtcgcagtgctctacttcaagtaatcatattgggcaaggcttcggatttttatttatagtattaccgtattttattaattccgggatgtacatttttaaatatttacattaaaaacatggttcatctttttattgatggcatattctacttgaattggcagttttttcttaatagtacattaaaaataatgctgtgtcttacaataaagttgccttagaattgatgaaatgcggtagtttgtctcactgaggatgactggtgagaacttttaggttttttaatcttgggaatgttgtttatttgtagcaagtaatttatactaatttcacagactggcaaacaggtcttctaaattcaagaaattagttctctgacatcctttaatcctacataatgtggagaagggagtggaaatgaaatatatttccatacatgtatcttgcataaaataacatttttctgttcctgaaatagtatggttacacttgcaagcatgccttgaaagggcaaatataacttggctcccacagaggaaaagaaggtatagaaatggaagctcagggccaggcatagcggctcacacctgtaatcccagcactttgggaggccgaagtgggaggattgcttgagctcaggagttcaagaccagcctggacaacatggtgaaaccccatctctatgaaaatacaaaaattagccagtcatggtgatgtgtgcctgtaatctcagctacttgggaggctgagttgggaggatatcttgagcccaggaggcggaggttgcagtgagccaggatcgtgccactgcattccagcctaggcaataacagaccttgtctcaagaaaaaaaaaaaaaaaaaaaaaagaaagaaatggaagttcagcaatcctactgcacggttttcttcgtctcttttgaaaaacatttctcaaccgcattggtattaaaccaattaaactacgttatttattaaaagccaaaagtgacaaaagtacattattcaacatgtacgtttcctcttttttattacaaaataccatggttaaatgcaaaaccaaaatagtacataacaaaaacataatcgtgcccattagccgaacactctcagatataatagttaatttattgtatatttgtttggatttttttctatgcatatagtaatttttttaaagtccagcatattacaagtacagttttacaacatttttttttgtttgttttgttttctgcctaatatatcttgggcctctgtatcaagacatactgatctacctcataaagatatatgtttaacaaggtggatttttaaaattgcctcaccctactagatgtttatctatttttctatatttgacaaaaattttcaaaattcttccttgtactcacaaaagcttaaatattacaagaaataaagattccggaattgt

SEQ ID NO: 1574 - DNA, 2176 bp, Homo sapiens
aggactgactcttaccagctggggagcaaacaggccagctggagaccgagatgacagaaggcaggcactgccaggtgcacctcctggatgataggagactggagctgctggttcagcccaaacttctagcaagagagttgctggacctagtggcttcacatttcaacctgaaagaaaaggagtattttggaataacattcatagatgacacaggtcagcagaactggctgcagttagatcaccgagttcttgaccacgatttgcccaagaaaccaggcccaaccattttgcactttgctgtgaggttttacattgagagcatatcgtttttaaaggataaaaccaccgtggagctgtttttcctgaatgcaaaggcctgtgtgcacaaggggcaaatcgaagtagagagcgaaaccatcttcaagttagcagcgtttattttacaggaagccaagggagattataccagtgatgaaaatgccaggaaagatttaaagacattaccagcctttccaaccaaaactcttcaggagcatccatcccttgcctactgtgaggacagggtaattgagcattatttgaaaatcaaaggtctcactcgaggtcaagctgtggttcagtatatgaaaatagtagaagctctaccgacttacggtgtccattattatgcagtaaaggataagcaaggacttccttggtggcttggaataagctataagggaattggccaatatgatatacaagacaaggtgaagcctcggaagttattccaatggaaacagctggagaacttatatttccgtgagaaaaaatttgctgttgaagttcatgatccacgaaggtgaggatcaaagacgtttctctgtatgacacagttactatacaaataacgctgctatcaacatttgtgtacaagtttttatatgaacatatgttttcatttctcttgggtgtatacctaggaatggaattgctgggtcaaatggtaactatctttaaccctctgaggaatggcaaggctgcttttcaaagtgctgcaccattttacatcccaagcagcagtatatgtggttccaatgccgacacatcctcaccgacacttgttatttttagttttgtgtgcatgtatagtttatgccatcctagtgggttgaagtggtaccttcttgtggttttgatttgcacttccctcatgactaatgatggctgagcatcttttcatgtgctgcttagctattcctatatctttagtagagaaatgtctattcagatcttttgctcatttaaaatgttggtgttcttggtcatttaaaaaaaaaaaaaaaagccaaattaccaacatgaactgaagtcaggatgtgggttctcaaatatcttaggagaaatcccgcccccctccgcccgcccccaactgccagacagagtcttactctgtcacccagactgcagtgcagtggcgcaatctttgctcactgcaacctacacctcccaggttcaggtgatgctcatgcctcaacctcccaagtagctgggagtacaggcatgcaccaccacgccaagctaattttgtatttttagtagagacgggctttcaccatgttggccaggctggtctcaaactcctgacctcaggtgatccgcccgtctccgcctcccaaagtgctgagccatggcacccggccttaagagaaattcttaatcagtccttagtgggtacttttcagtcccgagatggttatggatgtttagaggccagagggatgggaggaaatacctgtgataaaaaggtgacctgaagagataagccaaattcctacaaagaactacttgcacagacaccaaagccaaaaatatctggcctttaagaaaaagtttgctgccgggcacggtggctcatgcctataatgccagcactttgggaggccgaggcgggcggatcatgaggtcaggagatcgagaccatcctggctaacacggtgaaaccccatctctactaaaaatacaaaaaattagttgggcatggtggcgggcgcttgtagtcccagctactcgggaggctgaagcaggagaatggcgtgaaccccagaggcagagcttgcagtgagcccagatcgcgccactgcactccagcctgggcgacagagcgagactccatctccgtctcaaaaaaaaaaaa

SEQ ID NO: 1575 - DNA, 5484 bp, Homo sapiens
tgtgaaattgagttacacctaagtgtcttatgaaactcagttcagaactcaccggagctgccgtctgggaggggggagggcggaagaaccctgaggtttttcctcacatttctgtcccatttttggaacctctggatttaaagaaatgaaaacctcaagtttgtggagattttaagaaatggttattccaatggaaacagctggagaacttatatttccgtgagaaaaaatttgctgttgaagttcatgatccacgaaggatttcagtttcaagaagaacctttgggcaaagtggcttgtttgtgcaaacatggtatgctaactcttctctcatcaagtccatttgggtaatggcaattagtcagcatcagttttacttggaccggaagcaaagcaaagcaaaaattccttcagccaggagtttagatgagattgcaatggatttgacagagacaggaacacaaagggcctccaagctggtgacactggagacgaaaagtcagttcatcatggcaagtaatggcagtttaatctcctcaggttctcaagactcagaagttagtgaagagcaaaagagagaaaaaatccttgaactaaagaagaaggagaaactattacaagaaaaacttctgaaaaaagttgaggagcttaagaagatctgtctgcgggaggctgagctcacaggcaaaatgccaaaggagtatcccctgaacataggcgagaagcctcctcaggtcagaagacgtgtgggtactgcgttcaaattagatgacaacttgctgccgagtgaagaagatcctgctttgcaagaactggagagtaattttctaatacaacaaaagctggtggaagctgcaaagaaacttgccaatgagccagacctttgtaaaactgtgaagaaaaagcgaaagcaagattacacagatgcgatgaaaaagcttcaggagattgaaaatgcaataaacgaataccgaattaggtgtggaaagaaacccagccagaaagcaacagtgttaccagaagacataatcccctcagagagtagctctttgtctgacaccaccacctatgatgatcccagtgatgccttcacttttcctgggcagcgatcaagttcagtacctcattctccaagaattcttccccccaagtctcttggtattgagcgaatccatttcagaaagtcgtccatcaatgaacagtttgtggataccaggcagtccagagaaatgctgtccacacacagcagcccttacaaaactctggagaggcggccccagggaggacgaagcatgcccaccacgccagttcttacccgaaacgcctacagcagcagccacttggaacccgaatcttcatctcagcactgccgccagcggagtggaagcctggagtcccagtcccacctgctctccgagatggacagcgataagccatttttctccctctccaaatcccaaagaagcagcagcacagaaatcctcgatgacgggtcttcttatacaagccaatcaagcacagagtattactgtgtgacaccagttaccggcccctattacaccacccagaccctggacactcgcaccaggggtcggaggaggtcaaagaaacagaatgtttctacttcaaattcaggaagcatgcccaacctagcacaaaaggatagtttgaggaatggtgtttactcaaagagtcaggagccaccgtcttccagttactacattgccgggtacacaccctatgcagagtgtgacttttattacagtggtggttatgtctatgagaatgacaccgagggacagtatagtgtcaacccttcctaccggtcctcagcccactatggatatgagcgccagagggactacagcagatcctttcacgaagatgaggtcgaccgggtaccccataacccatatgcaactctccggctgccaaggaaggctgctgcaaaatcggagcacatcaccaaaaacatccacaaggccttagttgccgagcacttgcgtggctggtaccagcgggcctctgggcagaaggatcagggacacagcccgcagaccagctttgactcagacaggggatcacagagatgcctggggtttgcggggctgcaagtaccttgttctccaagcagtcgtgcatcctcgtactcttcagtgtcttctacaaatgcttctgggaactggaggacccagttaaccatagggctgtcggattacgagactccagcacattcttcttacaccagctgctatggcaatgtctataatcctttaccctctccaagcagacaatacacagaaatcagtcaactggatggtacagatggaaaccagctggaagacaacctggagagtagtgagcagagactcttttggcatgaagattcaaagcctggaacattagtctgaactgcagttggacctcctgaccaagcactgcgttctcacactagtgtgccttgcaaattgtatttgtcttccgagaggatgttcgttttagaaacctaaagacatcaaaggttgaagagaagacttagttgccctggaagtgaatcagtgaatcacacaccaagccccacaaagcccctaaaggaggatttggcctttcaaactctaggcactaacgtaactgtagggtctgcccacatgttgaagtattgccaagagaggactcagtgtgaagccttcatcaatagcaagcactttttaagggagtaaaagttgttaaaggcaaacctcaaaaacatgaaagggcattcaggatgtcccatggcaataagaacaggggaaatctcagagcacaattcagcaggatgagagaaggggaaccagaagctccggagtcattgctcacttcagagtttgaattcgtgagctgacaaagagtaacatgctctttctacacagacatggacaatttagacagtattggaaaattacttgaagctggattttcatgaagttctgaatgagtgtaaatgttttttaggatactataaagagtgatgtttttcataagcaccataaaatgggttctggaaaaactgattaccttagcatcctgtaatataacttatggtagcagattggggaaaatgaagcagcccactgaataattgacaaagtctgcttggagaacattctaaggtacaatatcatggagctcctttttcctttctccactaattgcgtgatgagctattgttctggctgttaattctccaactcggctgtcatttgaagtggcagacttaatatggaaagtttttataattatgagtttgaaaaagcattttaagatgatacagaaagtatccaaaacaacagaaaaaaaaagccacgtcattttagatgaattgcgtgccttaaaatggtgaacgttagaaaattaaacaagtctggattccacaagtagttccaagtcaccaagtgacaaaaacaaggttaacattaaaaaagaaaaacaacaacaacgacaaaaagctccaagctgcagtggatttaattatgaggctaaaactacctcatactttccttggaagaactaattagctatggtttattgtagggttttgtttgtttgttttttaaagcaaatgatttccatattccagattgatcttttttgtcatctttgcttcaaaattacataaaaggtgctcctttcccccttcttttatacaagtttcttgttcatattgtgaatagaaaagtttctgaacaacttttttggaacattttctatctatattccaaagcatgtaatatatacataaaaacgatttgttaaactggtccttagtcatttgtataattagaaatgaagtttgggaaaaaattttggaaaaaagacaagcaaaaaaaaataacttattccttttttgcatatttgtatagccttctagaatcagaaataacctttttgcatattcttttattgttctgacttttcaagacctattatttttttacataggtcaataaacaaaaggtgtgctactgaaaatgtttacgttttcttccatttatgtcaggggttcatgtgaagcaggtcgcagtgctctacttcaagtaatcatattgggcaaggcttcggatttttatttatagtattaccgtattttattaattccgggatgtacatttttaaatatttacattaaaaacatggttcatctttttattgatggcatattctacttgaattggcagttttttcttaatagtacattaaaaataatgctgtgtcttacaataaagttgccttagaattgatgaaatgcggtagtttgtctcactgaggatgactggtgagaacttttaggttttttaatcttgggaatgttgtttatttgtagcaagtaatttatactaatttcacagactggcaaacaggtcttctaaattcaagaaattagttctctgacatcctttaatcctacataatgtggagaagggagtggaaatgaaatatatttccatacatgtatcttgcataaaataacatttttctgttcctgaaatagtatggttacacttgcaagcatgccttgaaagggcaaatataacttggctcccacagaggaaaagaaggtatagaaatggaagctcagggccaggcatagcggctcacacctgtaatcccagcactttgggaggccgaagtgggaggattgcttgagctcaggagttcaagaccagcctggacaacatggtgaaaccccatctctatgaaaatacaaaaattagccagtcatggtgatgtgtgcctgtaatctcagctacttgggaggctgagttgggaggatatcttgagcccaggaggcggaggttgcagtgagccaggatcgtgccactgcattccagcctaggcaataacagaccttgtctcaagaaaaaaaaaaaaaaaaaaaaaagaaagaaatggaagttcagcaatcctactgcacggttttcttcgtctcttttgaaaaacatttctcaaccgcattggtattaaaccaattaaactacgttatttattaaaagccaaaagtgacaaaagtacattattcaacatgtacgtttcctcttttttattacaaaataccatggttaaatgcaaaaccaaaatagtacataacaaaaacataatcgtgcccattagccgaacactctcagatataatagttaatttattgtatatttgtttggatttttttctatgcatatagtaatttttttaaagtccagcatattacaagtacagttttacaacatttttttttgtttgttttgttttctgcctaatatatcttgggcctctgtatcaagacatactgatctacctcataaagatatatgtttaacaaggtggatttttaaaattgcctcaccctactagatgtttatctatttttctatatttgacaaaaattttcaaaattcttccttgtactcacaaaagcttaaatattacaagaaataaagattccggaattgt

SEQ ID NO: 1576 - DNA, 3411 bp, Homo sapiens
ccgcgagaggtgctctacaagctttacaaggacccagcgggaccgtcgcgcgtgcttctgccggtgtgggaggcagagggcctggggctgcgtgtgggcgccgcaggcccagcccccggtaccggctccgggcccctccgcgccgcccgcgacagcattgagctccggcgcggcgcctgcgtgcgcaccacgggcgaggagctgtgcaatggccacgggctctgggtgaagctgacaaaggagcagctggcagagcacctgggcgactgcgggctgcaggaaggctggctgctggtgtgccgcccggcggagggcggagcccgcctggtacccatcgacactcccaaccacctccagcggcagcagcagctctttggcgtggattatcggccggtgctcaggtgggaacaggtggtggacctgacatactcacatcgcctgggatcgagacctcagccggcagaggcatacgcagaagctgtacaaaggctactctatgtacccccgacatggacctacgagtgcgacgaggacctgatccacttcttgtatgaccacctgggcaaggaggatgagaacctgggtagcgtgaagcagtatgtggagagcatagacgtttcctcctacacggaggagttcaacgtgtcctgcctgacagacagcaatgccgatacctactgggagagcgatgggtcccagtgccaacactgggtacggcttactatgaagaagggcaccattgtcaagaagctgctactcacagtggataccacagatgacaactttatgccaaagcgggtggtggtctatgggggtgaaggggacaacctgaagaagctgagtgacgtgagcattgacgagaccctcatcggggatgtctgtgtcctggaggacatgaccgtccacctcccgatcatcgagatccgcatcgtggagtgccgagatgatgggattgatgttcgtctccgaggggtcaagatcaagtcatctagacagcgggaactagggttgaatgcagacctgttccagccaactagtctggtgcgatatccacgcctagaaggcaccgaccctgaagtactgtaccgcagagctgtcctcctgcagagattcatcaagatcctcgatagtgtcctgcaccacctggtacctgcctgggaccacacactgggcaccttcagtgagattaagcaagtgaagcagttcctactgctgtcccgccagcggccaggcctggtggctcagtgcctgcgtgactctgagagcagcaagcccagcttcatgccacgcctatacatcaaccgccgtcttgccatggaacaccgtgcctgcccctctcgagaccctgcctgcaagaatgcagtcttcacccaggtatatgaaggcctcaagccctctgacaaatatgaaaagcccctggactacaggtggcccatgcgctatgaccagtggtgggagtgtaaatttattgcagaaggcatcattgaccaagggggtggtttccgggacagcctggcagatatgtcagaagagctgtgccctagctcagcggatacccccgtgcccctgcccttctttgtacgcacagccaaccagggcaatggcactggtgaggctcgggacatgtatgtacccaacccctcctgccgagactttgccaagtatgaatggatcggacagctgatgggggctgcccttcggggtaaggagttcctggtcctggccctgcctggttttgtgtggaagcagctttctggtgaggaggtgagctggagcaaggacttcccagctgtggactctgtgctggtgaagctcctggaagtgatggaaggaatggacaaggagacgtttgagttcaagtttgggaaggaactaacattcaccactgtactgagtgaccaacaggtggtggagctgatccctgggggtgcaggcatcgtcgtgggatatggggaccgttctcgtttcatccaactggtccagaaggcacggctagaggagagcaaggagcaggtggcagctatgcaggcaggtctgctgaaggtggtaccacaggctgtgctggacttgctgacctggcaagagttggagaagaaagtgtgtggggatccagaggtcactgtggatgctctgcgcaagctcacccggtttgaggacttcgagccatctgactcgcgggtgcagtatttctgggaggcactgaacaacttcaccaacgaggaccggagccgcttcctgcgctttgtcacgggccgcagtcgcctgccagcacggatctacatctacccagacaagctgggctacgagaccacagacgcgctgcccgagtcttccacttgctccagcaccctcttcctgccacactatgccagtgccaaggtatgcgaggagaagctccgctatgcggcctacaactgcgtggccatcgacactgacatgagcccttgggaggagtgaggcgtgccgccggctgtgggaccagcaagactgcacgtgtccctcttggccttgcccagggcgaagacaccttccctgccctggtttggctgacgtgctcagcaaaaccccatgtgccctgctcctgtgtgcagttggggtaggggcagctggcatggtcaggtaacactagtggcccagccccgcagacccacaagccctacccgtgctggggcttgcttcccgaggtatttcacctcttaagagggaatcttccacaagcccagcacaagctgccaggcctgagctacttgaagggggccatctaggtccccaacccatggactttgcctccattttcagctccgccttttttctcctattttctctctggctttcttcagccatgactcacaactaaaaacataaaacactggaggttagtggaggcccctccccaagcagggagcctgggatgggcagggagtgatagccaaactccttggtcacctgctccaagaaggaagcagtagctgagcacctgccctcacatactgctcttttcccctctccctccataccagagatgtggtgagctctgttcttctaccaacccagtctcaacacacaaagtgccaccaccttccctgactcagaacccacatccactcaatgtgaactctactaccacgacctccccatattcctcacttctccatcacctccagcctgactccctgtctgccctttcacccccaagattttgcacaggttaaggccagttatggcctttttgaaatctgtaatagctcccctttccccaactctaaagcctagaccttaaacctgttcctagagctatgcacacccctgccccagtttaccgttcctccctcagggcctccgtgacactccatgaaaagaagttcttgcataccggaaagttgaataaatggatgaattcattccttaaaa

SEQ ID NO: 1577 - DNA, 4325 bp, Homo sapiens
gccctttctgtgcggcgcccgggcgcaacgcaaacatggcggcgggtggcacccgtcggtgaggcggtgccgggcgggggttgtcgggtgtcatgggcggtggcgacggcaccgcccccgcgtctccctgagcgggacggcagggggggcttctgcgctgagccgggcgatggacgacagcggcgagctgggtggtctggagaccatggagaccctcacggagctgggcgacgagctgaccctgggagacatcgacgagatgctgcaatttgtcagtaatcaagtgggagagttccctgacttgttttcagaacagctgtgtagctcctttcctggcagtggtggtagtggtagcagcagcggcagcagtggcagcagcagcagcagcagcaatggcaggggcagcagcagcggagctgtggacccttcagtgcaacggtcattcacccaggtcacattaccttccttctctccctcggcggcctccccacaggctccaactctgcaagtcaaggtttctcccacctcagttcccaccacacccagggcaactcctattcttcagccccgcccccagccccagcctcaacctcaaactcagctgcaacaacagacggtaatgatcacgccaacattcagcaccactccgcagacgaggatcatccagcagcctttgatataccagaatgcagctactagctttcaagtccttcagcctcaagtccaaagcctggtgacatcctcccaggtacagccggtcaccattcagcagcaggtgcagacagtacaggcccagcgggtgctgacacaaacggccaatggcacgctgcagacccttgccccggctacggtgcagacagttgctgcgccacaggtgcagcaggtcccggtcctggtccagcctcagatcatcaagacagattcccttgttttgaccacactgaagacagatggcagccctgttatggctgcggtccagaacccggccctcaccgccctcaccacccctatccagacggctgcccttcaagtaccaaccctggtgggcagcagtgggaccattctgaccacaatgcctgtaatgatggggcaagagaaagtgcccattaagcaggtacctgggggagtcaagcagcttgagccccccaaagaaggagaaaggcggacaacccataatatcattgagaaacgatatcgctcctccatcaatgacaaaatcatcgaattgaaagacctggtcatggggacagacgccaagatgcacaagtctggcgttctgaggaaggccattgattacatcaaatacttgcagcaggtcaatcataaactgcgccaggagaacatggtgctgaagctggcaaatcaaaagaacaagcttctaaagggcatcgacctaggcagtctggtggacaatgaggtggacctgaagatcgaggactttaatcagaatgtccttctgatgtcccccccagcctctgactcagggtcccaggctggcttctctccctactccattgactctgagccaggaagccctctattggatgatgcaaaggtcaaagatgagccagactctcctcctgtggcgctgggcatggtagaccgctcacggattcttctgtgtgtcctcaccttcctgtgcctctcctttaaccccctgacttccctgctgcagtggggaggggcccacgactctgaccagcacccacactcaggctctggccgcagtgtcctgtcattcgagtcaggttctgggggctggtttgactggatgatgcctactcttctcttatggctggtaaatggtgtgattgtcctgagcgtctttgtgaagctgctggttcatggggagccagtgatccggccacactcgcgctcctcggtcaccttctggaggcaccggaaacaggcagatctggatctcgccagaggagattttgcagctgctgccggcaacctacaaacctgcctggcagttttgggccgggcactgcccacctcccgcctggacctggcctgcagcctctcctggaacgtgatccgctacagcctgcagaagctacgcctggtgcgctggctgctcaagaaagtcttccagtgccggcgggccacgccagccactgaggcaggctttgaagacgaagctaagaccagcgcccgggatgcggctctggcctatcaccggctgcaccagctgcacatcacagggaagcttcctgcaggatccgcctgttccgatgtacacatggcgttgtgtgccgtgaacctggctgaatgtgcagaggagaagatcccaccgagcacactggttgagatccatctgactgctgccatggggctcaagacccggtgtggaggcaagctgggcttcctggccagctacttcctcagccgagcccagagcctgtgtggccccgagcacagtgctgttcctgactccctgcgctggctctgccaccccctgggccagaagtttttcatggagcggagctggtctgtgaagtcagctgccaaggagagtctatactgtgcccagaggaacccagctgaccccattgcgcaggtccaccaggccttctgcaagaacctgctggagcgagctatagagtccttggtgaaacctcaggccaagaagaaggctggagaccaggaagaagagagctgtgaattctccagtgctctggagtacttgaaattacttcattcttttgtggactctgtgggggttatgagccccccactctccaggagctccgtgctcaagtccgccctgggtccagacatcatctgtcggtggtggacgtctgcaatcactgtggccatcagctggctccagggagacgatgcagctgtgcgctctcattttaccaaagtggaacgcatccccaaggccctggaagtgacagagagccccctggtgaaggccatcttccatgcctgcagagccatgcatgcctcactccctgggaaagcagatgggcagcagagttccttctgccattgcgagagggccagtggccacctatggagcagcctcaacgtcagtggggccacctctgaccctgccctcaaccacgtggtccagctgctcacctgtgacctgctactgtcgctacggacagcgctctggcaaaaacaggccagtgccagccaggctgtgggggagacctaccacgcgtcaggcgctgaactggcgggcttccaacgggacctgggcagcctgcgcaggctggcacacagcttccgcccagcataccgcaaggtgttcctgcatgaagccaccgtgcgcctgatggcaggagccagccccacccgcacccaccagctgctggaacacagcctgcggcggcgcaccacgcagagcaccaagcacggagaggtggatgcctggcccggccagcgagagcgggccaccgccatcctgctggcctgccgccacctgcccctctccttcctctcctccccgggccagcgggcagtgctgctggccgaagctgcccgcaccctggagaaggtgggcgaccggcgctcctgcaacgactgccagcagatgattgttaagctgggtggtggcactgccattgccgcctcctgaccaccaggctcagcccacccctccacctctctctcgatttctctctctccccctcagcatcttcccgctgagagtggtggggaagagccttgtcttcttagctgtcacctgccgaggcttctgggccactcaggccagtgcacccctgggcagagccccttaaagctgctgtcactagatgcccatggtccagggcctggtgggcgtgagaggataggtggcagggcagaaactgggcagccctgacttgatagcagcagggggagctcccaagctgccaagcccctgcctccagccttcctgagtttctctctcctgaaccctactctctcctttttgcttcctcagtttttatcaggctttctctgggggacagcagtctctgagcaccagggagcagttgccctcaggcctgtgcccagcatgccctcccctttttatacgaatgttttctaccagtgtgcttgggtttgccatgatgcgaggctgagttgctgtagcgtcttgattctctccctgggtctgcgttccctcccctgggcctgactgagcctgctcattgtttttccctttattacacaggacagccaggggaggaggggggcccagccctgggaggctggtgggaggcagggggcaggcctgcggatgcatgaaataatgttggcattattttttaattttttaaaaaataaatggtatcttatttaaaaaaaaaaaaaaaaaaaaa

SEQ ID NO: 1578 - DNA, 2568 bp, Homo sapiens
gccccgggagcgcgggcggcgggccccttggtcctcaggcggccgtggcggcggtggcggcggttgggccgaggcaggcggcctcagtggccgaggtggctggacgcgtagcaggtggaaggagggagggagccgcaggcgcagacccacccgccatgaagccccccgcagcctgtgcaggagacatggcggacgcagcatctccgtgctctgtggtaaacgacctgcggtgggacctgagtgcccagcagatagaggagcgcaccagggagctcatcgagcagaccaagcgcgtgtatgaccaggttggcacccaggagtttgaggacgtgtcctacgagagcacgctcaaggcgctggccgatgtggaggtcacctacacagttcagaggaatatccttgacttcccccagcatgtttccccctccaaggacatccggacagccagcacagaggccgacaagaagctctctgagttcgacgtggagatgagcatgagggaggacgtgtaccagaggatcgtgtggctccaggagaaagttcagaaggactcactgaggcccgaggctgcgcggtacctggagcggctaatcaagctgggccggagaaatgggcttcacctccccagagagactcaggaaaacatcaaacgcatcaagaagaagctgagccttctgtgcatcgacttcaacaagaacctgaacgaggacacgaccttcctgcccttcacgctccaggagctaggagggctccccgaggactttctgaactccctggagaagatggaggacggcaagttgaaggtcaccctcaagtacccccattacttccccctcctgaagaaatgccacgtgcctgagaccaggaggaaagtggaggaggccttcaactgccggtgcaaggaggagaactgcgctatcctcaaggagctggtgacgctgcgggcccagaagtcccgcctgctggggttccacacgcacgccgactatgtcctggagatgaacatggccaagaccagccagaccgtggccaccttcctagatgagctggcgcagaagctgaagcccctgggggagcaggagcgtgcggtgattctggagctgaagcgtgcggagtgcgagcgccggggcctgcccttcgacggccgcatccgtgcctgggacatgcgctactacatgaaccaggtggaggagacgcgctactgcgtggaccagaacctgctcaaggagtacttccccgtgcaggtggtcacgcacgggctgctgggcatctaccaggagctcctggggctggccttccaccacgaggagggcgccagtgcctggcatgaggacgtgcggctctacaccgcgagggacgcggcctcgggggaggtggtcggcaagttctacctggacctgtacccgcgggaaggaaagtacgggcacgcggcctgctttggcctgcagcccggctgcctgcggcaggatgggagccgccagatcgccatcgcggccatggtggccaacttcaccaagcccacagccgacgcgccctcgctgctgcagcatgacgaggtggagacctacttccatgagtttggccacgtgatgcaccagctctgctcccaggcggagttcgccatgttcagcgggacccacgtggagcgggactttgtggaggcgccgtcgcagatgctggagaactgggtgtgggagcaggagccgctgctgcggatgtcgcggcactaccgcacaggcagcgccgtgccccgggagctcctggagaagctcattgagtcccggcaggccaacacaggcctcttcaacctgcgccagatcgtcctcgccaaggtggaccaggccctgcacacgcagacggacgcagaccccgccgaggagtatgcgcggctctgccaggagatcctcggggtcccggccacgccaggaaccaacatgcctgcaaccttcggccatctggcaggtggctacgacgcccagtactacgggtacctgtggagcgaggtgtattccatggacatgttccacacgcgcttcaagcaggagggtgtcctgaacagcaaggttggcatggattacagaagctgcatcctgagacccggcggttccgaggatgccagcgccatgctgaggcgcttcctgggccgtgaccccaagcaggacgccttcctcctgagcaaggggctgcaggtcgggggctgcgagcccgagccgcaggtctgctgaggcctggcactgcgactgcccagtctggcctgcgctcccgccgccctggtgccttagcccccggcacaggatggggcaggctctggcacagtgcctgggactggcagggtggctgagcggctgtcttgcctcttgtcattgtctgtccccacccggtcgtggcccacccggctagagacggcgtcctcaaggcatctggagggctttcgtggctgccagggcctggtctttgttgcactaacacgtctcctctctgggaaacgtcccttgtcaggagacggctcttctttgaaatgaggtcattaaaaggaaacagaaaaagagaaaaaaaaaaaaaaaaaaa

SEQ ID NO: 1579 - DNA, 1906 bp, Homo sapiens
ggcgccgccgccgctcccgaggcccctgccgccgccgctcccgctgctgtcgccgcgcagagccggagcaggagccacggccgagaggagggaggaggaggaggaggaggtggaggaggtggaggaggtggaggaggcgccggaccgggggggatagattcccagaagtgggataactggatcagagggtgattaccctgtgtataagagtatgtgtctcactgcaccttcaatggcattgagtagatcgtcagtatttaaacagatcacatcatgcgtgagtacaagctagtggtccttggttcaggaggcgttgggaagtctgctctgacagttcagtttgttcagggaatttttgttgaaaaatatgacccaacgatagaagattcctacagaaagcaagttgaagtcgattgccaacagtgtatgctcgaaatcctggatactgcagggacagagcaatttacagcaatgagggatttgtatatgaagaacggccaaggttttgcactagtatattctattacagctcagtccacgtttaacgacttacaggacctgagggaacagattttacgggttaaggacacggaagatgttccaatgattttggttggcaataaatgtgacctggaagatgagcgagtagttggcaaagagcagggccagaatttagcaagacagtggtgtaactgtgcctttttagaatcttctgcaaagtcaaagatcaatgttaatgagatattttatgacctggtcagacagataaataggaaaacaccagtggaaaagaagaagcctaaaaagaaatcatgtctgctgctctaggcccatagtcagcagcagctctgagccagattacaggaatgaagaactgttgcctaattggaaagtgccagcattccagacttcaaaaataaaaaatctgaagaggcttctcctgttttatatattatgtgaagaatttagatcttatattggtttgcacaagttccctggagaaaaaaattgctctgtgtatatctcttggaaaataagacaatagtatttctcctttgcaatagcagttataacagatgtgaaaatatacttgactctaatatgattatacaaaagagcatggatgcatttcaaatgttagatattgctactataatcaaatgatttcatattgatctttttatcatgatcctccctatcaagcactaaaaagttgaaccattatactttatatctgtaatgatactgattatgaaatgtcccctcaaactcattgcagcagataacttttttgagtcattgacttcattttatatttaaaaaattatggaatatcatctgtcattatattctaattaaaattgtgcataatgctttggaaaaatgggtcttttataggaaaaaaactgggataactgatttctatggctttcaaagctaaaatatataatatactaaaccaactctaatattgcttcttgtgttttactgtcagattaaattacagcttttatggatgattaaattttagtacattttcatttggtttgtgtgtttttgttattgtttatagattaaagcgtttattttataatgaccacattgttttaaatgcgacagtagctcctttctgcctagtatctgcagaacactggctttaaactatactaagtaactggtgatttctctaggaacagacctcgcactttctgttctaaatatatttattcctactatacagtaaaatacatcagacaacatagaatagttttgtatattctctcttgatcttaaagattgtatcttattgaatatcccactgtatattatttttatatgtaaaaagataagtttaatactgtatcagggtttaacttttactatttcagatcttccacagcttgta

SEQ ID NO: 1580 - DNA, 1812 bp, Homo sapiens
ggcgccgccgccgctcccgaggcccctgccgccgccgctcccgctgctgtcgccgcgcagagccggagcaggagccacggccgagaggagggaggaggaggaggaggaggtggaggaggtggaggaggtggaggaggcgccggaccggggggatcgtcagtatttaaacagatcacatcatgcgtgagtacaagctagtggtccttggttcaggaggcgttgggaagtctgctctgacagttcagtttgttcagggaatttttgttgaaaaatatgacccaacgatagaagattcctacagaaagcaagttgaagtcgattgccaacagtgtatgctcgaaatcctggatactgcagggacagagcaatttacagcaatgagggatttgtatatgaagaacggccaaggttttgcactagtatattctattacagctcagtccacgtttaacgacttacaggacctgagggaacagattttacgggttaaggacacggaagatgttccaatgattttggttggcaataaatgtgacctggaagatgagcgagtagttggcaaagagcagggccagaatttagcaagacagtggtgtaactgtgcctttttagaatcttctgcaaagtcaaagatcaatgttaatgagatattttatgacctggtcagacagataaataggaaaacaccagtggaaaagaagaagcctaaaaagaaatcatgtctgctgctctaggcccatagtcagcagcagctctgagccagattacaggaatgaagaactgttgcctaattggaaagtgccagcattccagacttcaaaaataaaaaatctgaagaggcttctcctgttttatatattatgtgaagaatttagatcttatattggtttgcacaagttccctggagaaaaaaattgctctgtgtatatctcttggaaaataagacaatagtatttctcctttgcaatagcagttataacagatgtgaaaatatacttgactctaatatgattatacaaaagagcatggatgcatttcaaatgttagatattgctactataatcaaatgatttcatattgatctttttatcatgatcctccctatcaagcactaaaaagttgaaccattatactttatatctgtaatgatactgattatgaaatgtcccctcaaactcattgcagcagataacttttttgagtcattgacttcattttatatttaaaaaattatggaatatcatctgtcattatattctaattaaaattgtgcataatgctttggaaaaatgggtcttttataggaaaaaaactgggataactgatttctatggctttcaaagctaaaatatataatatactaaaccaactctaatattgcttcttgtgttttactgtcagattaaattacagcttttatggatgattaaattttagtacattttcatttggtttgtgtgtttttgttattgtttatagattaaagcgtttattttataatgaccacattgttttaaatgcgacagtagctcctttctgcctagtatctgcagaacactggctttaaactatactaagtaactggtgatttctctaggaacagacctcgcactttctgttctaaatatatttattcctactatacagtaaaatacatcagacaacatagaatagttttgtatattctctcttgatcttaaagattgtatcttattgaatatcccactgtatattatttttatatgtaaaaagataagtttaatactgtatcagggtttaacttttactatttcagatcttccacagcttgta

SEQ ID NO: 1581 - DNA, 2358 bp, Homo sapiens
gcgcaggcgctttgagagacggtgaagccggtggccggtggccgggcgggaccaacaaagatggcggcggcccctgcggcgggagcgatctgggcaacggctgcggctaaagctgcagccgggcccacgggggggctgcacgggggtagtagggggtggccctgaactggggcctggccctggctggcctctcccgccgcctcactgggggacaggtactggggatacgatggctgattcgatagatctggttcctgccctcagtgcgtatactgctccccactttcgttgatgtggtagtggtgatgactgagccaaccacctaatgtggaaatgagaggacagcaagattgtgggtccagcctgtggtgtccacaatgccccaggcctctgagcaccgcctgggccgtacccgagagccacctgttaatatccagccccgagtgggatccaagctaccatttgcccccagggcccgcagcaaggagcgcagaaacccagcctctgggccaaaccccatgttacgacctctgcctccccggccaggtctgcctgatgaacggctcaagaaactggagctgggacggggacggacctcaggccctcgtcccagaggcccccttcgagcagatcatggggttcccctgcctggctcaccacccccaacagtggctttgcctctcccatctcggaccaacttagcccgttccaagtctgtgagcagtggggacttgcgtccaatggggattgccttgggagggcaccgtggcaccggagagcttggggctgcactgagccgcttggccctccggcctgagccacccactttgagacgtagcacttctctccgccgcctagggggctttcctggaccccctaccctgttcagcatacggacagagccccctgcttcccatggctccttccacatgatatccgcccggtcctctgagcctttctactctgatgacaagatggctcatcacacactccttctgggctctggtcatgttggccttcgaaacctgggaaacacgtgcttcctgaatgctgtgctgcagtgtctgagcagcactcgacctcttcgggacttctgtctgagaagggacttccggcaagaggtgcctggaggaggccgagcccaagagctcactgaagcctttgcagatgtgattggtgccctctggcaccctgactcctgcgaagctgtgaatcctactcgattccgagctgtcttccagaaatatgttccctccttctctggatacagccagcaggatgcccaagagttcctgaagctcctcatggagcggctacaccttgaaatcaaccgccgaggccgccgggctccaccgatacttgccaatggtccagttccctctccaccccgccgaggaggggctctgctagaagaacctgagttaagtgatgatgaccgagccaacctaatgtggaaacgttacctggagcgagaggacagcaagattgtggacctgtttgtgggccagttgaaaagttgtctcaagtgccaggcctgtgggtatcgctccacgaccttcgaggttttttgtgacctgtccctgcccatccccaagaaaggatttgctgggggcaaggtgtctctgcgggattgtttcaaccttttcactaaggaagaagagctagagtcggagaatgccccagtgtgtgaccgatgtcggcagaaaactcgaagtaccaaaaagttgacagtacaaagattccctcgaatcctcgtgctccatctgaatcgattttctgcctcccgaggctccatcaaaaaaagttcagtaggtgtagactttccactgcagcgactgagcctaggggactttgccagtgacaaagccggaagtcctgtataccagctgtatgccctttgcaaccactcaggcagcgtccactatggccactacacagccctgtgccggtgccagactggttggcatgtctacaatgactctcgtgtctcccctgtcagtgaaaaccaggtggcatccagcgagggctacgtgctgttctaccaactgatgcaggagccaccccggtgcctgtgacacctctaagctctggcacctgtgaagccctttaaacacccttaagccccaggctccccgtttacctcagagacgtctatttttgtgtctttttaatcggggaggggggagggggtggttgtagctccattattttttttattaaaaaatacccttccacctggaggctcccttgtctcccagccccatgtacaaagctcaccaagcccctgcccatgtacagcccccagaccctctgcaatatcactttttgtgaataaatttattaagaaaaaatgaaaaa

SEQ ID NO: 1582 - DNA, 2217 bp, Homo sapiens
gcgcaggcgctttgagagacggtgaagccggtggccggtggccgggcgggaccaacaaagatggcggcggcccctgcggcgggagcgatctgggcaacggctgcggctaaagctgcagccgggcccacgggggggctgcacgggggtagtagggggtggccctgaactggggcctggccctggctggcctctcccgccgcctcactgggggacaggtccagcctgtggtgtccacaatgccccaggcctctgagcaccgcctgggccgtacccgagagccacctgttaatatccagccccgagtgggatccaagctaccatttgcccccagggcccgcagcaaggagcgcagaaacccagcctctgggccaaaccccatgttacgacctctgcctccccggccaggtctgcctgatgaacggctcaagaaactggagctgggacggggacggacctcaggccctcgtcccagaggcccccttcgagcagatcatggggttcccctgcctggctcaccacccccaacagtggctttgcctctcccatctcggaccaacttagcccgttccaagtctgtgagcagtggggacttgcgtccaatggggattgccttgggagggcaccgtggcaccggagagcttggggctgcactgagccgcttggccctccggcctgagccacccactttgagacgtagcacttctctccgccgcctagggggctttcctggaccccctaccctgttcagcatacggacagagccccctgcttcccatggctccttccacatgatatccgcccggtcctctgagcctttctactctgatgacaagatggctcatcacacactccttctgggctctggtcatgttggccttcgaaacctgggaaacacgtgcttcctgaatgctgtgctgcagtgtctgagcagcactcgacctcttcgggacttctgtctgagaagggacttccggcaagaggtgcctggaggaggccgagcccaagagctcactgaagcctttgcagatgtgattggtgccctctggcaccctgactcctgcgaagctgtgaatcctactcgattccgagctgtcttccagaaatatgttccctccttctctggatacagccagcaggatgcccaagagttcctgaagctcctcatggagcggctacaccttgaaatcaaccgccgaggccgccgggctccaccgatacttgccaatggtccagttccctctccaccccgccgaggaggggctctgctagaagaacctgagttaagtgatgatgaccgagccaacctaatgtggaaacgttacctggagcgagaggacagcaagattgtggacctgtttgtgggccagttgaaaagttgtctcaagtgccaggcctgtgggtatcgctccacgaccttcgaggttttttgtgacctgtccctgcccatccccaagaaaggatttgctgggggcaaggtgtctctgcgggattgtttcaaccttttcactaaggaagaagagctagagtcggagaatgccccagtgtgtgaccgatgtcggcagaaaactcgaagtaccaaaaagttgacagtacaaagattccctcgaatcctcgtgctccatctgaatcgattttctgcctcccgaggctccatcaaaaaaagttcagtaggtgtagactttccactgcagcgactgagcctaggggactttgccagtgacaaagccggaagtcctgtataccagctgtatgccctttgcaaccactcaggcagcgtccactatggccactacacagccctgtgccggtgccagactggttggcatgtctacaatgactctcgtgtctcccctgtcagtgaaaaccaggtggcatccagcgagggctacgtgctgttctaccaactgatgcaggagccaccccggtgcctgtgacacctctaagctctggcacctgtgaagccctttaaacacccttaagccccaggctccccgtttacctcagagacgtctatttttgtgtctttttaatcggggaggggggagggggtggttgtagctccattattttttttattaaaaaatacccttccacctggaggctcccttgtctcccagccccatgtacaaagctcaccaagcccctgcccatgtacagcccccagaccctctgcaatatcactttttgtgaataaatttattaagaaaaaatgaaaaa

SEQ ID NO: 1583 - DNA, 2191 bp, Homo sapiens
cacgggcggagccggggccatggagccgccgctgccgggctaggcaggtcgtgccccgccgggccggcggcgatgtcgggctaccagcgccacccgggcgccaccccgctgtcccgagcccggagcctcgccattcccgacgctccagcgttctatgagcgccggtcttgtctcccccagctaaattgtgagcgcccccatggcagggacctggactcccccttcttcggcattcggccggcctttatgtgctatgtgcccagcccggtgctggcttccgtgggagacacagatgacagatttgaagatctggaagaggcaaatccattctcttttagagagtttctgaagaccaagaacctcggcctctcgaaagaggatccggccagcagaatttatgcaaaggaagcctcgaggcattccctgggacttgaccacaactccccaccctcccaaaccggcgggtatggcctggagtatcagcagccatttttcgaggatccgacaggggctggtgacctcctggatggggaggaggatgaggacaccggatggagtggggcctacctgccgtccgccatcgagcagactcaccccgagagggtccctgccggcacgtcgccctgcagcacatacctttcctttttctccaccccgtcggagctggcagggcctgagtctctgccctcgtgggcgttgagtgacactgattctcgcgtgtctccggcctctccggcagggagtcctagcgcagactttgcggttcatggagagtctctgggagacaggcacctgcggacgctgcagataagttacgacgcactgaaagatgaaaattctaagctgagaagaaagctgaatgaggttcagagcttctctgaagctcaaacagaaatggtgaggacgcttgagcggaagttagaagcaaaaatgatcaaggaggaaagcgactaccacgacctggagtcggtggttcagcaggtggagcagaacctggagctgatgaccaaacgggctgtaaaggcagaaaaccacgtcgtgaaactaaaacaggaaatcagtttgctccaggcgcaggtctccaacttccagcgagagaatgaagccctgcggtgcggccagggcgccagcctgaccgtggtgaagcagaacgccgacgtggccctgcagaacctccgggtggtcatgaacagtgcacaggcttccatcaagcaactggtttccggagctgagacactgaatcttgttgccgaaatccttaaatctatagacagaatttctgaaattaaagacgaggaggaagactcttgaggacccctgggtgttctcagcatgaagctccgtgtataccctgaggtcaccaccgctcgatctaaatgtgcagttgtgtccttaaatatgcagtcttcacccagagtaaagtgttgatcgcaagagtccagtgtcgtgccctcagccagttcttggccaccacaatgggagcagccctggccgagttgtctctgtggtttctatgcagcccttcttggcgaaattcctgcgatcttatagattctaatgagctcttggaagacattgtcataaaagccagtgattttaagaaaaagagtggttctggaatcagtgttttccagtcccatcccagaacatcagttgtaagataagtacaattggttgtccttgatttcataagtagaacaaacactaaatgtgcctctgagatggccaccccgggcagggacctgtgccttccaccgatgctcagggctccctctggctcccgggtcactcttgtggccccagtgggtggtccctgcagtcatggcctgagtgcgcaggggccaccgcgtggctgccgctgtcctcctccgggacccacggggaccaaggtcacacgttccgtgctgtgaagctgtccagatgtgcctctttggctgggggttctggtggacgtttcaagtggcattttgtacaatgcaggttagaattcaggaatttcaagtatgtgcccgggtctgtcaggtcccagttgcctttctgacggcccccctcagagggacggcgatgagcactaaatgcttttttgactattttcctatagattttttttaaaacttttttttcctcctgttccaattgatagctttcttatttaataaattctgtagttcaccaaaaaaaaaaaaaaaaa

SEQ ID NO: 1584 - DNA, 3659 bp, Homo sapiens
gcagccagtcgcggaggcggggaggctgcgcggtcagaggcgcctggagcgagcgaatcctggcccaccgcctgcccaaccgcgtgaccttgattgagttaatgaacttcacgcctcagcgtccaggtctgtaaaatggggtgtctaacgcagaccgtacagcccagctgggtttagcaaacttccgggagccagttggagcctctccccatccctagcggtgatcccaggtgacgacatgccgcggggggtcctgcggaggccaccctagggcgttgctgctgcctttgggagtgtggagctccaaaccatgtcgcgagaggcggattttgggaggccgggatcctcgcgccagggggatgtgcgagggtgtgggataaatcttaattcctccggcccacccaaagcctggaaatccagcctccgcgcctcttgccctgcgggccccgccctcagtcccgccctcatctaacccgctaccccattggtggcgtccggcggcgcggctgctgttatttttcgaatatataaggaggtggaagtggcagctgcaactagaggcttccctggctggtgcctgagcccggcgtccctcgccccccgccctccccgcatccctctcctccctcgcgcctggccctgtggctcttcctccctccctccttccccccccccccacccctcgcccgctgcctccctcggcccagccagctgtgccggcgtttgttggctgccctgcgcccggccctccagccagccttctgccggccccgccgcgatggaggtgccccagccggagcccgcgccaggctcggctctcagtccagcaggcgtgtgcggtggcgcccagcgtccgggccacctcccgggcctcctgctgggatctcatggcctcctggggtccccggtgcgggcggccgcttcctcgccggtcaccaccctcacccagaccatgcacgacctcgccgggctcggcagccgcagccgcctgacgcacctatccctgtctcgacgggcatccgaatcctccctgtcgtctgaatcctccgaatcttctgatgcaggtctctgcatggattcccccagccctatggacccccacatggcggagcagacgtttgaacaggccatccaggcagccagccggatcattcgaaacgagcagtttgccatcagacgcttccagtctatgccggtgaggctgctgggccacagccccgtgcttcggaacatcaccaactcccaggcgcccgacggccggaggaagagcgaggcgggcagtggagctgccagcagctctggggaagacaaggagaatgatggatttgtcttcaagatgccatggaagcccacacatcccagctccacccatgctctggcagagtgggccagccgcagggaagcctttgcccagagacccagctcggcccccgacctgatgtgtctcagtcctgaccggaagatggaagtggaggagctcagccccctggccctaggtcgcttctctctgacccctgcagagggggatactgaggaagatgatggatttgtggacatcctagagagtgacttaaaggatgatgatgcagttcccccaggcatggagagtctcattagtgccccactggtcaagaccttggaaaaggaagaggaaaaggacctcgtcatgtacagcaagtgccagcggctcttccgctctccgtccatgccctgcagcgtgatccggcccatcctcaagaggctggagcggccccaggacagggacacgcccgtgcagaataagcggaggcggagcgtgacccctcctgaggagcagcaggaggctgaggaacctaaagcccgcgtcctccgctcaaaatcactgtgtcacgatgagatcgagaacctcctggacagtgaccaccgagagctgattggagattactctaaggccttcctcctacagacagtagacggaaagcaccaagacctcaagtacatctcaccagaaacgatggtggccctattgacgggcaagttcagcaacatcgtggataagtttgtgattgtagactgcagatacccctatgaatatgaaggcgggcacatcaagactgcggtgaacttgcccctggaacgcgacgccgagagcttcctactgaagagccccatcgcgccctgtagcctggacaagagagtcatcctcattttccactgtgaattctcatctgagcgtgggccccgcatgtgccgtttcatcagggaacgagaccgtgctgtcaacgactaccccagcctctactaccctgagatgtatatcctgaaaggcggctacaaggagttcttccctcagcacccgaacttctgtgaaccccaggactaccggcccatgaaccacgaggccttcaaggatgagctaaagaccttccgcctcaagactcgcagctgggctggggagcggagccggcgggagctctgtagccggctgcaggaccagtgaggggcctgcgccagtcctgctacctcccttgcctttcgaggcctgaagccagctgccctatgggcctgccgggctgagggcctgctggaggcctcaggtgctgtccatgggaaagatggtgtgggtgtcctgcctgtctgccccagcccagattcccctgtgtcatcccatcattttccatatcctggtgccccccacccctggaagagcccagtctgttgagttagttaagttgggttaataccagcttaaaggcagtattttgtgtcctccaggagcttcttgtttccttgttagggttaacccttcatcttcctgtgtcctgaaacgctcctttgtgtgtgtgtcagctgaggctgggggagagccgtggtccctgaggatgggtcagagctaaactccttcctggcctgagagtcagctctctgccctgtgtacttcccgggccagggctgcccctaatctctgtaggaaccgtggtatgtctgccatgttgcccctttctcttttcccctttcctgtcccaccatacgagcacctccagcctgaacagaagctcttactctttcctatttcagtgttacctgtgtgcttggtctgtttgactttacgcccatctcaggacacttccgtagactgtttaggttcccctgtcaaatatcagttacccactcggtcccagttttgttgccccagaaagggatgttattatccttgggggctcccagggcaagggttaaggcctgaatcatgagcctgctggaagcccagcccctactgctgtgaaccctggggcctgactgctcagaacttgctgctgtcttgttgcggatggatggaaggttggatggatgggtggatggccgtggatggccgtggatgcgcagtgccttgcatacccaaaccaggtgggagcgttttgttgagcatgacagcctgcagcaggaatatatgtgtgcctatttgtgtggacaaaaatatttacacttagggtttggagctattcaagaggaaatgtcacagaagcagctaaaccaaggactgagcaccctctggattctgaatctcaagatgggggcagggctgtgcttgaaggccctgctgagtcatctgttagggccttggttcaataaagcactgagcaagttgagaaaaaaaaaaaaaaaaaaaaaaaaaaaaa

SEQ ID NO: 1585 - DNA, 3578 bp, Homo sapiens
gcagccagtcgcggaggcggggaggctgcgcggtcagaggcgcctggagcgagcgaatcctggcccaccgcctgcccaaccgcgtgaccttgattgagttaatgaacttcacgcctcagcgtccaggtctgtaaaatggggtgtctaacgcagaccgtacagcccagctgggtttagcaaacttccgggagccagttggagcctctccccatccctagcggtgatcccaggtgacgacatgccgcggggggtcctgcggaggccaccctagggcgttgctgctgcctttgggagtgtggagctccaaaccatgtcgcgagaggcggattttgggaggccgggatcctcgcgccagggggatgtgcgagggtgtgggataaatcttaattcctccggcccacccaaagcctggaaatccagcctccgcgcctcttgccctgcgggccccgccctcagtcccgccctcatctaacccgctaccccattggtggcgtccggcggcgcggctgctgttatttttcgaatatataaggaggtggaagtggcagctgcaactagaggcttccctggctggtgcctgagcccggcgtccctcgccccccgccctccccgcatccctctcctccctcgcgcctggccctgtggctcttcctccctccctccttccccccccccccacccctcgcccgctgcctccctcggcccagccagctgtgccggcgtttgttggctgccctgcgcccggccctccagccagccttctgccggccccgccgcgatggaggtgccccagccggagcccgcgccaggctcggctctcagtccagcaggcgtgtgcggtggcgcccagcgtccgggccacctcccgggcctcctgctgggatctcatggcctcctggggtccccggtgcgggcggccgcttcctcgccggtcaccaccctcacccagaccatgcacgacctcgccgggctcggcagcgaaaccccaaagagtcaggtagggaccctgctcttccgcagccgcagccgcctgacgcacctatccctgtctcgacgggcatccgaatcctccctgtcgtctgaatcctccgaatcttctgatgcaggtctctgcatggattcccccagccctatggacccccacatggcggagcagacgtttgaacaggccatccaggcagccagccggatcattcgaaacgagcagtttgccatcagacgcttccagtctatgccggatggatttgtcttcaagatgccatggaagcccacacatcccagctccacccatgctctggcagagtgggccagccgcagggaagcctttgcccagagacccagctcggcccccgacctgatgtgtctcagtcctgaccggaagatggaagtggaggagctcagccccctggccctaggtcgcttctctctgacccctgcagagggggatactgaggaagatgatggatttgtggacatcctagagagtgacttaaaggatgatgatgcagttcccccaggcatggagagtctcattagtgccccactggtcaagaccttggaaaaggaagaggaaaaggacctcgtcatgtacagcaagtgccagcggctcttccgctctccgtccatgccctgcagcgtgatccggcccatcctcaagaggctggagcggccccaggacagggacacgcccgtgcagaataagcggaggcggagcgtgacccctcctgaggagcagcaggaggctgaggaacctaaagcccgcgtcctccgctcaaaatcactgtgtcacgatgagatcgagaacctcctggacagtgaccaccgagagctgattggagattactctaaggccttcctcctacagacagtagacggaaagcaccaagacctcaagtacatctcaccagaaacgatggtggccctattgacgggcaagttcagcaacatcgtggataagtttgtgattgtagactgcagatacccctatgaatatgaaggcgggcacatcaagactgcggtgaacttgcccctggaacgcgacgccgagagcttcctactgaagagccccatcgcgccctgtagcctggacaagagagtcatcctcattttccactgtgaattctcatctgagcgtgggccccgcatgtgccgtttcatcagggaacgagaccgtgctgtcaacgactaccccagcctctactaccctgagatgtatatcctgaaaggcggctacaaggagttcttccctcagcacccgaacttctgtgaaccccaggactaccggcccatgaaccacgaggccttcaaggatgagctaaagaccttccgcctcaagactcgcagctgggctggggagcggagccggcgggagctctgtagccggctgcaggaccagtgaggggcctgcgccagtcctgctacctcccttgcctttcgaggcctgaagccagctgccctatgggcctgccgggctgagggcctgctggaggcctcaggtgctgtccatgggaaagatggtgtgggtgtcctgcctgtctgccccagcccagattcccctgtgtcatcccatcattttccatatcctggtgccccccacccctggaagagcccagtctgttgagttagttaagttgggttaataccagcttaaaggcagtattttgtgtcctccaggagcttcttgtttccttgttagggttaacccttcatcttcctgtgtcctgaaacgctcctttgtgtgtgtgtcagctgaggctgggggagagccgtggtccctgaggatgggtcagagctaaactccttcctggcctgagagtcagctctctgccctgtgtacttcccgggccagggctgcccctaatctctgtaggaaccgtggtatgtctgccatgttgcccctttctcttttcccctttcctgtcccaccatacgagcacctccagcctgaacagaagctcttactctttcctatttcagtgttacctgtgtgcttggtctgtttgactttacgcccatctcaggacacttccgtagactgtttaggttcccctgtcaaatatcagttacccactcggtcccagttttgttgccccagaaagggatgttattatccttgggggctcccagggcaagggttaaggcctgaatcatgagcctgctggaagcccagcccctactgctgtgaaccctggggcctgactgctcagaacttgctgctgtcttgttgcggatggatggaaggttggatggatgggtggatggccgtggatggccgtggatgcgcagtgccttgcatacccaaaccaggtgggagcgttttgttgagcatgacagcctgcagcaggaatatatgtgtgcctatttgtgtggacaaaaatatttacacttagggtttggagctattcaagaggaaatgtcacagaagcagctaaaccaaggactgagcaccctctggattctgaatctcaagatgggggcagggctgtgcttgaaggccctgctgagtcatctgttagggccttggttcaataaagcactgagcaagttgagaaaaaaaaaaaaaaaaaaaaaaaaaaaaa

SEQ ID NO: 1586 - DNA, 3701 bp, Homo sapiens
gcagccagtcgcggaggcggggaggctgcgcggtcagaggcgcctggagcgagcgaatcctggcccaccgcctgcccaaccgcgtgaccttgattgagttaatgaacttcacgcctcagcgtccaggtctgtaaaatggggtgtctaacgcagaccgtacagcccagctgggtttagcaaacttccgggagccagttggagcctctccccatccctagcggtgatcccaggtgacgacatgccgcggggggtcctgcggaggccaccctagggcgttgctgctgcctttgggagtgtggagctccaaaccatgtcgcgagaggcggattttgggaggccgggatcctcgcgccagggggatgtgcgagggtgtgggataaatcttaattcctccggcccacccaaagcctggaaatccagcctccgcgcctcttgccctgcgggccccgccctcagtcccgccctcatctaacccgctaccccattggtggcgtccggcggcgcggctgctgttatttttcgaatatataaggaggtggaagtggcagctgcaactagaggcttccctggctggtgcctgagcccggcgtccctcgccccccgccctccccgcatccctctcctccctcgcgcctggccctgtggctcttcctccctccctccttccccccccccccacccctcgcccgctgcctccctcggcccagccagctgtgccggcgtttgttggctgccctgcgcccggccctccagccagccttctgccggccccgccgcgatggaggtgccccagccggagcccgcgccaggctcggctctcagtccagcaggcgtgtgcggtggcgcccagcgtccgggccacctcccgggcctcctgctgggatctcatggcctcctggggtccccggtgcgggcggccgcttcctcgccggtcaccaccctcacccagaccatgcacgacctcgccgggctcggcagcgaaaccccaaagagtcaggtagggaccctgctcttccgcagccgcagccgcctgacgcacctatccctgtctcgacgggcatccgaatcctccctgtcgtctgaatcctccgaatcttctgatgcaggtctctgcatggattcccccagccctatggacccccacatggcggagcagacgtttgaacaggccatccaggcagccagccggatcattcgaaacgagcagtttgccatcagacgcttccagtctatgccggtgaggctgctgggccacagccccgtgcttcggaacatcaccaactcccaggcgcccgacggccggaggaagagcgaggcgggcagtggagctgccagcagctctggggaagacaaggagaatgatggatttgtcttcaagatgccatggaagcccacacatcccagctccacccatgctctggcagagtgggccagccgcagggaagcctttgcccagagacccagctcggcccccgacctgatgtgtctcagtcctgaccggaagatggaagtggaggagctcagccccctggccctaggtcgcttctctctgacccctgcagagggggatactgaggaagatgatggatttgtggacatcctagagagtgacttaaaggatgatgatgcagttcccccaggcatggagagtctcattagtgccccactggtcaagaccttggaaaaggaagaggaaaaggacctcgtcatgtacagcaagtgccagcggctcttccgctctccgtccatgccctgcagcgtgatccggcccatcctcaagaggctggagcggccccaggacagggacacgcccgtgcagaataagcggaggcggagcgtgacccctcctgaggagcagcaggaggctgaggaacctaaagcccgcgtcctccgctcaaaatcactgtgtcacgatgagatcgagaacctcctggacagtgaccaccgagagctgattggagattactctaaggccttcctcctacagacagtagacggaaagcaccaagacctcaagtacatctcaccagaaacgatggtggccctattgacgggcaagttcagcaacatcgtggataagtttgtgattgtagactgcagatacccctatgaatatgaaggcgggcacatcaagactgcggtgaacttgcccctggaacgcgacgccgagagcttcctactgaagagccccatcgcgccctgtagcctggacaagagagtcatcctcattttccactgtgaattctcatctgagcgtgggccccgcatgtgccgtttcatcagggaacgagaccgtgctgtcaacgactaccccagcctctactaccctgagatgtatatcctgaaaggcggctacaaggagttcttccctcagcacccgaacttctgtgaaccccaggactaccggcccatgaaccacgaggccttcaaggatgagctaaagaccttccgcctcaagactcgcagctgggctggggagcggagccggcgggagctctgtagccggctgcaggaccagtgaggggcctgcgccagtcctgctacctcccttgcctttcgaggcctgaagccagctgccctatgggcctgccgggctgagggcctgctggaggcctcaggtgctgtccatgggaaagatggtgtgggtgtcctgcctgtctgccccagcccagattcccctgtgtcatcccatcattttccatatcctggtgccccccacccctggaagagcccagtctgttgagttagttaagttgggttaataccagcttaaaggcagtattttgtgtcctccaggagcttcttgtttccttgttagggttaacccttcatcttcctgtgtcctgaaacgctcctttgtgtgtgtgtcagctgaggctgggggagagccgtggtccctgaggatgggtcagagctaaactccttcctggcctgagagtcagctctctgccctgtgtacttcccgggccagggctgcccctaatctctgtaggaaccgtggtatgtctgccatgttgcccctttctcttttcccctttcctgtcccaccatacgagcacctccagcctgaacagaagctcttactctttcctatttcagtgttacctgtgtgcttggtctgtttgactttacgcccatctcaggacacttccgtagactgtttaggttcccctgtcaaatatcagttacccactcggtcccagttttgttgccccagaaagggatgttattatccttgggggctcccagggcaagggttaaggcctgaatcatgagcctgctggaagcccagcccctactgctgtgaaccctggggcctgactgctcagaacttgctgctgtcttgttgcggatggatggaaggttggatggatgggtggatggccgtggatggccgtggatgcgcagtgccttgcatacccaaaccaggtgggagcgttttgttgagcatgacagcctgcagcaggaatatatgtgtgcctatttgtgtggacaaaaatatttacacttagggtttggagctattcaagaggaaatgtcacagaagcagctaaaccaaggactgagcaccctctggattctgaatctcaagatgggggcagggctgtgcttgaaggccctgctgagtcatctgttagggccttggttcaataaagcactgagcaagttgagaaaaaaaaaaaaaaaaaaaaaaaaaaaaa

SEQ ID NO: 1587 - DNA, 4780 bp, Homo sapiens
ggaagtgggtgtgacggggacgggggcccggtgggcccgcggaggaaagatactggggagtgggagccgcggggttcagagcgatgattcccccacaggaggcatccgctcgacggcgggagattgaggacaagctgaagcaggaggaggagactctgtccttcatccgagacagcctggagaagagcgaccagctcactaagaacatggtgtctatcttatcatcctttgagagccgccttatgaagctggagaactccatcatccctgtgcacaagcagacggagaatctgcagcggctgcaggagaatgttgagaagacgctgtcctgcctggaccatgtcatcagctactaccatgtggccagtgacactgagaagatcatcagagagggccccacaggtaggctggaagagtacctgggaagcatggccaagattcagaaggcagtggagtatttccaggacaacagcccagacagcccggaactcaacaaagtgaaactgctctttgagcgcgggaaggaggccctggagtccgaatttcgcagcctgatgacgcggcacagtaaggtcgtctcgcccgtgctcatcttggatctgatcagtggtgacgatgatctggaggcccaggaggacgtgaccctggagcacctgcccgagagcgtgctccaggatgtcattcgcatctcccgctggctggtggaatatggccgcaaccaagatttcatgaacgtctactaccagatacgctccagccagctggaccgctccatcaaaggactgaaggagcatttccataagagcagttcttcctctggggttccctactcccctgctatccccaacaagaggaaagacacacctaccaagaagccagtcaagcggccagggacgatccgtaaggctcagaaccttctgaaacagtattcccagcatggtctagatgggaaaaaggggggctctaacctcattcctctggaagggagagatgacatgctggacgtggagaccgatgcctacatccactgcgtcagtgccttcgtcaagctggcgcagagcgagtaccagctgctggccgacatcatccccgagcaccaccagaagaagaccttcgactccctgatacaggatgccctggatgggctgatgcttgaaggggagaacatcgtgtctgctgcccggaaggccattgtgcgacacgacttctccacggtgctcaccgtcttccccatcctgcgacacctcaagcagaccaagcctgagtttgaccaggtgctccagggcacggctgccagcacaaagaacaagctgcctggcctcatcacatccatggagaccatcggtgccaaagcgctggaggacttcgcagacaacatcaagaatgacccggacaaggagtacaacatgccgaaggacggcaccgtacacgagctcaccagcaatgccatcctcttcctgcagcagcttttggacttccaggagacggcaggcgccatgctggcctcccaagagaccagctcttcggccaccagctacagctctgagttcagcaagcggctgctaagcacctatatctgtaaagtgctgggcaacctgcagttgaacttgctgagcaagtccaaggtgtacgaggacccagctctgagcgccatcttcctgcacaacaactacaattacatcctcaagtccctggagaagtctgaactgatccagctggtggcagtgacacagaagactgctgagcgctcctaccgggagcacattgagcagcagatccagacctaccagcgcagctggttaaaggtgactgattacatcgcagagaagaatctacctgtgttccagccgggagtcaagctccgggacaaggagcggcagattatcaaggagcgttttaagggcttcaatgatggcctcgaagaactgtgcaaaatccagaaggcctgggctattccagacacagagcagagggacaggattcgccaggcccagaagaccattgtcaaggagacctacggggcctttctacagaagtttggcagcgtgcccttcaccaagaacccggagaagtacatcaagtacggggtggagcaggtgggcgacatgatcgatcgccttttcgacacctctgcctgagcctgctgctagccctgcctggttccaccagactggcgtgtcattggacagataaaccagtgttagcttgcctctgggctgggtgagcttgaagtcctctgggacagagacctgtctccacgcctccgggagctgtgtccctgagccccctagtcctggctcctgctttttccccacagcccgtgttcccagccgaaccagcactctcccggaagcctggggtccctccacaccttggcttttatgaccctgatggcttctgaaacaggaaaagagagaaggaagacagaggcctgtgcccactgctgctccatgtgtaccaagagcagcagggcagaagggccctccctccagcctaggtcagaggtggggacagagaactcccctacagcccagagatgtggcagggctcagagaagcagccagagctcctggaggaaaggcagtcgggactgaccccctctcttaaaacacattcccgcccgcccacaggcctgaggtctgggacctttccctcccaggagtcccctaggtggctgggggaggcaggctcactggccattttccctagagtccagcacactgcaggaggcgttcggaggaggagttccgccccaccctctacagccttcctcaggcccctgtctctggcccccagcctcagtgcctcttggcccagggccaggcagtcgtggttgcagaaggagcaattaggctgcctgcctgtgggctgggagacagggacaatggggaaaagttaaggagcaaaatgggggttggaagcaaaaaatagggccccacctatttaggacgagattgaagactgacccttgaggcacacttgcactggagatgggtttatttcacgctctgtgcttgtgtgctagcggagggagagctcagggtggcttaatccagaggccctgtcatggcccgcccccagccatgggaaagcaaacttcatcctaaggtgtgcagcccaggccctgcccctttacagtctaggccgcctgccatggggtgcagcctctccaggggctgcgtcagacttgcacgctgcccacatccagattcctgcaaagacgaattgggtgcacagcaccccaaccacatacacgaggaagaagatgcggtcagcagtctcaggccagcttctctgtgacccctttactcctctggagggctctgtggggagagatacagggaaaggagctgttcttcaaggtcccctcaacatgagcggaagagcgaaccccaggggtcatcagcctgtatcgcttcctttcttagattctcagctgatgaaaatttgggtctggcccatttcaggccatcttcagttgaagaaacaccctcttaggctgtgcaaggcatgggttatcaggggattgaggtcacctgggacttcagggaggctcagcttgctccctgccccagacctgtttcttctaagggaggaggacatggtggagaccagggacaggagagccagcagggtggatgcaaggggcctctacccacacctggacctccgtgccctcaccccagccctaggtgtgcacctaggcctcattccttaccccccagcccctgcccaccttcagcaggatgaggccctgggttgccgtgctctcgctgttcccctctcggggctgggctggggccgctcttggccccaaggttgccccgggccagcagcccagccagcagcacagtctctatggtgctgaggaagagcagcagcagcaggatggtgaagtagtaaactgggggaggcagggcacagggagatgctcaggggccagtccctgtgtctctggtgcccagcgagctgagcaccagtgggtgaccggggagaaacagggcagactgggtaagggagcagggcttactgagcagtgggttgcaggaggaggagctgggcagggcctgcaccagggaggagtggaggacgaggtaactcagcagcaatgtcaccttgtagcctatgcgctcaatggcccggaggggcagcaaccccccgcacacgtcagccaacagcagtgcctctgcaggcaccaagagagcgatgatggacttgagcgccgtgttcttcagcctcagctggaaggggaaaagtcagggccttcccggcgggggggaaggaggtgggcatcgggggcatggggcctggcctctggccgtgcatcctcactcccacccgcctccagcagccctctgtcggcctcctcccgacttgactcaccgtcacctggaagcagggcaccagctgctggggtgggacttgggtcttcagatcataaactacgtattccctcttgacactcacaatctcgttcaccacgtgggcctggaactctaactccatcgctgaggggtgggaatgagaactatgaaccaggaaggagagatcccagctgccaagtctgggggtagcagactggagcccaggggtgatggagacttttgatggcttttggcagggacagacttggacacaaaaccgatccatagaagggcttcccaaaccttgttttgcaacatcccaaattgtctccagttgaaggaaggcctttatcagattcatagatgagctttcattgtaaaaataaatgtactttgcaccacttcatgatggaggg

SEQ ID NO: 1588 - DNA, 4687 bp, Homo sapiens
ggaagtgggtgtgacggggacgggggcccggtgggcccgcggaggaaagatactggggagtgggagccgcggggttcagagcgatgattcccccacaggaggcatccgctcgacggcgggagattgaggacaagctgaagcaggaggaggagactctgtccttcatccgagacagcctggagaagagcgaccagctcactaagaacatggtgtctatcttatcatcctttgagagccgccttatgaagctggagaactccatcatccctgtgcacaagcagacggagaatctgcagcggctgcaggagaatgttgagaagacgctgtcctgcctggaccatgtcatcagctactaccatgtggccagtgacactgagaagatcatcagagagggccccacaggtaggctggaagagtacctgggaagcatggccaagattcagaaggcagtggagtatttccaggacaacagcccagacagcccggaactcaacaaagtgaaactgctctttgagcgcgggaaggaggccctggagtccgaatttcgcagcctgatgacgcggcacagtaaggtcgtctcgcccgtgctcatcttggatctgatcagtggtgacgatgatctggaggcccaggaggacgtgaccctggagcacctgcccgagagcgtgctccaggatgtcattcgcatctcccgctggctggtggaatatggccgcaaccaagatttcatgaacgtctactaccagatacgctccagccagctggaccgctccatcaaaggactgaaggagcatttccataagagcagttcttcctctggggttccctactcccctgctatccccaacaagaggaaagacacacctaccaagaagccagtcaagcggccagggagagatgacatgctggacgtggagaccgatgcctacatccactgcgtcagtgccttcgtcaagctggcgcagagcgagtaccagctgctggccgacatcatccccgagcaccaccagaagaagaccttcgactccctgatacaggatgccctggatgggctgatgcttgaaggggagaacatcgtgtctgctgcccggaaggccattgtgcgacacgacttctccacggtgctcaccgtcttccccatcctgcgacacctcaagcagaccaagcctgagtttgaccaggtgctccagggcacggctgccagcacaaagaacaagctgcctggcctcatcacatccatggagaccatcggtgccaaagcgctggaggacttcgcagacaacatcaagaatgacccggacaaggagtacaacatgccgaaggacggcaccgtacacgagctcaccagcaatgccatcctcttcctgcagcagcttttggacttccaggagacggcaggcgccatgctggcctcccaagagaccagctcttcggccaccagctacagctctgagttcagcaagcggctgctaagcacctatatctgtaaagtgctgggcaacctgcagttgaacttgctgagcaagtccaaggtgtacgaggacccagctctgagcgccatcttcctgcacaacaactacaattacatcctcaagtccctggagaagtctgaactgatccagctggtggcagtgacacagaagactgctgagcgctcctaccgggagcacattgagcagcagatccagacctaccagcgcagctggttaaaggtgactgattacatcgcagagaagaatctacctgtgttccagccgggagtcaagctccgggacaaggagcggcagattatcaaggagcgttttaagggcttcaatgatggcctcgaagaactgtgcaaaatccagaaggcctgggctattccagacacagagcagagggacaggattcgccaggcccagaagaccattgtcaaggagacctacggggcctttctacagaagtttggcagcgtgcccttcaccaagaacccggagaagtacatcaagtacggggtggagcaggtgggcgacatgatcgatcgccttttcgacacctctgcctgagcctgctgctagccctgcctggttccaccagactggcgtgtcattggacagataaaccagtgttagcttgcctctgggctgggtgagcttgaagtcctctgggacagagacctgtctccacgcctccgggagctgtgtccctgagccccctagtcctggctcctgctttttccccacagcccgtgttcccagccgaaccagcactctcccggaagcctggggtccctccacaccttggcttttatgaccctgatggcttctgaaacaggaaaagagagaaggaagacagaggcctgtgcccactgctgctccatgtgtaccaagagcagcagggcagaagggccctccctccagcctaggtcagaggtggggacagagaactcccctacagcccagagatgtggcagggctcagagaagcagccagagctcctggaggaaaggcagtcgggactgaccccctctcttaaaacacattcccgcccgcccacaggcctgaggtctgggacctttccctcccaggagtcccctaggtggctgggggaggcaggctcactggccattttccctagagtccagcacactgcaggaggcgttcggaggaggagttccgccccaccctctacagccttcctcaggcccctgtctctggcccccagcctcagtgcctcttggcccagggccaggcagtcgtggttgcagaaggagcaattaggctgcctgcctgtgggctgggagacagggacaatggggaaaagttaaggagcaaaatgggggttggaagcaaaaaatagggccccacctatttaggacgagattgaagactgacccttgaggcacacttgcactggagatgggtttatttcacgctctgtgcttgtgtgctagcggagggagagctcagggtggcttaatccagaggccctgtcatggcccgcccccagccatgggaaagcaaacttcatcctaaggtgtgcagcccaggccctgcccctttacagtctaggccgcctgccatggggtgcagcctctccaggggctgcgtcagacttgcacgctgcccacatccagattcctgcaaagacgaattgggtgcacagcaccccaaccacatacacgaggaagaagatgcggtcagcagtctcaggccagcttctctgtgacccctttactcctctggagggctctgtggggagagatacagggaaaggagctgttcttcaaggtcccctcaacatgagcggaagagcgaaccccaggggtcatcagcctgtatcgcttcctttcttagattctcagctgatgaaaatttgggtctggcccatttcaggccatcttcagttgaagaaacaccctcttaggctgtgcaaggcatgggttatcaggggattgaggtcacctgggacttcagggaggctcagcttgctccctgccccagacctgtttcttctaagggaggaggacatggtggagaccagggacaggagagccagcagggtggatgcaaggggcctctacccacacctggacctccgtgccctcaccccagccctaggtgtgcacctaggcctcattccttaccccccagcccctgcccaccttcagcaggatgaggccctgggttgccgtgctctcgctgttcccctctcggggctgggctggggccgctcttggccccaaggttgccccgggccagcagcccagccagcagcacagtctctatggtgctgaggaagagcagcagcagcaggatggtgaagtagtaaactgggggaggcagggcacagggagatgctcaggggccagtccctgtgtctctggtgcccagcgagctgagcaccagtgggtgaccggggagaaacagggcagactgggtaagggagcagggcttactgagcagtgggttgcaggaggaggagctgggcagggcctgcaccagggaggagtggaggacgaggtaactcagcagcaatgtcaccttgtagcctatgcgctcaatggcccggaggggcagcaaccccccgcacacgtcagccaacagcagtgcctctgcaggcaccaagagagcgatgatggacttgagcgccgtgttcttcagcctcagctggaaggggaaaagtcagggccttcccggcgggggggaaggaggtgggcatcgggggcatggggcctggcctctggccgtgcatcctcactcccacccgcctccagcagccctctgtcggcctcctcccgacttgactcaccgtcacctggaagcagggcaccagctgctggggtgggacttgggtcttcagatcataaactacgtattccctcttgacactcacaatctcgttcaccacgtgggcctggaactctaactccatcgctgaggggtgggaatgagaactatgaaccaggaaggagagatcccagctgccaagtctgggggtagcagactggagcccaggggtgatggagacttttgatggcttttggcagggacagacttggacacaaaaccgatccatagaagggcttcccaaaccttgttttgcaacatcccaaattgtctccagttgaaggaaggcctttatcagattcatagatgagctttcattgtaaaaataaatgtactttgcaccacttcatgatggaggg

SEQ ID NO: 1589 - DNA, 3188 bp, Homo sapiens
atgatggaggagcgagcggccgccgcggtcgccgccgccgcctcctcctgccgtccgctcggctcaggcgcgggccctggccccactggggcggccccggtctccgcccctgcccccgggccgggcccggcaggtaagggaggcggcggcggaggcagccccgggcccacggcgggcccggagcccctgagcctgccggggatcctgcactttatccagcacgagtgggcgcgcttcgaagccgagaaagcccgctgggaggccgagcgcgccgagttacaggctcaggtggccttccttcagggagagaggaaagggcaggagaatctaaagacggacctggtgcggcggatcaagatgctagagtatgcgctgaagcaggaaagggccaaatatcataaactgaagtttgggacagacctgaaccagggggagaagaaagcagatgtgtcagaacaagtctccaatggccccgtggaatcggtcaccctggagaacagcccgttggtgtggaaggaggggcggcagcttctccgacagtacctggaagaggtgggctacacagacaccatcctcgacatgcggtccaagcgcgtccgttccctgctgggccgctcgctggagctcaacggggcagtggagccgagtgaaggggcccccagggctccaccaggccctgcagggctcagtggtggggagtcgctgctggtgaaacagatcgaggagcagataaagaggaacgcggcaggcaaagatggcaaagagcgcttgggcggctcagtgctggggcagatccccttcctgcagaactgcgaggacgaagacagcgacgaggacgatgagctggacagcgtgcagcacaagaagcagcgtgtgaagctcccatccaaggctctggtgcccgaaatggaagacgaggatgaggaagacgactctgaggatgctatcaatgagtttgatttcctgggctcaggagaggatggggaaggggctccagaccctcggcggtgcactgtggatgggagcccccatgagctggaaagccgtcgggtcaaactccaaggcgttctggctgacctgcgggatgtggatgggctgcccccaaaagtgactggcccgcctcctggcacaccccagccccggccacatgaagacgtcttcatcatggacactatcgggggcggggaggtgagcctgggggacttggcagatctcaccgtcaccaacgacaacgacctcagctgcgatctgtctgacagcaaagatgcttttaagaagacgtggaaccccaagttcaccctgcgctcgcactacgacggcattcgttccctggccttccaccacagccagtcggctctgctcaccgcctccgaggacggcacgctcaagctctggaacctgcagaaggcggtcacggccaagaagaatgcggcgctagatgtggaacctatacatgctttccgggctcacaggggcccagtgttggctgtggctatgggcagcaacagtgaatactgctacagtggcggggcagatgcctgcatccatagttggaagattccagacctcagcatggatccctatgatggctacgacccaagcgtgctgagccacgtcctggagggccacggggacgccgtgtggggcctggccttcagtcccacctcccagcgcctggcctcctgttctgctgatggcaccgtccgcatctgggaccccagcagcagcagcccggcctgcctctgcaccttccccacagccagcgagcacggggtccccacctcagtggccttcaccagcaccgagcctgcccacatcgtggcctccttccgctctggcgacaccgtcttgtatgacatggaggttggcagtgccctcctcacgctggagtcccggggcagcagcggtccaacccagatcaaccaagtggtgagtcatccaaaccagcctctcaccatcaccgcccacgacgacaggggcatccgcttcctggacaatcggacaggtaagccggtgcactccatggttgcacacctggacgcagtcacctgcctagccgtggaccccaacggcgcattcctgatgtcaggaagccatgactgctccctgcgtctctggagcctggacaacaaaacgtgcgtgcaggagatcacggcccaccgcaagaagcacgaggaggccatccacgctgttgcctgccaccccagcaaggccctcattgccagtgctggcgctgatgccctggccaaggtcttcgtatgatgcccacctggccctgccctggccgccacgctggctggggtgtagggccgggcaggtggggctgaggggactcccagcctcgctggaggtgcagaggcctggcctctgtctgtttgccatggagcctggtggtgctaacggccctttccccaggaatccctccccaacggctgccttccccaagcatccagcctggggatgggcccctttcaggaatcacccccgaggatggcctcggggtttccccctgtgccctgacagccgctcctggtatcagagctgctttccagagggcagcacagccagggccgggtgtctttagggatcagtttttccaagactccagaaggtgccaggttctccccttgagctcctgctcccccatcccccatcctcccagacctgggcaggagctgtgctgggagaaagggtggcagccgggagcctcagagctgagccccggcctggctgcccctcccctccggccctctccactgctttccagacactaaccaaggcttccaggccagggattgcccaacactcctagggcagccctcccagcgccccatggggtcgcccatgggtagagacggctttcttgtgcccctccctggggcatggagggtggagtgggcctcgggtccccctgaactccctgtatatctgtataaataacgggattttcatggcgccgccccacccgcattatcactgtgtgatggtctcagtcagtctcctccctgtctccactctttccctctatttatttcactctcttgtttggttctaccctgcaccctcggtccccttccaggttcctgtttataagccccaacccctctgtccccatcttgtatgtgaaaacttgtctcaataaaccctttggagtaaaaaaaaaaaaaaaaaaaaaaaaaaaaaaaaaa

SEQ ID NO: 1590 - DNA, 2730 bp, Homo sapiens
gcggtgcgctcgcgccggaccggaaagccggggaagtggccgaggagggagggctgcgagccatggcgaccaagacggcgggcgtggggcggtgggaggtagtgaagaagggtcggcggcctggggtcggcgccggcgccggcggccgaggaggcggcaggaaccgcagggcgctcggggaagcaaacggagtgtggaaatacgacctgacccctgcaatccagaccacaagcaccctttatgagcggggctttgagaatatcatgaagcggcagaataaggagcaggtcccaccccctgctgtggaacctaagaaaccagggaacaagaagcagccaaagaaggtggcaactcctcacaaccaaaaccagaagcagggccgcttccgcagcctggaggaagcactgaaagctctggatgtggcagacctgcagaaggaactggacaagagccagagtgtgttctctggaaaccaatccatatggttgaaggacctggccagctatctcaactacaagctacaagctcctctaagtgaacccacgctgagccagcatactcatgattatccctacagcctggtgagccgggagctacgtgggatcatacgagggctgctggcgaaggcagcggggtctctggagctcttttttgaccactgtctgttcaccatgttgcaagagctggataagacaccaggggagtcactacatggttaccgcatctgtatccaggccatcctgcaagacaagcccaagattgccacggcaaacctaggcaagttcctggaactgctgaggtcccaccagagccgaccagcaaagtgtctcaccatcatgtgggccctgggtcaagcaggttttgccaacctcaccgagggactgaaagtgtggctggggatcatgctgcctgtgctgggcatcaagtctctgtctccctttgccatcacatacctggatcggctgctcctgatgcatcccaaccttaccaagggcttcggcatgattggccccaaggacttcttcccacttctggactttgcctatatgccaaacaactccctgacacccagcctgcaggagcagctgtgtcagctctacccccgactgaaagtgctggcatttggagcaaagccggattccaccctgcatacctacttcccttctttcctgtccagagccacccctagctgtccccctgagatgaagaaagagctcctgagcagcctgactgagtgcctgacggtggaccccctcagtgccagcgtctggaggcagctgtaccctaagcacctgtcacagtccagccttctgctggagcacttgctcagctcctgggagcagattcccaagaaggtacagaagtctttgcaagaaaccattcagtccctcaagcttaccaaccaggagctgctgaggaagggtagcagtaacaaccaggatgtcgtcacctgtgacatggcctgcaagggcctgttgcagcaggttcagggtcctcggctgccctggacgcggctcctcctgttgctgctggtcttcgctgtaggcttcctgtgccatgacctccggtcacacagctccttccaggcctcccttactggccggttgcttcgatcatctggcttcttacctgctagccaacaagcgtgtgccaagctctactcctacagtctgcaaggctacagctggctgggggagacactgccgctctggggctcccacctgctcaccgtggtgcggcccagcttgcagctggcctgggctcacaccaatgccacagtcagcttcctttctgcccactgtgcctctcaccttgcgtggtttggtgacagtctcaccagtctctctcagaggctacagatccagctccccgattccgtgaatcagctactccgctatctgagagagctgcccctgcttttccaccagaatgtgctgctgccactgtggcacctcttgcttgaggccctggcctgggcccaggagcactgccatgaggcatgcagaggtgaggtgacctgggactgcatgaagacacagctcagtgaggctgtccactggacctggctttgcctacaggacattacagtggctttcttggactgggcacttgccctgatatcccagcagtaggccctgccttcctggccactgatttctgcatgggtagaccatccaagactgcagcgggtagaaggtggcagttcttcatgggagtctttttaacttggtgcctgagttctctcctagactttagcagcctcctgttgcaattcttggtcacagctctagccacagcagaaggaaaggggcttccagaagaatatagcaccgcattgggaaacagcagcctcacctccacctgaagcctgggtttggctgtcagtggacatggggagctggatggaaatgcctctcacttcaaaatgcccagcctgccccaaatgcctctaagcccctccctgtcccctcccttgtagtcctacttcttccaactttccattccccatcatgctgggggtcttggtcacaaggctcagcttctctccactgtccatccctcctatcatctgtagagcagagcacaggcagttgtgtgccttgggcccagggaaccctccatcaacctgagacaggactcagtatatggttcttgggtatgccctaccaggtggaataaaggacacagatttgatttctaaaaaaaaaaaaaaagaaaaaaaaaaaaaaa

SEQ ID NO: 1591 - DNA, 3770 bp, Homo sapiens
cggacgcgtgggctgctgggcccggtggccgcaaaagaactttctttctcccgcccgaacggtcgccgcggccaactgcctcgcccgcctggcagcctaaccctccttctcttcttctcctctccggcttcgcgcggccctgcctccctctcgcccggcggcatccgcttgctgctgccaccgcctcctcatcttctgcccggccaaccggcctgccccgctgcagtgatgtgcgacaaggagttcatgtgggccctgaaaaacggagacttggatgaggtgaaagactatgtggccaagggagaagatgtcaaccggacactagaaggtggaaggaaacctcttcattatgcagcagattgtgggcagcttgaaatcctggaatttctgctgctgaaaggagcagatattaatgctccagataaacatcatattactcctcttctgtctgctgtctatgagggtcatgtttcctgtgtgaaattgcttctgtcaaagggtgctgataagactgtgaaaggcccagatggactgaccgcctttgaagccactgacaaccaggcaatcaaagctcttctccagtgatggatggatggactgataactccggaagaatgactctcctgtggcctcacactgctgcctgtctgtctgtcactctctatctgccagcttcttcagctaaatactttaagaggggtgaggggagagagaaattcataacaaatccgactaccagaaaaaaaaaattgttttggaggaggggcaaaaggaaccatgatcaggcttttactgggattcctgatcaagtaagcctcttccctttctaataaaatatacaccttatacccaagggagagcaaagacaaaatacaccagtaacatttgaccttttcagctccctagctaatttattagattgtgttgaaggtctgattctacaaaggccaactctacatatttggtagccctaactgtctgagcagtagtggctgctgtgatgtaaacttagggtgctgagataagcaattagctctagccttctgccttaagaatgcactctactggggatttcctggcatagttaagagcgctgcctataaggttggtgaccaaatctttcctcggtgactttaagctttatgtgaaagcttagttaaggtgaggaggggcacactcctaaattgctggatgactgaactttggattttctctcccctttcacatggatttcatgtctctttagataaaactgactagttttatttataaaatcttaagttttggaagtctaaaggagaaaccattccagtatgcatatttttttctcctctagattcatacatttatatagcattgaaacactttcaaactcctgctggtagtaaaaggggatttaaaaatagaatcatagccataagcctgttagtatcatatgaagagagaacagttatcttagtacctatggattttctttatttgctgtttgaatggattgaccttggttatgtgttgagaattaaggaacattctttgaaatgcctctctcagacccatcttggaggctgattacttactgcaccaaagctatcactggggtgagatttactgtttggacaaatttagccccatcccttcaaaaatacacttgtaaccaggtttcccagagttgttgataggcttctgctgaacatatgccaacccacctgcataatatatttttgttgcttttataaatcatgcattacataaagtgtgacaacttcaaaatgtattctctgttcttggaatacagtgccctaaaatggtgttcttatgacctgcagaaaatatttacacatatttccaaatatttatttcatgagcagtacagctaattaaaatatataagcttaaattttatatcttacatttaaaatattaagattcctttgacttgccatccatataagcttgctaaaaatattaagaccaagtcatgcaataattgaatgtacctcaaatttttaggggagggtgggttagggactgatactcagattgtggataataattgaattggtttttaaaggcaacatagcattctacagcagggttaatctattatcaagaacagtcaccctggttaataacaagttttactgatcagttgctggttggttggttggttggcatgtgggtgtgtgggtgtataggtgtgtgtgggtgtgtgtgtgtatttttccccatgagtcctttttttaatcctgtggctttttcacttacaactagcctaaccctgtaattttcctacatccaagaaaacaatcacaaagtagtggtttaaatactttgttgtatttggctaattttgctgtcttaatgcagcctattaagagttgggttaaaaatcagtaatcagtactttattacatcactgaactaaaatatggagacatcctcattgaaaatggagggcactctatcagtctataactatcaacgtagtgcaacagggtgttttgatacctttgttttcacctcttgacataatgctatttaaaggcttgaatttttccctttatataattttcacctttactttcaaagtgttttgttgtagttggctattgcagagagtgcattgtcctatcattcctaaacctggtctgctttctacattcatggtatggaaaccatgtgattctttgtacagtttatcctgatgttgcttgtaatgcagtagaggctatttcgccttcgcttttctttctcgacctttttgtaaaccctataattatgaagcgattgcttgagaaaataacatataaacatagaatagaatagactgaccaagatggttcacagtttctttttttaactaggttatttataatgtatttctgaaccacttggcagacaaattcacaacacttaatgttcatattttgagtaaaggaagctaaaaccatgtttgctttctggtactacatgcattagcgaaaggttaagtaagttttgttctccactgaagtaatacttaacatctcagaaaaaattttgcatgttctgtagttttgtattaaatcagtcatttcatatgcactatatcaagtacaaacaggtagtttacctgtttatagtagtgtactaacaaagtctcccttgcagcttcagactgttatctataggcttatcgttcaaatacagcacttgaatatcccaagtagttcttctacgcatagctcacctttctaaacccagttaagcatggaagagaggtagtaggtaggtgcagtgtgtggaagctgcaaacaagtaggccttttattcattgatatcttttcccaagtactggattttaaatctgtatgtatctgtttgatttttttttctaatatttcagttgagctgctgttttcttccatgcaatattgtatactcaattgtgtatagaagaagctggtgagagtgccctcctacataaataagcaattgcagtgttttgcatgcaaaatataaaaaatttaaattgtcctgattctattttgtaaatggagaaacaatcatatctttctaagcggtaatggaggaagactagtgctttgtgcattttgatatatttgagttcattttttccacaatgtcatacttttgacgcagttgggtttctcataagtatcctagttcatgtacatccgaatgctaaataatactgtgttttaagttttgtgttgcaagaacaaatggaataaacttgaattgtgctacgaaaaaaaaaaaaaaaaaaa

SEQ ID NO: 1592 - DNA, 3955 bp, Homo sapiens
tctccgcgtcccccccaccccggccagatccctttcccagtcctgcttcccagtgcctcgggccagggaatcctggcctccgcctgcggagccggcggaacccgcttcccgcctccacggggcagcgccagcggcctggtcctttcaccggcagctccgtgccgacgctctcaccgctcttcctatcgccgggagtggcgggccgaccagggggcggccgggctaccgtccgccattcccgtgtctctgcgcccgcgggggccgcccgagccggccaccatgccgctgggcctgaagcccacctgcagcgtatgcaagaccacgtcgtcctccatgtggaagaagggagcgcagggggagatcctctgccatcattgcactggccggggcggcgcgggcagcgggggcgcaggctcgggggcggctggagggactgggggcagcggcggcggcggcttcggcgcggcgaccttcgccagcacctccgccacccctccgcagagcaacgggggcgggggcggcaagcagagtaagcaggaaattcacaggaggtctgctcggctcagaaacactaaatacaaatctgctccggctgctgaaaagaaagtctccaccaaaggaaaagggagaagacatatatttaaattgaaaaatcccatcaaagctcctgagtcagtttccactataatcactgcagaatcaatcttctacaagggagtatattaccaaattggtgatgttgtttctgtgattgatgaacaagatggaaagccctactatgctcaaatcagaggttttatccaggaccagtattgcgagaagagtgcagcactgacgtggctcattcctaccctctctagccccagagaccaatttgatcccgcctcctatatcatagggccagaggaagatcttccaaggaagatggaatacttggaatttgtttgtcatgcaccttctgagtatttcaagtcacggtcatcaccatttcccacagttcccaccagaccagagaagggctacatatggactcatgttgggcctactcctgcaataacaattaaggaatcagttgccaaccatttgtagttcacaaattaaaactgggtttccaggcctggtgtggtggctcacgcctgtagccccagctattgcaccactgctctccaagctgggcaatggagtcagattctctttcttaaaaaaccacaaaaaaactggatttccagttctctaatattcttagtaccacaagatatgtcataggtatctttaaatgaaattcttagctggaaaagtgactaaaaagtttttctcctgctacctagtaataaacaaatcattgtttattactggtcacttagaaaattaaaagggatagggccaggcacagtggcttatgcctgtaattgcagcacttttagaggccgaggcaggcggatcacctgaggtcgggaagtggatcgcctgaggtcaggagttcgagaccagcctggccaacatggcgaaaccccgtcgctactaaaaatacaaaaattagccaggtgtggtggcatgtgcctgtaatcccagctatttgggaggctgaggcaggagaatcgcctaaacccaggaggtggaggttgtagtgagccaagattgcaccgctgtgctccagcctgggcaacagagtgagactcttgtctcggaaaaaaaaaaaaaaaaaaaaggctgggcacagtggctcacgcctttaatcccagcactttgggaggctgaggcagatggatcgcctgaggttgggagttcgagaccagcctggccagcatggtgaaaccctgtctctactaaaaatacaaaaattagccaggtgtggtggcgcacacctgtagtcccagctactcgggaggctgaggcaggagaattggttgaacccaggaggcggaggttgcagtgagcagagatcgtgccactgcactccagcctgggtggacagagcaagactccgtctcaaagaaacaaacaaaaaattaaaagggatagaatataatgaaatatattttgaacttaaattatattctatatgtgtatcttcctaggcaaaagctgtaatttccagagagaccattaggaacaggtagtatctatttttctccattatttatttctagaaactcataaaatggattgtatttttctataagaacaaaatattaattaaggtatagatgactgaccaagggcttaatcaaataaaatgactaacagcatctatcataaagccacacaagccttatgttctcatctcaaaaatgctgtgacagctttttggctgctttaaccataagaaaaatgattggtggatgattttattagcccaggcttttaaaaactttcatctaggccacgtgcggtggctcatgcctgtaatcccggcactttgggaggcctgagtggatggatcacttgaggtcaggagttcaggaccagcctggccaacatgatgaaaccctgtctctactaaatatacaaaaattagttgggtgttatggtgcatgcctgtaatcccagctactcgggaggctgaggcaggagaattgcttgaactcgggaggtggagattgcagtaagccgagatcgtgccactgcactccagcctgggtgatagagcaagactgtctcaaaaaagaaaaaaaagaaaaaattttaatttaatccttctgtagaaacaggcattcagaaccattccattgatcttaataaagctgctctttactgtttctagtcaaaaatgagacttcgatcaaaccataagattttatactgcagatagtcagcttcaccaaagccgcagaggaaacatgtcgagatcaggcttcctgcttgatagtctcttgactaccattaaaacgaatattgggaggtcatgaaagtcattggtaggccattagcattgatatctttaaaacatctaccctaaaccatctgctatggacccataataagaggcctgttgtatatgaaattgtctagaattcaggtgcaggtctttgccggttaagtaagggagcaacacgtaaaatgggagaggagtggggtgtactcacttgcctcctcttttgtcctgatttaaccagcatttttcaaccctgggaaaatttgcagaatctaagttgattgtaatgattttgagctgcagcagctttaactcttaccctttttccacatagttatggtgtttgagttggaaagaaacaactataggtagctacacgtacataattatctctttattcacaaagggtatagtaaaattgattgtaaataactttctaagtgccaatattcaaaacttttggattaaaatgtatttttcaccgtgcatttactttggatgtatttatttcatttaaacaatttaaatggggctctttaaccaaaaatggtatttaaaaccaaaacagtatcgtacttagaatttggagtagaggccgggcacagtggctcacgcctgtaatcccagcactttggaaggctgaggcaggcggatcacctgaggtcaggagttcgagaccagcctggtcaacatgaaaccccgtctctactaaaaatacaaaaattagctgggcgtggtggcgtgcgcctataatcccagctagtctactcgggaggctgaggcaggagaatcgctggaactcaggaggcagagactgcagtgagccgagatcgcgccactgcactccagtctgggtgacggcatgactccatctccaaaaaaaaaaaaaaaagattttggagtagattcatcattaataagtaacagattttaggaaaatcaaaaaatggctaataaaatgaacacaatgtaaaacatttattaaaatgtagacttttaaaaatctataaattgatcatctgtttataaattggcagatggttgtgtaccatcttttaaaataaagattgaatttcaccc

SEQ ID NO: 1593 - DNA, 11197 bp, Homo sapiens
aatgaaagaactagaacttttatgttcaatgaaggaagtctcctttgatgggaatgatcttgaaaacatggtcctatcactgagggagaagttcctacaagaagtgaattctcttattcagaaaccctcacacccactggctaaaacaaagacgttagtgaagagtttaatgaaccgagccgagctgttgctgcatgtcaccatcgcagcccagtcgggcctcacgagaagcatctctgggacccctgctgaaacaccagcttgtaaatcagcttctgaaacaaaagtgatatctcacgctgtcaggcagcctgtttttcttcgcagcatgtcagctccttctgacctggaaatgattggtaatgaagatttggaatttactagagcaaatcagaggcgtcgccacgtgaccagccaccgcagcagctcctttacactcctgcagtcgctggccattgaggacagcagggacaagcccacctacagtgtcctgctagggcagctgtttgctttcatcggcaccaaccctgaccaagctgtgtccagcagcagtttccttttggctgcacagacaaggtggcggcggggaaacactcgcaagcaggcactggtgcacatgcgggaattgctgacagctgccgtacgagtcgggggagtgacgcatcttgtgggtccagtgacgatggtccttcagggaggacccagaattgaagaactcacatgtggtgggatggtcgagcaggtccaggaagcctttggcgagaccatgacctctgttgtgtctctgtgtgctcgttaccctatcgcttgcgcaaatagcattggactcttatgtaccataccttacaccaggagcgaagagaagtgcctggtacgcagtggccttgtgcagctcatggatcgactgtgtagcttgagcaatcagaccgagtccagctccagtgagaaacagaccaagaagcagaaggtggccaccatggcctgggctgccttccaggtgcttgccaaccgctgtgttgagtgggaaaaagaggaaggtggctccacagaggctgtgcactcaggtctggcccggcaggtgtccagccttctcactaaccatcttgcccgagccacagagtgctgtggcaaccaggctgctgggaatgacgcgctccaggatgtccttagtcttctcaatgatctctcaaggagccacataggtaaagccatcctgagccagccagcttgtgtgtccaaactcctctccctgctgcttgaccaacgcccgtctccaaagctagtccttattattctccagctgtgccgggcggcgctgcccctgatgagcgtagaagactgtggaaacgtggagctcccaccctggagctactctgtcccctccttaaacagtgagcaggaggatcccagcgacccagcttccaagatcgcctccctgctcttagcaaagctggcagattatgtggttccaggatgtcagacagttctttctccaaccgcttctgaacctgacaccacattgacaaaaaccagtcccaagaattccttgaaaggagataaagatcctggagaagagagtgaggctgtggatggcaagctctcgatatttatccacaagcgggaagaccagtcatcccatgaagtcctccagccattgctaagtagttcagaaggacggcccttccgacttggtactggcgccaacatggagaaagttgtgaagatggatcgagacatgaccaagggtggctgttgcgaagtgattacagaagaggctgcagccgccctgcggaaagccaccaagtgggcacagtcaggcctcatcgtcagcattgggccacctgtagagtctatcaacccagagactgtgagtggactatccacaggcgacaaaaagaaaactgcccaaacttccatttgccgagagaggaactcggagcttgcaaggactgatcctgtgcgtcccttcatcagtgggcatgtggcaaacagcatggctgcagaagtgatcgccttgctacatagcttgctcatggcacctgaatcaaatgctgctcaaatatggaccacaacagcagagaaggttctgtctagagcactgatgtacattccacaattggggaaatacgcagaaagcattctggaaaatggcagcagcagtggcaggaaacttgccaaacttcagagaattgcacgccaggccgttgccgcactgtgtgcacttggaggcttcaaagagacaatcaagataggatccgaggttcaggttttaggtagaggaatttcaggaagcattggagtagtggcttctatcaatgaacaggaaggtatagctacagtcagattcccacccatagactgtagaaagacttcgcaagcgtcagacacattgactattccattgtctagactttgtgttccaagatcagaggcattgcctcttcataaactgtccattactgagaaggtagtacaggcagtccagtccatgttgcttcctcaggagggaagtctctctattcacacctcacttcctgcaacaggagatgggtcagctcctgtgatggcagtcgttcggctccttgctgaaataaggacaagagcatgcctggtcatggcccagcttttagaagacagcttattttgtgaagaattcatacaacaatgtccagcagctgttgaagttcttaacctagtagcccaggaatgtagtgctggagagcgacttgcagttgtggaggtacagtgtgaacggctgaggatgctctaccgggactgtgctcggcccccaccacctcctttgcaggctgaccgaagacagcccaaagagattacttggagcccctcgcgagtgtttccgcctgttcgagcctgcatgttctcatctcaccttacctcagtcaccttcctggctgaccccagcgctgggggaggcctgccccggggcacttttatctatgccacttcaccactgccagttcaggccccgtctttttactgggaaattgaaatcgtttcctatggagacaccgatgatgacaccggacccatagtttcctttggcttcactacagaagcagagaagcgagatggggcttggactaatccagtgggcacttgtcttttccataacaacggccgagccgtgcactataatggctccagtttgttacagtggaagagcgttcgcttagacgtgactctctcccccggtgacgtggcaggaattggctgggagagaactgaggggactccacctcctccgggacagccagccaagggccgggtgtacttcacatactgcgggcagcgcctctcaccatatcttgaagacgtctctggtggcatgtggccagtggttcacattcagaaaaagaacaccaaaacccgagctaactttggctcccggccgtttgcctacgcggaagggcaggcccaccgcaatgctgctgacctgtgcactgacctagcagaagagatcagcgctaactttgaggccctgcctttcgccatggcatctgacagtgacaatgatgctggcaccagtattgcatcagacccaggcactcatgggccaccatgccggattgctgccgtggccaccgctcagcaacaatatgatagtgacacctcctgtcattataaagtcgagctcagctatgagaatttcatcacctctggcccagaccctcacccgcctcccattgcagatgatgaaagcgatgatgatgacgatgatgacatccctcaggaggaccactacgccctgctggtgaaagcatgggagaccaaggtttttcctaccatccgaagacgcttccgcaatgaagcagagcggaaatcgggcctggaccagataaagggggccttacaactaggtatggtggatattgcccgacagacggttgaatttctctacgaagagaatggtggcatcccaagagacctttatcttcccaccattgaagacattaaagacgaagcaaacaagttcacaattgataaagttcgaaaaggtctcacagtagtaacccgctctccagacagcaataatgtagccagcagtgctgttggaactgctctgccaaaatttgccatccgagggatgctgaaaacctttgggcttcatggagtcgtcttagatgttgattcagtgaatgaactggtgcaggtagaaacgtacctccgcagtgaaggtgtgctggtgcgatactggtatcctattgacatgttggaaaggcccccagcaggctaccgaaggactgccaccaatgggctggtcacactggacaataccaaccttcaaattcacagggagctgctgcgctgcgaggctgcgctggccaggctgtactgccgcatggccctgctcaatatcttcgccccgaagttgcctcacttgttcactcgcctcttccacatccctgccatccgggacattaccctggagcacctgcaactgctgtccaatcagctcctcgcacctcctctcccagacggcaccatcagctccagctcgatcctcctggcgcagtctttacagcattgcatccattcccagaactgctccgccacggacctcttttaccagggcaactcccagacagtgagagagtggctcaacgtggccatcacccggaccctgcaccagggcgaggagagccttttagagctgacgaaacagatctgctctttcctgcagacagcaccagagcagttcccctccgaagagttcccaatttccgaatccaaagtcaacatggacgtgaatttccccggggcagcttttgttgttgtgtcttgtaaagaaagtcaatctggattccgcaaagactcctctctgtacaaggcaccgtgggcacgggtgctcgtatatggcctcggccacaaagtgaagcgaaatggccagctgaacctcatcgaggccgcctgttacccgcgggacgcgtccccagccaacactgggcttgcacctccccccaccgctgaccagtacccctctgtggtcctctccacagacagggtccacatcaaactgggggtgtctccacctcctggagcagtcctggtgttacattccctgcccctggagttcccactggctatggccttcgcagagcagctgctgtcctggaaatcagaggacagtgaagggaagtccgaagatgagcctgacaccattccgacatccgtcctcctgcaggtggtggagctgctaggaaacttcttgtggaccacggacatggcagcctgcgtgaaggagcttgttttccatctcctggcagagctcctgcgcacggtgcacaccctggagcagaggcggcaccccgctggcctgtcctcctcaatcgccctccagctgaacccctgcctggccatgctgatggccttgcagtcggagctccacaagctgtacgacgaggagacgcagaactgggtctcaggcggcgcctgcgggggctccgggggggcggcggccggtgaccagggcaggttctctacgtattttcatgcactcatggaagggtgcctggctgtggccgaagtgaccctgcctactaacatgagtgtcacagccagtggggtgacctcagcgaccgccccaaatctcagtgactcgtcctcctcctcctcgtcctccccaggacagaccccacagagtcccagcctcctctccaagaggaaaaaagtcaagatgaagcgggaaaaggcctcctcgtcgggcaagcgccagtcttcccgcaccgtggactcggaccccaccgtgctcagcatcggaggcagcaagcccgaggacatgctgtggttccaccgcgcactcaccctgctcatcatcctccgccacctcaccaggaaggacccacaggggctgggcgtgacgagtgacgccatcgccgatgcctgccaggccctggtgggccccaccgcccacagccgcttgctggtgatctccgggatccccacccacctggacgagggcgtagtcagaggcgccatccgcaaggcctgcaacgcccacggcggggtcttcaaagacgagatctacatcccgctgcaggaagaagacaccaagaagccaaaagacaaggccgagggcggggacgggaaagttgagcccgagaagacactggccttccccggcacagacagcatggaggtcagcacgtccagcagcctgacccccgccatgagcatcagcgcctccgcctccaccagccaggcctccatctgcagctcgcagggcatctcccaaaccgtcagcgacctctctgtggatccgctgcctgccggcctcgagctgcccatccctccgggcctgttggagccccacgcggtgtccagccaggaaagcctggacatttccctgtgcagcaccggcagcctgggcagcctgggcagcctgggggagcccctggacaatgcagagacggcctcggtgtcggacatgggctccatgtacacagtcacttccctggacaaccagcccctcgccgcccgccccatcaaaggcttcgcagtcgtggagataagatcccgagccaaaattgagaaaattcgagcaagtttatttaacaataatgacttgattggtttgtcaagtttggatggtgaagatgaattgatggaaatgtcaacagaagagattctaaccgtgtctgtagtaaatcagagtctctttgatactcaagggagcccagggttagaagattatttcaatgataagtcaattaaaggggagaagctggtgcccggagccagagaggttctgacggagatatttaagagttgtgcccattcagagcagacgctgagcctgacaccagcgaagcccatcagagtctctgacatttatcttagcaaagagcagatcaactcccagaccccaggcaacctcctccacctcttcttcaccaatgtccggccgccaaaaaaggtgctggaggatcagctcacccagatcctgaggaagtatggcgtgccaaagcccaagtttgacaagagcaagtacagcaaggccgggaaggagcagcaccccgtgaaggtggtgagcaccaagcggcctatcaccaagccgcccgccaaggacaaggctgtgctcaacagcgtcagcaggactgccttaagtgagaagaagccaactgtgaagccaaaatcaccagaaaagagcaaaccagatgaaaaggacccagaaaagtcacctaccaaaaaacaagaagtccctgaggaaaaatacctgacgctggaaggatttcacaaatttgttattgaccgagccaggcaagatatccgtagcgtctggagggcgatcttgtcctgtggttacgatcttcactttgagaggtgcgcatgcatcgatgtccgacatgcacagaaggcctcaagaaagtggaccctggagatggacgtggcacttgtgcagtacatcaaccagctatgccgccacctcgccatcacacccgcacggctccatccccatgaggtgtacctggaccccgcggatgctgctgaccccagagtggcctgtctcctgaacgtgcccatcgagagcctgcgcctgcgcttcgccttgctgcagtccctcaacaccacactggagaccttcttcctgcccctggtggagctgcgccagacacccatgtatacccacagcatcgccgccctgctgaaggaggccaaagggctgatcttctatgacacgaaggtgaccgtgatgaatcgagtgctgaatgccactgtgcagaggacagcggaccacgcggcccctgagatcaccttggacccactggaaattgtgggaggggaaatcagagcttctgaaaactcctacttctgtcaggctgccaggcagctggcctcagtgccgtcgtctcagctctgcgtcaagctggccagtggcggtgaccccacatatgccttcaacatccgcttcactggcgaggaggtccatggcaccagcggctctttccgccacttcctgtggcaggtgtgtaaggagctgcagagttcctcgctgtcgctgctgctgctgtgccccagctcagctgtcaataagaacaagggcaagtatatcctgaccccgagccccatcacctacggggaggagcagctgctgcacttcctggggcagctgctggggattgcaattcgggcagacgtcccgctgcccctggacctcctgccctccttctggaagacgctggtgggcgagcccttggaccctgagcaagacctgcaggaagcggatatcctcacctacaattacgtcaagaagtttgagagcatcaatgatgagaccgagctggaggccctgtgcgctgagatcgcctcccagcacctggccacggagagccctgacagccccaacaagccctgctgcaggttcacctacctgaccatgacgggcgaggaggtggagctgtgcagccggggccggcacatccttgtggcgtgggagaacaaggacatctacgcggcagccatccggagcctgcggctgcgggagctgcagaatgtggagtgcgtgacggccgtgcgggccggcctgggctccatcatccccctgcagctgctgaccatgctcagcccactggagatggagctgcgcacctgcggcctcccctacatcaacctcgagttcctcaaggcccacaccatgtaccaagtggggctgatggagacggaccagcacatcgagttcttctggggggccctggagatgttcacccaggaggagctgtgcaagttcatcaagtttgcctgcaaccaggagcgcatcccgttcacctgcccctgcaaagatgggggtcccgacactgcccatgtgcccccgtaccccatgaagatcgcccccccagatggcacagcaggttccccagactctcgctacatccgcgtggagacctgcatgttcatgatcaagcttccccagtactcctctctggaaatcatgctggagaaacttcgttgtgccattcactaccgtgaagaccccctcagtggctgatgggagggagccccagaattaggctgtcactgaggcacccactctgctggcttgggaagccaccactgcggcccgtccctccagggccctgcgtgaggagttggcaacattttgcttttccaaactttcgtccacattccagggcctcctggaagacttaaccttttgtctttgtacgtttcgtgatgggttggttcttttgctgcctgtttgtggtctatttgtaggatagtttagttcccagacagtttgtgtctaatttgatcttcttggacattgtccctcatggccaccagattctaatgccataaggccccagctggttccccatcacagaaccacccagcaggaagccgggggtacaatgacctcggccacacagagcgctcgtgctttcagcagagcgcctccacagacaagcctgtggccagccctgccctccagcctcgagctggagttgctccagaggcagccccagcaggcctccctccacatagaggtggctgggccaattgcccaaacacgtgagacacacagggagctttatgtgttcatcttcctgctttagaacttgctcccggtcttggtttttctgaggaaaagcccacagtggttcccctgcccctcccatacctccctatctgccgtctgtctctttgggccctggtctgacagttttcatctgaggcctcctcgggagcaggagacttaagggttcatcccgaccttagttcacagagcctagctgggtgcatcccagccgcagggggtgagaagacacccagagatgggggacaatgctcaggtgggggcctcctccgagactctggttgagaggaaagcacatgattcaagcctaccccacaaaaaaggagcacaaaatgctcagaaatggcccttcctccctgcagtgacgtaggacaagggaaagggccacacccattttcaaaagagtggactgaggtgctctgctcaatttggggtctgctttagtgacccagacactcaagtccagatggagactccaggggggtccttctgcccctctggccagccccacccagcactccccatcaccccatgtaagtgtgtatgccagggctgagctgcctccaggctcacccactgcatctttgccccaaataggtctttgtccagtggtactttgttcatgagcagcacaggccatcttgttggacactgtcactttgggccttgccaggtctcacagaatcacatcgctgtatttattgtataatattgtgaatattggaagttttgagtgagtgctgtctagaaggttttggagtgtggatgctggtccaagaaagaagatgtgccctggcctgctggaaagattgtgaattctagagatagagccgttagcatccatctcctccctgtaactcttaggaaatgcatcaaggaccattatagaaaggatcccctgacctaaggatgaaatcgacctagggttaatcatgacagctgcatcagttgtattggatgcaagtcaactctggaggtgagtgcccgcaagcagttcccctgctttgaaagaagatggtcagcccgctgcctccccagcggccacagctcctttgagtgtggggggtcacagccaggatgtattcctgacaataaggatccttttattttcatttctgcataatgaaagagcctttcgatttattagaagtggtttttcctccctacatctttaaattcttggttctctttagtcctcatcccttgaatggacttgtcagctacctccccaggaggagttcagaagcttctgttggccatcacttgagtagatgacaagctgtaaggtatctgctgctaacgtggctgcttctccgagagcacattgaggtccagacagatccaaaccttggccctaaaaaatgtgtgctgtaaagttacttgatgtatatttattataattatttatggttgcatttaacaaacttttcattcaatctgatgctatttacaccatgctgtgtaaaggaagctcactaaaggaaaaaagtcacaccaataaataaccttcatctaattttgatttaccttaagagttgtgtgatcatctactcttgctgagcaagttcaaaggctggcatgcttggatggctctgatatttaagtgctgccaagtggctaggaattaaagtgtttctaattatt

SEQ ID NO: 1594 - DNA, 8061 bp, Homo sapiens
aatgaaagaactagaacttttatgttcaatgaaggaagtctcctttgatgggaatgatcttgaaaacatggtcctatcactgagggagaagttcctacaagaagtgaattctcttattcagaaaccctcacacccactggctaaaacaaagacgttagtgaagagtttaatgaaccgagccgagctgttgctgcatgtcaccatcgcagcccagtcgggcctcacgagaagcatctctgggacccctgctgaaacaccagcttgtaaatcagcttctgaaacaaaagtgatatctcacgctgtcaggcagcctgtttttcttcgcagcatgtcagctccttctgacctggaaatgattggtaatgaagatttggaatttactagagcaaatcagaggcgtcgccacgtgaccagccaccgcagcagctcctttacactcctgcagtcgctggccattgaggacagcagggacaagcccacctacagtgtcctgctagggcagctgtttgctttcatcggcaccaaccctgaccaagctgtgtccagcagcagtttccttttggctgcacagacaaggtggcggcggggaaacactcgcaagcaggcactggtgcacatgcgggaattgctgacagctgccgtacgagtcgggggagtgacgcatcttgtgggtccagtgacgatggtccttcagggaggacccagaattgaagaactcacatgtggtgggatggtcgagcaggtccaggaagcctttggcgagaccatgacctctgttgtgtctctgtgtgctcgttaccctatcgcttgcgcaaatagcattggactcttatgtaccataccttacaccaggagcgaagagaagtgcctggtacgcagtggccttgtgcagctcatggatcgactgtgtagcttgagcaatcagaccgagtccagctccagtgagaaacagaccaagaagcagaaggtggccaccatggcctgggctgccttccaggtgcttgccaaccgctgtgttgagtgggaaaaagaggaaggtggctccacagaggctgtgcactcaggtctggcccggcaggtgtccagccttctcactaaccatcttgcccgagccacagagtgctgtggcaaccaggctgctgggaatgacgcgctccaggatgtccttagtcttctcaatgatctctcaaggagccacataggtaaagccatcctgagccagccagcttgtgtgtccaaactcctctccctgctgcttgaccaacgcccgtctccaaagctagtccttattattctccagctgtgccgggcggcgctgcccctgatgagcgtagaagactgtggaaacgtggagctcccaccctggagctactctgtcccctccttaaacagtgagcaggaggatcccagcgacccagcttccaagatcgcctccctgctcttagcaaagctggcagattatgtggttccaggatgtcagacagttctttctccaaccgcttctgaacctgacaccacattgacaaaaaccagtcccaagaattccttgaaaggagataaagatcctggagaagagagtgaggctgtggatggcaagctctcgatatttatccacaagcgggaagaccagtcatcccatgaagtcctccagccattgctaagtagttcagaaggacggcccttccgacttggtactggcgccaacatggagaaagttgtgaagatggatcgagacatgaccaagggtggctgttgcgaagtgattacagaagaggctgcagccgccctgcggaaagccaccaagtgggcacagtcaggcctcatcgtcagcattgggccacctgtagagtctatcaacccagagactgtgagtggactatccacaggcgacaaaaagaaaactgcccaaacttccatttgccgagagaggaactcggagcttgcaaggactgatcctgtgcgtcccttcatcagtgggcatgtggcaaacagcatggctgcagaagtgatcgccttgctacatagcttgctcatggcacctgaatcaaatgctgctcaaatatggaccacaacagcagagaaggttctgtctagagcactgatgtacattccacaattggggaaatacgcagaaagcattctggaaaatggcagcagcagtggcaggaaacttgccaaacttcagagaattgcacgccaggccgttgccgcactgtgtgcacttggaggcttcaaagagacaatcaagataggatccgaggttcaggttttaggtagaggaatttcaggaagcattggagtagtggcttctatcaatgaacaggaaggtatagctacagtcagattcccacccatagactgtagaaagacttcgcaagcgtcagacacattgactattccattgtctagactttgtgttccaagatcagaggcattgcctcttcataaactgtccattactgagaaggtagtacaggcagtccagtccatgttgcttcctcaggagggaagtctctctattcacacctcacttcctgcaacaggagatgggtcagctcctgtgatggcagtcgttcggctccttgctgaaataaggacaagagcatgcctggtcatggcccagcttttagaagacagcttattttgtgaagaattcatacaacaatgtccagcagctgttgaagttcttaacctagtagcccaggaatgtagtgctggagagcgacttgcagttgtggaggtacagtgtgaacggctgaggatgctctaccgggactgtgctcggcccccaccacctcctttgcaggctgaccgaagacagcccaaagagattacttggagcccctcgcgagtgtttccgcctgttcgagcctgcatgttctcatctcaccttacctcagtcaccttcctggctgaccccagcgctgggggaggcctgccccggggcacttttatctatgccacttcaccactgccagttcaggccccgtctttttactgggaaattgaaatcgtttcctatggagacaccgatgatgacaccggacccatagtttcctttggcttcactacagaagcagagaagcgagatggggcttggactaatccagtgggcacttgtcttttccataacaacggccgagccgtgcactataatggctccagtttgttacagtggaagagcgttcgcttagacgtgactctctcccccggtgacgtggcaggaattggctgggagagaactgaggggactccacctcctccgggacagccagccaagggccgggtgtacttcacatactgcgggcagcgcctctcaccatatcttgaagacgtctctggtggcatgtggccagtggttcacattcagaaaaagaacaccaaaacccgagctaactttggctcccggccgtttgcctacgcggaagggcaggcccaccgcaatgctgctgacctgtgcactgacctagcagaagagatcagcgctaactttgaggccctgcctttcgccatggcatctgacagtgacaatgatgctggcaccagtattgcatcagacccaggcactcatgggccaccatgccggattgctgccgtggccaccgctcagcaacaatatgatagtgacacctcctgtcattataaagtcgagctcagctatgagaatttcatcacctctggcccagaccctcacccgcctcccattgcagatgatgaaagcgatgatgatgacgatgatgacatccctcaggaggaccactacgccctgctggtgaaagcatgggagaccaaggtttttcctaccatccgaagacgcttccgcaatgaagcagagcggaaatcgggcctggaccagataaagggggccttacaactaggtatggtggatattgcccgacagacggttgaatttctctacgaagagaatggtggcatcccaagagacctttatcttcccaccattgaagacattaaagacgaagcaaacaagttcacaattgataaagttcgaaaaggtctcacagtagtaacccgctctccagacagcaataatgtagccagcagtgctgttggaactgctctgccaaaatttgccatccgagggatgctgaaaacctttgggcttcatggagtcgtcttagatgttgattcagtgaatgaactggtgcaggtagaaacgtacctccgcagtgaaggtgtgctggtgcgatactggtatcctattgacatgttggaaaggcccccagcaggctaccgaaggactgccaccaatgggctggtcacactggacaataccaaccttcaaattcacagggagctgctgcgctgcgaggctgcgctggccaggctgtactgccgcatggccctgctcaatatcttcgccccgaagttgcctcacttgttcactcgcctcttccacatccctgccatccgggacattaccctggagcacctgcaactgctgtccaatcagctcctcgcacctcctctcccagacggcaccatcagctccagctcgatcctcctggcgcagtctttacagcattgcatccattcccagaactgctccgccacggacctcttttaccagggcaactcccagacagtgagagagtggctcaacgtggccatcacccggaccctgcaccagggcgaggagagccttttagagctgacgaaacagatctgctctttcctgcagacagcaccagagcagttcccctccgaagagttcccaatttccgaatccaaagtcaacatggacgtgaatttccccggggcagcttttgttgttgtgtcttgtaaagaaagtcaatctggattccgcaaagactcctctctgtacaaggcaccgtgggcacgggtgctcgtatatggcctcggccacaaagtgaagcgaaatggccagctgaacctcatcgaggccgcctgttacccgcgggacgcgtccccagccaacactgggcttgcacctccccccaccgctgaccagtacccctctgtggtcctctccacagacagggtccacatcaaactgggggtgtctccacctcctggagcagtcctggtgttacattccctgcccctggagttcccactggctatggccttcgcagagcagctgctgtcctggaaatcagaggacagtgaagggaagtccgaagatgagcctgacaccattccgacatccgtcctcctgcaggtggtggagctgctaggaaacttcttgtggaccacggacatggcagcctgcgtgaaggagcttgttttccatctcctggcagagctcctgcgcacggtgcacaccctggagcagaggcggcaccccgctggcctgtcctcctcaatcgccctccagctgaacccctgcctggccatgctgatggccttgcagtcggagctccacaagctgtacgacgaggagacgcagaactgggtctcaggcggcgcctgcgggggctccgggggggcggcggccggtgaccagggcaggttctctacgtattttcatgcactcatggaagggtgcctggctgtggccgaagtgaccctgcctactaacatgagtgtcacagccagtggggtgacctcagcgaccgccccaaatctcagtgactcgtcctcctcctcctcgtcctccccaggacagaccccacagagtcccagcctcctctccaagaggaaaaaagtcaagatgaagcgggaaaaggcctcctcgtcgggcaagcgccagtcttcccgcaccgtggactcggaccccaccgtgctcagcatcggaggcagcaagcccgaggacatgctgtggttccaccgcgcactcaccctgctcatcatcctccgccacctcaccaggaaggacccacaggggctgggcgtgacgagtgacgccatcgccgatgcctgccaggccctggtgggccccaccgcccacagccgcttgctggtgatctccgggatccccacccacctggacgagggcgtagtcagaggcgccatccgcaaggcctgcaacgcccacggcggggtcttcaaagacgagatctacatcccgctgcaggaagaagacaccaagaagccaaaagacaaggccgagggcggggacgggaaagttgagcccgagaagacactggccttccccggcacagacagcatggaggtcagcacgtccagcagcctgacccccgccatgagcatcagcgcctccgcctccaccagccaggcctccatctgcagctcgcagggcatctcccaaaccgtcagcgacctctctgtggatccgctgcctgccggcctcgagctgcccatccctccgggcctgttggagccccacgcggtgtccagccaggaaagcctggacatttccctgtgcagcaccggcagcctgggcagcctgggcagcctgggggagcccctggacaatgcagagacggcctcggtgtcggacatgggctccatgtacacagtcacttccctggacaaccagcccctcgccgcccgccccatcaaaggcttcgcagtcgtggagataagatcccgagccaaaattgagaaaattcgagcaagtttatttaacaataatgacttgattggtttgtcaagtttggatggtgaagatgaattgatggaaatgtcaacagaagagattctaaccgtgtctgtagtaaatcagagtctctttgatactcaagggagcccagggttagaagattatttcaatgataagtcaattaaaggggagaagctggtgcccggagccagagaggttctgacggagatatttaagagttgtgcccattcagagcagacgctgagcctgacaccagcgaagcccatcagagtctctgacatttatcttagcaaagagcagatcaactcccagaccccaggcaacctcctccacctcttcttcaccaatgtccggccgccaaaaaaggtgctggaggatcagctcacccagatcctgaggaagtatggcgtgccaaagcccaagtttgacaagagcaagtacagcaaggccgggaaggagcagcaccccgtgaaggtggtgagcaccaagcggcctatcaccaagccgcccgccaaggacaaggctgtgctcaacagcgtcaggactgccttaagtgagaagaagccaactgtgaagccaaaatcaccagaaaagagcaaaccagatgaaaaggacccagaaaagtcacctaccaaaaaacaagaagtccctgaggaaaaatacctgacgctggaaggatttcacaaatttgttattgaccgagccaggcaagatatccgtagcgtctggagggcgatcttgtcctgtggttacgatcttcactttgagaggtgcgcatgcatcgatgtccgacatgcacagaaggcctcaagaaagtggaccctggagatggacgtggcacttgtgcagtacatcaaccagctatgccgccacctcgccatcacacccgcacggctccatccccatgaggtgtacctggaccccgcggatgctgctgaccccagagtggcctgtctcctgaacgtgcccatcgagagcctgcgcctgcgcttcgccttgctgcagtccctcaacaccacactggagaccttcttcctgcccctggtggagctgcgccagacacccatgtatacccacagcatcgccgccctgctgaaggaggccaaaggtcagtgcctgcacctgccctggccctgcaggaagagagaggtgacctgcaagacaccagggccagaatccacgggcagcgtccttgggcagccccgccaggaagatgccaccccacctcaacctttcatgtagcaggcagggctcctctggagcaacaggcccacccaagggaagttactttaattataaaagtaacatgctctgaaaaataaaattatttttaaggttttcaaattaattagaaatcatatatgaaggtctgtttactatctggcctccacatccctacatcccagaagtgacattgttaacagatgagtctctctccttccagacttttctcttgacatataaacagacacatgtgtgcacacacacagctt

SEQ ID NO: 1595 - DNA, 10664 bp, Homo sapiens
aatgaaagaactagaacttttatgttcaatgaaggaagtctcctttgatgggaatgatcttgaaaacatggtcctatcactgagggagaagttcctacaagaagtgaattctcttattcagaaaccctcacacccactggctaaaacaaagacgttagtgaagagtttaatgaaccgagccgagctgttgctgcatgtcaccatcgcagcccagtcgggcctcacgagaagcatctctgggacccctgctgaaacaccagcttgtaaatcagcttctgaaacaaaagtgatatctcacgctgtcaggcagcctgtttttcttcgcagcatgtcagctccttctgacctggaaatgattggtaatgaagatttggaatttactagagcaaatcagaggcgtcgccacgtgaccagccaccgcagcagctcctttacactcctgcagtcgctggccattgaggacagcagggacaagcccacctacagtgtcctgctagggcagctgtttgctttcatcggcaccaaccctgaccaagctgtgtccagcagcagtttccttttggctgcacagacaaggtggcggcggggaaacactcgcaagcaggcactggtgcacatgcgggaattgctgacagctgccgtacgagtcgggggagtgacgcatcttgtgggtccagtgacgatggtccttcagggaggacccagaattgaagaactcacatgtggtgggatggtcgagcaggtccaggaagcctttggcgagaccatgacctctgttgtgtctctgtgtgctcgttaccctatcgcttgcgcaaatagcattggactcttatgtaccataccttacaccaggagcgaagagaagtgcctggtacgcagtggccttgtgcagctcatggatcgactgtgtagcttgagcaatcagaccgagtccagctccagtgagaaacagaccaagaagcagaaggtggccaccatggcctgggctgccttccaggtgcttgccaaccgctgtgttgagtgggaaaaagaggaaggtggctccacagaggctgtgcactcaggtctggcccggcaggtgtccagccttctcactaaccatcttgcccgagccacagagtgctgtggcaaccaggctgctgggaatgacgcgctccaggatgtccttagtcttctcaatgatctctcaaggagccacataggtaaagccatcctgagccagccagcttgtgtgtccaaactcctctccctgctgcttgaccaacgcccgtctccaaagctagtccttattattctccagctgtgccgggcggcgctgcccctgatgagcgtagaagactgtggaaacgtggagctcccaccctggagctactctgtcccctccttaaacagtgagcaggaggatcccagcgacccagcttccaagatcgcctccctgctcttagcaaagctggcagattatgtggttccaggatgtcagacagttctttctccaaccgcttctgaacctgacaccacattgacaaaaaccagtcccaagaattccttgaaaggagataaagatcctggagaagagagtgaggctgtggatggcaagctctcgatatttatccacaagcgggaagaccagtcatcccatgaagtcctccagccattgctaagtagttcagaaggacggcccttccgacttggtactggcgccaacatggagaaagttgtgaagatggatcgagacatgaccaagggtggctgttgcgaagtgattacagaagaggctgcagccgccctgcggaaagccaccaagtgggcacagtcaggcctcatcgtcagcattgggccacctgtagagtctatcaacccagagactgtgagtggactatccacaggcgacaaaaagaaaactgcccaaacttccatttgccgagagaggaactcggagcttgcaaggactgatcctgtgcgtcccttcatcagtgggcatgtggcaaacagcatggctgcagaagtgatcgccttgctacatagcttgctcatggcacctgaatcaaatgctgctcaaatatggaccacaacagcagagaaggttctgtctagagcactgatgtacattccacaattggggaaatacgcagaaagcattctggaaaatggcagcagcagtggcaggaaacttgccaaacttcagagaattgcacgccaggccgttgccgcactgtgtgcacttggaggcttcaaagagacaatcaagataggatccgaggttcaggttttaggtagaggaatttcaggaagcattggagtagtggcttctatcaatgaacaggaaggtatagctacagtcagattcccacccatagactgtagaaagacttcgcaagcgtcagacacattgactattccattgtctagactttgtgttccaagatcagaggcattgcctcttcataaactgtccattactgagaaggtagtacaggcagtccagtccatgttgcttcctcaggagggaagtctctctattcacacctcacttcctgcaacaggagatgggtcagctcctgtgatggcagtcgttcggctccttgctgaaataaggacaagagcatgcctggtcatggcccagcttttagaagacagcttattttgtgaagaattcatacaacaatgtccagcagctgttgaagttcttaacctagtagcccaggaatgtagtgctggagagcgacttgcagttgtggaggtacagtgtgaacggctgaggatgctctaccgggactgtgctcggcccccaccacctcctttgcaggctgaccgaagacagcccaaagagattacttggagcccctcgcgagtgtttccgcctgttcgagcctgcatgttctcatctcaccttacctcagtcaccttcctggctgaccccagcgctgggggaggcctgccccggggcacttttatctatgccacttcaccactgccagttcaggccccgtctttttactgggaaattgaaatcgtttcctatggagacaccgatgatgacaccggacccatagtttcctttggcttcactacagaagcagagaagcgagatggggcttggactaatccagtgggcacttgtcttttccataacaacggccgagccgtgcactataatggctccagtttgttacagtggaagagcgttcgcttagacgtgactctctcccccggtgacgtggcaggaattggctgggagagaactgaggggactccacctcctccgggacagccagccaagggccgggtgtacttcacatactgcgggcagcgcctctcaccatatcttgaagacgtctctggtggcatgtggccagtggttcacattcagaaaaagaacaccaaaacccgagctaactttggctcccggccgtttgcctacgcggaagggcaggcccaccgcaatgctgctgacctgtgcactgacctagcagaagagatcagcgctaactttgaggccctgcctttcgccatggcatctgacagtgacaatgatgctggcaccagtattgcatcagacccaggcactcatgggccaccatgccggattgctgccgtggccaccgctcagcaacaatatgatagtgacacctcctgtcattataaagtcgagctcagctatgagaatttcatcacctctggcccagaccctcacccgcctcccattgcagatgatgaaagcgatgatgatgacgatgatgacatccctcaggaggaccactacgccctgctggtgaaagcatgggagaccaaggtttttcctaccatccgaagacgcttccgcaatgaagcagagcggaaatcgggcctggaccagataaagggggccttacaactaggtatggtggatattgcccgacagacggttgaatttctctacgaagagaatggtggcatcccaagagacctttatcttcccaccattgaagacattaaagacgaagcaaacaagttcacaattgataaagttcgaaaaggtctcacagtagtaacccgctctccagacagcaataatgtagccagcagtgctgttggaactgctctgccaaaatttgccatccgagggatgctgaaaacctttgggcttcatggagtcgtcttagatgttgattcagtgaatgaactggtgcaggtagaaacgtacctccgcagtgaaggtgtgctggtgcgatactggtatcctattgacatgttggaaaggcccccagcaggctaccgaaggactgccaccaatgggctggtcacactggacaataccaaccttcaaattcacagggagctgctgcgctgcgaggctgcgctggccaggctgtactgccgcatggccctgctcaatatcttcgccccgaagttgcctcacttgttcactcgcctcttccacatccctgccatccgggacattaccctggagcacctgcaactgctgtccaatcagctcctcgcacctcctctcccagacggcaccatcagctccagctcgatcctcctggcgcagtctttacagcattgcatccattcccagaactgctccgccacggacctcttttaccagggcaactcccagacagtgagagagtggctcaacgtggccatcacccggaccctgcaccagggcgaggagagccttttagagctgacgaaacagatctgctctttcctgcagacagcaccagagcagttcccctccgaagagttcccaatttccgaatccaaagtcaacatggacgtgaatttccccggggcagcttttgttgttgtgtcttgtaaagaaagtcaatctggattccgcaaagactcctctctgtacaaggcaccgtgggcacgggtgctcgtatatggcctcggccacaaagtgaagcgaaatggccagctgaacctcatcgaggccgcctgttacccgcgggacgcgtccccagccaacactgggcttgcacctccccccaccgctgaccagtacccctctgtggtcctctccacagacagggtccacatcaaactgggggtgtctccacctcctggagcagtcctggtgttacattccctgcccctggagttcccactggctatggccttcgcagagcagctgctgtcctggaaatcagaggacagtgaagggaagtccgaagatgagcctgacaccattccgacatccgtcctcctgcaggtggtggagctgctaggaaacttcttgtggaccacggacatggcagcctgcgtgaaggagcttgttttccatctcctggcagagctcctgcgcacggtgcacaccctggagcagaggcggcaccccgctggcctgtcctcctcaatcgccctccagctgaacccctgcctggccatgctgatggccttgcagtcggagctccacaagctgtacgacgaggagacgcagaactgggtctcaggcggcgcctgcgggggctccgggggggcggcggccggtgaccagggcaggttctctacgtattttcatgcactcatggaagggtgcctggctgtggccgaagtgaccctgcctactaacatgagtgtcacagccagtggggtgacctcagcgaccgccccaaatctcagtgactcgtcctcctcctcctcgtcctccccaggacagaccccacagagtcccagcctcctctccaagaggaaaaaagtcaagatgaagcgggaaaaggcctcctcgtcgggcaagcgccagtcttcccgcaccgtggactcggaccccaccgtgctcagcatcggaggcagcaagcccgaggacatgctgtggttccaccgcgcactcaccctgctcatcatcctccgccacctcaccaggaaggacccacaggggctgggcgtgacgagtgacgccatcgccgatgcctgccaggccctggtgggccccaccgcccacagccgcttgctggtgatctccgggatccccacccacctggacgagggcgtagtcagaggcgccatccgcaaggcctgcaacgcccacggcggggtcttcaaagacgagatctacatcccgctgcaggaagaagacaccaagaagccaaaagacaaggccgagggcggggacgggaaagttgagcccgagaagacactggccttccccggcacagacagcatggaggtcagcacgtccagcagcctgacccccgccatgagcatcagcgcctccgcctccaccagccaggcctccatctgcagctcgcagggcatctcccaaaccgtcagcgacctctctgtggatccgctgcctgccggcctcgagctgcccatccctccgggcctgttggagccccacgcggtgtccagccaggaaagcctggacatttccctgtgcagcaccggcagcctgggcagcctgggcagcctgggggagcccctggacaatgcagagacggcctcggtgtcggacatgggctccatgtacacagtcacttccctggacaaccagcccctcgccgcccgccccatcaaaggcttcgcagtcgtggagataagatcccgagccaaaattgagaaaattcgagcaagtttatttaacaataatgacttgattggtttgtcaagtttggatggtgaagatgaattgatggaaatgtcaacagaagagattctaaccgtgtctgtagtaaatcagagtctctttgatactcaagggagcccagggttagaagattatttcaatgataagtcaattaaaggggagaagctggtgcccggagccagagaggttctgacggagatatttaagagttgtgcccattcagagcagacgctgagcctgacaccagcgaagcccatcagagtctctgacatttatcttagcaaagagcagatcaactcccagaccccaggcaacctcctccacctcttcttcaccaatgtccggccgccaaaaaaggtgctggaggatcagctcacccagatcctgaggaagtatggcgtgccaaagcccaagtttgacaagagcaagtacagcaaggccgggaaggagcagcaccccgtgaaggtggtgagcaccaagcggcctatcaccaagccgcccgccaaggacaaggctgtgctcaacagcgtcaggactgccttaagtgagaagaagccaactgtgaagccaaaatcaccagaaaagagcaaaccagatgaaaaggacccagaaaagtcacctaccaaaaaacaagaagtccctgaggaaaaatacctgacgctggaaggatttcacaaatttgttattgaccgagccaggcaagatatccgtagcgtctggagggcgatcttgtcctgtggttacgatcttcactttgagaggtgcgcatgcatcgatgtccgacatgcacagaaggcctcaagaaagtggaccctggagatggacgtggcacttgtgcagtacatcaaccagctatgccgccacctcgccatcacacccgcacggctccatccccatgaggtgtacctggaccccgcggatgctgctgaccccagagtggcctgtctcctgaacgtgcccatcgagagcctgcgcctgcgcttcgccttgctgcagtccctcaacaccacactggagaccttcttcctgcccctggtggagctgcgccagacacccatgtatacccacagcatcgccgccctgctgaaggaggccaaagggctgatcttctatgacacgaaggtgaccgtgatgaatcgagtgctgaatgccactgtgcagaggacagcggaccacgcggcccctgagatcaccttggacccactggaaattgtgggaggggaaatcagagcttctgaaaactcctacttctgtcaggctgccaggcagctggcctcagtgccgtcgtctcagctctgcgtcaagctggccagtggcggtgaccccacatatgccttcaacatccgcttcactggcgaggaggtccatggcaccagcggctctttccgccacttcctgtggcaggtgtgtaaggagctgcagagttcctcgctgtcgctgctgctgctgtgccccagctcagctgtcaataagaacaagggcaagtatatcctgaccccgagccccatcacctacggggaggagcagctgctgcacttcctggggcagctgctggggattgcaattcgggcagacgtcccgctgcccctggacctcctgccctccttctggaagacgctggtgggcgagcccttggaccctgagcaagacctgcaggaagcggatatcctcacctacaattacgtcaagaagtttgagagcgtgagtgcaaggcacagttctggggggctgcagaacccggggcctccccgccaccttgcttaggcctccatgcagacccgagctccccgctgaggctgggttgggatcccacagaggaccttaggggtgtgagccatgtgccaggaaggcttatttcatggggacagaggcctctggcctccctccctgctggcagcagagattggaggtgacatgaccagccctgctggccctcccctcccacattggtgctcattgcctggccatgggcaagggctcctggagctgagtgaacaggcactgggagaacagctgtaggggtgaaggttaagagttttttcagggactcagagcacaggagtcagccctgggaccacctgaggtccaccaagggggaggcatcaggatggagcccttcctgcctgtccagggcatgcgtacgccacgcacagatgttgacagcatggtgctgttgcccagtgcccccctggagggagatggagtccacagtccttccgttcactcagtggccgtcactgaggcccagtcacgggccagccaggctctgggcactcgccctgtcctcagggagtgtccaggctcgtctccttcatgttggagggcggagggctttattccatcatcacaaggccaggaggaaagtgaggctcaccaaagggaggtgacttgcctgggccctcacagctggcagggagcagagccaccaggagcccagggctgcctgctctgacttccgggctctccagcaccacgtgccctacagctgagagagccatcctggctgagtgtggagggcaacgtcccacccagcgcccctcaaggccacgagagtggacgtcgtgcctgaggcccggcagaagctgctctctcctgggcctcaggtgaaggaggtgccagcggcttctgcctatgccggcagaatactccatggccgactgaggcactgcctggccaggtctctggtctctgccattgtccccctgggtcactcagggcagccattgcaagacaatagcagagccagagtcccggatgccagtggcttctcggtagaaacagggatgacaaggcattgtctaaagggtggaagaacacccacagtgggctgggggtttatgcgtctcctgcactcctccgaggagtcctcctggggctctgggtgcagcacaggctggggcagcaggggatgtgaggcggggtcccggtagacaggccagctgaggcttctggctacagggatggccaaggccccagagggtatgggatgcagaaccacatggtgttgtggggtgcatactaggaagaagtgctctcgacttgtatcagtggagtgtctgcggtgaaggggtagggaggttgctactaaggagactccaggcttagacccgaatgtccatccacctgtcactgtccccaagctgcagtcagtctcctttgggtccgaccctgtcgtctccctggtagcccagcaagcacagtgcgaatcagtttcccctggacgctgatcctggtcgccatatgtggggaggcgacagcctgtacacctccacagacaggactaagtcagggctgtctggtggcaagggacagaaatcccaactccaacaagctttagaaaaaaattgtttaaaatgagttgctcttaggccgggcgcggtggctcacgcctgtaatcccagcacttcgggaggccaaggtgggcagatcacgaggtcaggagattgagaccatcctggctaacacagtgaaaccccgtctctactaaaaatacaaaaaattagccaggcatggtggcgggcgcctgtagtcccagctacttgggaggctgaggcaggagaatggtgtgaactcgagaggcggagcttgcagtgagctgatatcgcgccactgcactccagcctgggcgacagagcaagacttcatctcaaaaaaaaaaaaaaaaaaaattagttgctcttaaaacaaaaagcatgatgggtttgacttcaggcagggccaaatccaggtgttcaaacagtatcatctggtattggtctcaggcctctgatccagattgctttaaaaaaaaaaaaagaaagaggacaggcgcggtggctcagctgtaatcccagcactttgggaggctgaggcgggtagatcacgaggtcaggagttcaagaccagcctggccaaggtggtgaaaccccgtctctactaaaaatacaaaaattagccaggcatggtggcgggtgcctgtaatcccagctactcgggagcctgaggcagagaattgcttgaacccaggaggcagaggttgcagtgagctgagattgcgccactgcactccagctgacagagcgagaatctgtctcaaaaaaaaaaaaaa

SEQ ID NO: 1596 - DNA, 1556 bp, Homo sapiens
ttgaggccctgcctttcgccatggcatctgacagtgacaatgatgctggcaccagtattgcatcagacccaggcactcatgggccaccatgccggattgctgccgtggccaccgctcagcaacaatatgatagtgacacctcctgtcattataaagtcgagctcagctatgagaatttcatcacctctggcccagaccctcacccgcctcccattgcagatgatgaaagcgatgatgatgacgatgatgacatccctcaggaggaccactacgccctgctggtgaaagcatgggagaccaaggtttttcctaccatccgaagacgcttccgcaatgaagcagagcggaaatcgggcctggaccagataaagggggccttacaactaggtatggtggatattgcccgacagacggttgaatttctctacgaagagaatggtggcatcccaagagacctttatcttcccaccattgaagacattaaagacgaagcaaacaagttcacaattgataaagttcgaaaaggtctcacagtagtaacccgctctccagacagcaataatgtagccagcagtgctgttggaactgctctgccaaaatttgccatccgagggatgctgaaaacctttgggcttcatggagtcgtcttagatgttgattcagtgaatgaactggtgcaggtagaaacgtacctccgcagtgaaggtgtgctggtgcgatactggtatcctattgacatgttggaaaggcccccagcaggctaccgaaggactgccaccaatgggctggtcacactggacaataccaaccttcaaattcacagggagctgctgcgctgcgaggctgcgctggccaggctgtactgccgcatggccctgctcaatatcttcgccccgaagttgcctcacttgttcactcgcctcttccacatccctgccatccgggacattaccctggagcacctgcaactgctgtccaatcagctcctcgcacctcctctcccagacggcaccatcagctccagctcgatcctcctggcgcagtctttacagcattgcatccattcccagaactgctccgccacggacctcttttaccagggcaactcccagacagtgagagagtggctcaacgtggccatcacccggaccctgcaccagggcgaggagagccttttagagctgacgaaacagatctgctctttcctgcaggtagaagtctaaagctcatgttcctgcagtgtggttaccatttttaactgggagtctcactggcttgctgaaaatgactcccctttcccttccaagtccctattcctctcgatttccttttcctagaagcttttctgctttatctcatctgtagcttgcttccttccagagggctatttagtcgtttggctgatttcctgggccatgtgagatgagaagatgaaatgctgtccctgtgtttagcccgtggctttccttattcagtgtctctttgcagacagcaccagagcagttcccctccgaagagttcccaatttccgaatccaaagtcaacatggacgtgaa

SEQ ID NO: 1597 - DNA, 9735 bp, Homo sapiens
aatgaaagaactagaacttttatgttcaatgaaggaagtctcctttgatgggaatgatcttgaaaacatggtcctatcactgagggagaagttcctacaagaagtgaattctcttattcagaaaccctcacacccactggctaaaacaaagacgttagtgaagagtttaatgaaccgagccgagctgttgctgcatgtcaccatcgcagcccagtcgggcctcacgagaagcatctctgggacccctgctgaaacaccagcttgtaaatcagcttctgaaacaaaagtgatatctcacgctgtcaggcagcctgtttttcttcgcagcatgtcagctccttctgacctggaaatgattggtaatgaagatttggaatttactagagcaaatcagaggcgtcgccacgtgaccagccaccgcagcagctcctttacactcctgcagtcgctggccattgaggacagcagggacaagcccacctacagtgtcctgctagggcagctgtttgctttcatcggcaccaaccctgaccaagctgtgtccagcagcagtttccttttggctgcacagacaaggtggcggcggggaaacactcgcaagcaggcactggtgcacatgcgggaattgctgacagctgccgtacgagtcgggggagtgacgcatcttgtgggtccagtgacgatggtccttcagggaggacccagaattgaagaactcacatgtggtgggatggtcgagcaggtccaggaagcctttggcgagaccatgacctctgttgtgtctctgtgtgctcgttaccctatcgcttgcgcaaatagcattggactcttatgtaccataccttacaccaggagcgaagagaagtgcctggtacgcagtggccttgtgcagctcatggatcgactgtgtagcttgagcaatcagaccgagtccagctccagtgagaaacagaccaagaagcagaaggtggccaccatggcctgggctgccttccaggtgcttgccaaccgctgtgttgagtgggaaaaagaggaaggtggctccacagaggctgtgcactcaggtctggcccggcaggtgtccagccttctcactaaccatcttgcccgagccacagagtgctgtggcaaccaggctgctgggaatgacgcgctccaggatgtccttagtcttctcaatgatctctcaaggagccacataggtaaagccatcctgagccagccagcttgtgtgtccaaactcctctccctgctgcttgaccaacgcccgtctccaaagctagtccttattattctccagctgtgccgggcggcgctgcccctgatgagcgtagaagactgtggaaacgtggagctcccaccctggagctactctgtcccctccttaaacagtgagcaggaggatcccagcgacccagcttccaagatcgcctccctgctcttagcaaagctggcagattatgtggttccaggatgtcagacagttctttctccaaccgcttctgaacctgacaccacattgacaaaaaccagtcccaagaattccttgaaaggagataaagatcctggagaagagagtgaggctgtggatggcaagctctcgatatttatccacaagcgggaagaccagtcatcccatgaagtcctccagccattgctaagtagttcagaaggacggcccttccgacttggtactggcgccaacatggagaaagttgtgaagatggatcgagacatgaccaagggtggctgttgcgaagtgattacagaagaggctgcagccgccctgcggaaagccaccaagtgggcacagtcaggcctcatcgtcagcattgggccacctgtagagtctatcaacccagagactgtgagtggactatccacaggcgacaaaaagaaaactgcccaaacttccatttgccgagagaggaactcggagcttgcaaggactgatcctgtgcgtcccttcatcagtgggcatgtggcaaacagcatggctgcagaagtgatcgccttgctacatagcttgctcatggcacctgaatcaaatgctgctcaaatatggaccacaacagcagagaaggttctgtctagagcactgatgtacattccacaattggggaaatacgcagaaagcattctggaaaatggcagcagcagtggcaggaaacttgccaaacttcagagaattgcacgccaggccgttgccgcactgtgtgcacttggaggcttcaaagagacaatcaagataggatccgaggttcaggttttaggtagaggaatttcaggaagcattggagtagtggcttctatcaatgaacaggaaggtatagctacagtcagattcccacccatagactgtagaaagacttcgcaagcgtcagacacattgactattccattgtctagactttgtgttccaagatcagaggcattgcctcttcataaactgtccattactgagaaggtagtacaggcagtccagtccatgttgcttcctcaggagggaagtctctctattcacacctcacttcctgcaacaggagatgggtcagctcctgtgatggcagtcgttcggctccttgctgaaataaggacaagagcatgcctggtcatggcccagcttttagaagacagcttattttgtgaagaattcatacaacaatgtccagcagctgttgaagttcttaacctagtagcccaggaatgtagtgctggagagcgacttgcagttgtggaggtacagtgtgaacggctgaggatgctctaccgggactgtgctcggcccccaccacctcctttgcaggctgaccgaagacagcccaaagagattacttggagcccctcgcgagtgtttccgcctgttcgagcctgcatgttctcatctcaccttacctcagtcaccttcctggctgaccccagcgctgggggaggcctgccccggggcacttttatctatgccacttcaccactgccagttcaggccccgtctttttactgggaaattgaaatcgtttcctatggagacaccgatgatgacaccggacccatagtttcctttggcttcactacagaagcagagaagcgagatggggcttggactaatccagtgggcacttgtcttttccataacaacggccgagccgtgcactataatggctccagtttgttacagtggaagagcgttcgcttagacgtgactctctcccccggtgacgtggcaggaattggctgggagagaactgaggggactccacctcctccgggacagccagccaagggccgggtgtacttcacatactgcgggcagcgcctctcaccatatcttgaagacgtctctggtggcatgtggccagtggttcacattcagaaaaagaacaccaaaacccgagctaactttggctcccggccgtttgcctacgcggaagggcaggcccaccgcaatgctgctgacctgtgcactgacctagcagaagagatcagcgctaactttgaggccctgcctttcgccatggcatctgacagtgacaatgatgctggcaccagtattgcatcagacccaggcactcatgggccaccatgccggattgctgccgtggccaccgctcagcaacaatatgatagtgacacctcctgtcattataaagtcgagctcagctatgagaatttcatcacctctggcccagaccctcacccgcctcccattgcagatgatgaaagcgatgatgatgacgatgatgacatccctcaggaggaccactacgccctgctggtgaaagcatgggagaccaaggtttttcctaccatccgaagacgcttccgcaatgaagcagagcggaaatcgggcctggaccagataaagggggccttacaactaggtatggtggatattgcccgacagacggttgaatttctctacgaagagaatggtggcatcccaagagacctttatcttcccaccattgaagacattaaagacgaagcaaacaagttcacaattgataaagttcgaaaaggtctcacagtagtaacccgctctccagacagcaataatgtagccagcagtgctgttggaactgctctgccaaaatttgccatccgagggatgctgaaaacctttgggcttcatggagtcgtcttagatgttgattcagtgaatgaactggtgcaggtagaaacgtacctccgcagtgaaggtgtgctggtgcgatactggtatcctattgacatgttggaaaggcccccagcaggctaccgaaggactgccaccaatgggctggtcacactggacaataccaaccttcaaattcacagggagctgctgcgctgcgaggctgcgctggccaggctgtactgccgcatggccctgctcaatatcttcgccccgaagttgcctcacttgttcactcgcctcttccacatccctgccatccgggacattaccctggagcacctgcaactgctgtccaatcagctcctcgcacctcctctcccagacggcaccatcagctccagctcgatcctcctggcgcagtctttacagcattgcatccattcccagaactgctccgccacggacctcttttaccagggcaactcccagacagtgagagagtggctcaacgtggccatcacccggaccctgcaccagggcgaggagagccttttagagctgacgaaacagatctgctctttcctgcagacagcaccagagcagttcccctccgaagagttcccaatttccgaatccaaagtcaacatggacgtgaatttccccggggcagcttttgttgttgtgtcttgtaaagaaagtcaatctggattccgcaaagactcctctctgtacaaggcaccgtgggcacgggtgctcgtatatggcctcggccacaaagtgaagcgaaatggccagctgaacctcatcgaggccgcctgttacccgcgggacgcgtccccagccaacactgggcttgcacctccccccaccgctgaccagtacccctctgtggtcctctccacagacagggtccacatcaaactgggggtgtctccacctcctggagcagtcctggtgttacattccctgcccctggagttcccactggctatggccttcgcagagcagctgctgtcctggaaatcagaggacagtgaagggaagtccgaagatgagcctgacaccattccgacatccgtcctcctgcaggtggtggagctgctaggaaacttcttgtggaccacggacatggcagcctgcgtgaaggagcttgttttccatctcctggcagagctcctgcgcacggtgcacaccctggagcagaggcggcaccccgctggcctgtcctcctcaatcgccctccagctgaacccctgcctggccatgctgatggccttgcagtcggagctccacaagctgtacgacgaggagacgcagaactgggtctcaggcggcgcctgcgggggctccgggggggcggcggccggtgaccagggcaggttctctacgtattttcatgcactcatggaagggtgcctggctgtggccgaagtgaccctgcctactaacatgagtgtcacagccagtggggtgacctcagcgaccgccccaaatctcagtgactcgtcctcctcctcctcgtcctccccaggacagaccccacagagtcccagcctcctctccaagaggaaaaaagtcaagatgaagcgggaaaaggcctcctcgtcgggcaagcgccagtcttcccgcaccgtggactcggaccccaccgtgctcagcatcggaggcagcaagcccgaggacatgctgtggttccaccgcgcactcaccctgctcatcatcctccgccacctcaccaggaaggacccacaggggctgggcgtgacgagtgacgccatcgccgatgcctgccaggccctggtgggccccaccgcccacagccgcttgctggtgatctccgggatccccacccacctggacgagggcgtagtcagaggcgccatccgcaaggcctgcaacgcccacggcggggtcttcaaagacgagatctacatcccgctgcaggaagaagacaccaagaagccaaaagacaaggccgagggcggggacgggaaagttgagcccgagaagacactggccttccccggcacagacagcatggaggtcagcacgtccagcagcctgacccccgccatgagcatcagcgcctccgcctccaccagccaggcctccatctgcagctcgcagggcatctcccaaaccgtcagcgacctctctgtggatccgctgcctgccggcctcgagctgcccatccctccgggcctgttggagccccacgcggtgtccagccaggaaagcctggacatttccctgtgcagcaccggcagcctgggcagcctgggcagcctgggggagcccctggacaatgcagagacggcctcggtgtcggacatgggctccatgtacacagtcacttccctggacaaccagcccctcgccgcccgccccatcaaaggcttcgcagtcgtggagataagatcccgagccaaaattgagaaaattcgagcaagtttatttaacaataatgacttgattggtttgtcaagtttggatggtgaagatgaattgatggaaatgtcaacagaagagattctaaccgtgtctgtagtaaatcagagtctctttgatactcaagggagcccagggttagaagattatttcaatgataagtcaattaaaggggagaagctggtgcccggagccagagaggttctgacggagatatttaagagttgtgcccattcagagcagacgctgagcctgacaccagcgaagcccatcagagtctctgacatttatcttagcaaagagcagatcaactcccagaccccaggcaacctcctccacctcttcttcaccaatgtccggccgccaaaaaaggtgctggaggatcagctcacccagatcctgaggaagtatggcgtgccaaagcccaagtttgacaagagcaagtacagcaaggccgggaaggagcagcaccccgtgaaggtggtgagcaccaagcggcctatcaccaagccgcccgccaaggacaaggctgtgctcaacagcgtcaggactgccttaagtgagaagaagccaactgtgaagccaaaatcaccagaaaagagcaaaccagatgaaaaggacccagaaaagtcacctaccaaaaaacaagaagtccctgaggaaaaatacctgacgctggaaggatttcacaaatttgttattgaccgagccaggcaagatatccgtagcgtctggagggcgatcttgtcctgtggttacgatcttcactttgagaggtgcgcatgcatcgatgtccgacatgcacagaaggcctcaagaaagtggaccctggagatggacgtggcacttgtgcagtacatcaaccagctatgccgccacctcgccatcacacccgcacggctccatccccatgaggtgtacctggaccccgcggatgctgctgaccccagagtggcctgtctcctgaacgtgcccatcgagagcctgcgcctgcgcttcgccttgctgcagtccctcaacaccacactggagaccttcttcctgcccctggtggagctgcgccagacacccatgtatacccacagcatcgccgccctgctgaaggaggccaaagggctgatcttctatgacacgaaggtgaccgtgatgaatcgagtgctgaatgccactgtgcagaggacagcggaccacgcggcccctgagatcaccttggacccactggaaattgtgggaggggaaatcagagcttctgaaaactcctacttctgtcaggctgccaggcagctggcctcagtgccgtcgtctcagctctgcgtcaagctggccagtggcggtgaccccacatatgccttcaacatccgcttcactggcgaggaggtccatggcaccagcggctctttccgccacttcctgtggcaggtgtgtaaggagctgcagagttcctcgctgtcgctgctgctgctgtgccccagctcagctgtcaataagaacaagggcaagtatatcctgaccccgagccccatcacctacggggaggagcagctgctgcacttcctggggcagctgctggggattgcaattcgggcagacgtcccgctgcccctggacctcctgccctccttctggaagacgctggtgggcgagcccttggaccctgagcaagacctgcaggaagcggatatcctcacctacaattacgtcaagaagtttgagagcatcaatgatgagaccgagctggaggccctgtgcgctgagatcgcctcccagcacctggccacggagagccctgacagccccaacaagccctgctgcaggttcacctacctgaccatgacgggcgaggaggtggagctgtgcagccggggccggcacatccttgtggcgtgggagaacaaggacatctacgcggcagccatccggagcctgcggctgcgggagctgcagaatgtggagtgcgtgacggccgtgcgggccggcctgggctccatcatccccctgcagctgctgaccatgctcagcccactggagatggagctgcgcacctgcggcctcccctacatcaacctcgagttcctcaaggcccacaccatgtaccaagtggggctgatggagacggaccagcacatcgagttcttctggggggccctggagatgttcacccaggaggagctgtgcaagttcatcaagtttgcctgcaaccaggagcgcatcccgttcacctgcccctgcaaagatgggggtcccgacactgcccatgtgcccccgtaccccatgaagatcgcccccccagatggcacagcaggttccccagactctcgctacatccgcgtggagacctgcatgttcatgatcaagcttccccagtactcctctctggaaatcatgctggagaaacttcgttgtgccattcactaccgtgaagaccccctcagtggctgatgggagggagccccagaattaggctgtcactgaggcacccactctgctggcttgggaagccaccactgcggcccgtccctccagggccctgcgtgaggagttggcaacattttgcttttccaaactttcgtccacattccagggcctcctggaagacttaaccttttgtctttgaaatgcatcaaggaccattatagaaaggatcccctgacctaaggatgaaatcgacctagggttaatcatgacagctgcatcagttgtattggatgcaagtcaactctggagtcctcatcccttgaatggacttgtcagctacctccccaggaggagttcagaagcttctgttggccatcacttgagtagatgacaagctgtaaggtatctgctgctaacgtggctgcttctccgagagcacattgaggtccagacagatccaaaccttggccctaaaaaatgtgtgctgtaaagttacttgatgtatatttattataattatttatggttgcatttaacaaacttttcattcaatctgatgctatttacaccatgctgtgtaaaggaagctcactaaaggaaaaaagtcacaccaataaataaccttcatctaattttgatttaccttaagagttgtgtgatcatctactcttgctgagcaagttcaaaggctggcatgcttggatggctctgatatttaagtgctgccaagtggctaggaattaaagtgtttctaatta

SEQ ID NO: 1598 - DNA, 10975 bp, Homo sapiens
aatgaaagaactagaacttttatgttcaatgaaggaagtctcctttgatgggaatgatcttgaaaacatggtcctatcactgagggagaagttcctacaagaagtgaattctcttattcagaaaccctcacacccactggctaaaacaaagacgttagtgaagagtttaatgaaccgagccgagctgttgctgcatgtcaccatcgcagcccagtcgggcctcacgagaagcatctctgggacccctgctgaaacaccagcttgtaaatcagcttctgaaacaaaagtgatatctcacgctgtcaggcagcctgtttttcttcgcagcatgtcagctccttctgacctggaaatgattggtaatgaagatttggaatttactagagcaaatcagaggcgtcgccacgtgaccagccaccgcagcagctcctttacactcctgcagtcgctggccattgaggacagcagggacaagcccacctacagtgtcctgctagggcagctgtttgctttcatcggcaccaaccctgaccaagctgtgtccagcagcagtttccttttggctgcacagacaaggtggcggcggggaaacactcgcaagcaggcactggtgcacatgcgggaattgctgacagctgccgtacgagtcgggggagtgacgcatcttgtgggtccagtgacgatggtccttcagggaggacccagaattgaagaactcacatgtggtgggatggtcgagcaggtccaggaagcctttggcgagaccatgacctctgttgtgtctctgtgtgctcgttaccctatcgcttgcgcaaatagcattggactcttatgtaccataccttacaccaggagcgaagagaagtgcctggtacgcagtggccttgtgcagctcatggatcgactgtgtagcttgagcaatcagaccgagtccagctccagtgagaaacagaccaagaagcagaaggtggccaccatggcctgggctgccttccaggtgcttgccaaccgctgtgttgagtgggaaaaagaggaaggtggctccacagaggctgtgcactcaggtctggcccggcaggtgtccagccttctcactaaccatcttgcccgagccacagagtgctgtggcaaccaggctgctgggaatgacgcgctccaggatgtccttagtcttctcaatgatctctcaaggagccacataggtaaagccatcctgagccagccagcttgtgtgtccaaactcctctccctgctgcttgaccaacgcccgtctccaaagctagtccttattattctccagctgtgccgggcggcgctgcccctgatgagcgtagaagactgtggaaacgtggagctcccaccctggagctactctgtcccctccttaaacagtgagcaggaggatcccagcgacccagcttccaagatcgcctccctgctcttagcaaagctggcagattatgtggttccaggatgtcagacagttctttctccaaccgcttctgaacctgacaccacattgacaaaaaccagtcccaagaattccttgaaaggagataaagatcctggagaagagagtgaggctgtggatggcaagctctcgatatttatccacaagcgggaagaccagtcatcccatgaagtcctccagccattgctaagtagttcagaaggacggcccttccgacttggtactggcgccaacatggagaaagttgtgaagatggatcgagacatgaccaagggtggctgttgcgaagtgattacagaagaggctgcagccgccctgcggaaagccaccaagtgggcacagtcaggcctcatcgtcagcattgggccacctgtagagtctatcaacccagagactgtgagtggactatccacaggcgacaaaaagaaaactgcccaaacttccatttgccgagagaggaactcggagcttgcaaggactgatcctgtgcgtcccttcatcagtgggcatgtggcaaacagcatggctgcagaagtgatcgccttgctacatagcttgctcatggcacctgaatcaaatgctgctcaaatatggaccacaacagcagagaaggttctgtctagagcactgatgtacattccacaattggggaaatacgcagaaagcattctggaaaatggcagcagcagtggcaggaaacttgccaaacttcagagaattgcacgccaggccgttgccgcactgtgtgcacttggaggcttcaaagagacaatcaagataggatccgaggttcaggttttaggtagaggaatttcaggaagcattggagtagtggcttctatcaatgaacaggaaggtatagctacagtcagattcccacccatagactgtagaaagacttcgcaagcgtcagacacattgactattccattgtctagactttgtgttccaagatcagaggcattgcctcttcataaactgtccattactgagaaggtagtacaggcagtccagtccatgttgcttcctcaggagggaagtctctctattcacacctcacttcctgcaacaggagatgggtcagctcctgtgatggcagtcgttcggctccttgctgaaataaggacaagagcatgcctggtcatggcccagcttttagaagacagcttattttgtgaagaattcatacaacaatgtccagcagctgttgaagttcttaacctagtagcccaggaatgtagtgctggagagcgacttgcagttgtggaggtacagtgtgaacggctgaggatgctctaccgggactgtgctcggcccccaccacctcctttgcaggctgaccgaagacagcccaaagagattacttggagcccctcgcgagtgtttccgcctgttcgagcctgcatgttctcatctcaccttacctcagtcaccttcctggctgaccccagcgctgggggaggcctgccccggggcacttttatctatgccacttcaccactgccagttcaggccccgtctttttactgggaaattgaaatcgtttcctatggagacaccgatgatgacaccggacccatagtttcctttggcttcactacagaagcagagaagcgagatggggcttggactaatccagtgggcacttgtcttttccataacaacggccgagccgtgcactataatggctccagtttgttacagtggaagagcgttcgcttagacgtgactctctcccccggtgacgtggcaggaattggctgggagagaactgaggggactccacctcctccgggacagccagccaagggccgggtgtacttcacatactgcgggcagcgcctctcaccatatcttgaagacgtctctggtggcatgtggccagtggttcacattcagaaaaagaacaccaaaacccgagctaactttggctcccggccgtttgcctacgcggaagggcaggcccaccgcaatgctgctgacctgtgcactgacctagcagaagagatcagcgctaactttgaggccctgcctttcgccatggcatctgacagtgacaatgatgctggcaccagtattgcatcagacccaggcactcatgggccaccatgccggattgctgccgtggccaccgctcagcaacaatatgatagtgacacctcctgtcattataaagtcgagctcagctatgagaatttcatcacctctggcccagaccctcacccgcctcccattgcagatgatgaaagcgatgatgatgacgatgatgacatccctcaggaggaccactacgccctgctggtgaaagcatgggagaccaaggtttttcctaccatccgaagacgcttccgcaatgaagcagagcggaaatcgggcctggaccagataaagggggccttacaactaggtatggtggatattgcccgacagacggttgaatttctctacgaagagaatggtggcatcccaagagacctttatcttcccaccattgaagacattaaagacgaagcaaacaagttcacaattgataaagttcgaaaaggtctcacagtagtaacccgctctccagacagcaataatgtagccagcagtgctgttggaactgctctgccaaaatttgccatccgagggatgctgaaaacctttgggcttcatggagtcgtcttagatgttgattcagtgaatgaactggtgcaggtagaaacgtacctccgcagtgaaggtgtgctggtgcgatactggtatcctattgacatgttggaaaggcccccagcaggctaccgaaggactgccaccaatgggctggtcacactggacaataccaaccttcaaattcacagggagctgctgcgctgcgaggctgcgctggccaggctgtactgccgcatggccctgctcaatatcttcgccccgaagttgcctcacttgttcactcgcctcttccacatccctgccatccgggacattaccctggagcacctgcaactgctgtccaatcagctcctcgcacctcctctcccagacggcaccatcagctccagctcgatcctcctggcgcagtctttacagcattgcatccattcccagaactgctccgccacggacctcttttaccagggcaactcccagacagtgagagagtggctcaacgtggccatcacccggaccctgcaccagggcgaggagagccttttagagctgacgaaacagatctgctctttcctgcagacagcaccagagcagttcccctccgaagagttcccaatttccgaatccaaagtcaacatggacgtgaatttccccggggcagcttttgttgttgtgtcttgtaaagaaagtcaatctggattccgcaaagactcctctctgtacaaggcaccgtgggcacgggtgctcgtatatggcctcggccacaaagtgaagcgaaatggccagctgaacctcatcgaggccgcctgttacccgcgggacgcgtccccagccaacactgggcttgcacctccccccaccgctgaccagtacccctctgtggtcctctccacagacagggtccacatcaaactgggggtgtctccacctcctggagcagtcctggtgttacattccctgcccctggagttcccactggctatggccttcgcagagcagctgctgtcctggaaatcagaggacagtgaagggaagtccgaagatgagcctgacaccattccgacatccgtcctcctgcaggtggtggagctgctaggaaacttcttgtggaccacggacatggcagcctgcgtgaaggagcttgttttccatctcctggcagagctcctgcgcacggtgcacaccctggagcagaggcggcaccccgctggcctgtcctcctcaatcgccctccagctgaacccctgcctggccatgctgatggccttgcagtcggagctccacaagctgtacgacgaggagacgcagaactgggtctcaggcggcgcctgcgggggctccgggggggcggcggccggtgaccagggcaggttctctacgtattttcatgcactcatggaagggtgcctggctgtggccgaagtgaccctgcctactaacatgagtgtcacagccagtggggtgacctcagcgaccgccccaaatctcagtgactcgtcctcctcctcctcgtcctccccaggacagaccccacagagtcccagcctcctctccaagaggaaaaaagtcaagatgaagcgggaaaaggcctcctcgtcgggcaagcgccagtcttcccgcaccgtggactcggaccccaccgtgctcagcatcggaggcagcaagcccgaggacatgctgtggttccaccgcgcactcaccctgctcatcatcctccgccacctcaccaggaaggacccacaggggctgggcgtgacgagtgacgccatcgccgatgcctgccaggccctggtgggccccaccgcccacagccgcttgctggtgatctccgggatccccacccacctggacgagggcgtagtcagaggcgccatccgcaaggcctgcaacgcccacggcggggtcttcaaagacgagatctacatcccgctgcaggaagaagacaccaagaagccaaaagacaaggccgagggcggggacgggaaagttgagcccgagaagacactggccttccccggcacagacagcatggaggtcagcacgtccagcagcctgacccccgccatgagcatcagcgcctccgcctccaccagccaggcctccatctgcagctcgcagggcatctcccaaaccgtcagcgacctctctgtggatccgctgcctgccggcctcgagctgcccatccctccgggcctgttggagccccacgcggtgtccagccaggaaagcctggacatttccctgtgcagcaccggcagcctgggcagcctgggcagcctgggggagcccctggacaatgcagagacggcctcggtgtcggacatgggctccatgtacacagtcacttccctggacaaccagcccctcgccgcccgccccatcaaaggcttcgcagtcgtggagataagatcccgagccaaaattgagaaaattcgagcaagtttatttaacaataatgacttgattggtttgtcaagtttggatggtgaagatgaattgatggaaatgtcaacagaagagattctaaccgtgtctgtagtaaatcagagtctctttgatactcaagggagcccagggttagaagattatttcaatgataagtcaattaaaggggagaagctggtgcccggagccagagaggttctgacggagatatttaagagttgtgcccattcagagcagacgctgagcctgacaccagcgaagcccatcagagtctctgacatttatcttagcaaagagcagatcaactcccagaccccaggcaacctcctccacctcttcttcaccaatgtccggccgccaaaaaaggtgctggaggatcagctcacccagatcctgaggaagtatggcgtgccaaagcccaagtttgacaagagcaagtacagcaaggccgggaaggagcagcaccccgtgaaggtggtgagcaccaagcggcctatcaccaagccgcccgccaaggacaaggctgtgctcaacagcgtcaggactgccttaagtgagaagaagccaactgtgaagccaaaatcaccagaaaagagcaaaccagatgaaaaggacccagaaaagtcacctaccaaaaaacaagaagtccctgaggaaaaatacctgacgctggaaggatttcacaaatttgttattgaccgagccaggcaagatatccgtagcgtctggagggcgatcttgtcctgtggttacgatcttcactttgagaggtgcgcatgcatcgatgtccgacatgcacagaaggcctcaagaaagtggaccctggagatggacgtggcacttgtgcagtacatcaaccagctatgccgccacctcgccatcacacccgcacggctccatccccatgaggtgtacctggaccccgcggatgctgctgaccccagagtggcctgtctcctgaacgtgcccatcgagagcctgcgcctgcgcttcgccttgctgcagtccctcaacaccacactggagaccttcttcctgcccctggtggagctgcgccagacacccatgtatacccacagcatcgccgccctgctgaaggaggccaaagggctgatcttctatgacacgaaggtgaccgtgatgaatcgagtgctgaatgccactgtgcagaggacagcggaccacgcggcccctgagatcaccttggacccactggaaattgtgggaggggaaatcagagcttctgaaaactcctacttctgtcaggctgccaggcagctggcctcagtgccgtcgtctcagctctgcgtcaagctggccagtggcggtgaccccacatatgccttcaacatccgcttcactggcgaggaggtccatggcaccagcggctctttccgccacttcctgtggcaggtgtgtaaggagctgcagagttcctcgctgtcgctgctgctgctgtgccccagctcagctgtcaataagaacaagggcaagtatatcctgaccccgagccccatcacctacggggaggagcagctgctgcacttcctggggcagctgctggggattgcaattcgggcagacgtcccgctgcccctggacctcctgccctccttctggaagacgctggtgggcgagcccttggaccctgagcaagacctgcaggaagcggatatcctcacctacaattacgtcaagaagtttgagagcatcaatgatgagaccgagctggaggccctgtgcgctgagatcgcctcccagcacctggccacggagagccctgacagccccaacaagccctgctgcaggttcacctacctgaccatgacgggcgaggaggtggagctgtgcagccggggccggcacatccttgtggcgtgggagaacaaggacatctacgcggcagccatccggagcctgcggctgcgggagctgcagaatgtggagtgcgtgacggccgtgcgggccggcctgggctccatcatccccctgcagctgctgaccatgctcagcccactggagatggagctgcgcacctgcggcctcccctacatcaacctcgagttcctcaaggcccacaccatgtaccaagtggggctgatggagacggaccagcacatcgagttcttctggggggccctggagatgttcacccaggaggagctgtgcaagttcatcaagtttgcctgcaaccaggagcgcatcccgttcacctgcccctgcaaagatgggggtcccgacactgcccatgtgcccccgtaccccatgaagatcgcccccccagatggcacagcaggttccccagactctcgctacatccgcgtggagacctgcatgttcatgatcaagcttccccagtactcctctctggaaatcatgctggagaaacttcgttgtgccattcactaccgtgaagaccccctcagtggctgatgggagggagccccagaattaggctgtcactgaggcacccactctgctggcttgggaagccaccactgcggcccgtccctccagggccctgcgtgaggagttggcaacattttgcttttccaaactttcgtccacattccagggcctcctggaagacttaaccttttgtctttgtacgtttcgtgatgggttggttcttttgctgcctgtttgtggtctatttgtaggatagtttagttcccagacagtttgtgtctaatttgatcttcttggacattgtccctcatggccaccagattctaatgccataaggccccagctggttccccatcacagaaccacccagcaggaagccgggggtacaatgacctcggccacacagagcgctcgtgctttcagcagagcgcctccacagacaagcctgtggccagccctgccctccagcctcgagctggagttgctccagaggcagccccagcaggcctccctccacatagaggtggctgggccaattgcccaaacacgtgagacacacagggagctttatgtgttcatcttcctgctttagaacttgctcccggtcttggtttttctgaggaaaagcccacagtggttcccctgcccctcccatacctccctatctgccgtctgtctctttgggccctggtctgacagttttcatctgaggcctcctcgggagcaggagacttaagggttcatcccgaccttagttcacagagcctagctgggtgcatcccagccgcagggggtgagaagacacccagagatgggggacaatgctcaggtgggggcctcctccgagactctggttgagaggaaagcacatgattcaagcctaccccacaaaaaaggagcacaaaatgctcagaaatggcccttcctccctgcagtgacgtaggacaagggaaagggccacacccattttcaaaagagtggactgaggtgctctgctcaatttggggtctgctttagtgacccagacactcaagtccagatggagactccaggggggtccttctgcccctctggccagccccacccagcactccccatcaccccatgtaagtgtgtatgccagggctgagctgcctccaggctcacccactgcatctttgccccaaataggtctttgtccagtggtactttgttcatgagcagcacaggccatcttgttggacactgtcactttgggccttgccaggtctcacagaatcacatcgctgtatttattgtataatattgtgaatattggaagttttgagtgagtgctgtctagaaggttttggagtgtggatgctggtccaagaaagaagatgtgccctggcctgctggaaagattgtgaattctagagatagagccgttagcatccatctcctccctgtaactcttaggaaatgcatcaaggaccattatagaaaggatcccctgacctaaggatgaaatcgacctagggttaatcatgacagctgcatcagttgtattggatgcaagtcaactctggagtcctcatcccttgaatggacttgtcagctacctccccaggaggagttcagaagcttctgttggccatcacttgagtagatgacaagctgtaaggtatctgctgctaacgtggctgcttctccgagagcacattgaggtccagacagatccaaaccttggccctaaaaaatgtgtgctgtaaagttacttgatgtatatttattataattatttatggttgcatttaacaaacttttcattcaatctgatgctatttacaccatgctgtgtaaaggaagctcactaaaggaaaaaagtcacaccaataaataaccttcatctaattttgatttaccttaagagttgtgtgatcatctactcttgctgagcaagttcaaaggctggcatgcttggatggctctgatatttaagtgctgccaagtggctaggaattaaagtgtttctaatta

SEQ ID NO: 1599 - DNA, 9117 bp, Homo sapiens
aatgaaagaactagaacttttatgttcaatgaaggaagtctcctttgatgggaatgatcttgaaaacatggtcctatcactgagggagaagttcctacaagaagtgaattctcttattcagaaaccctcacacccactggctaaaacaaagacgttagtgaagagtttaatgaaccgagccgagctgttgctgcatgtcaccatcgcagcccagtcgggcctcacgagaagcatctctgggacccctgctgaaacaccagcttgtaaatcagcttctgaaacaaaagtgatatctcacgctgtcaggcagcctgtttttcttcgcagcatgtcagctccttctgacctggaaatgattggtaatgaagatttggaatttactagagcaaatcagaggcgtcgccacgtgaccagccaccgcagcagctcctttacactcctgcagtcgctggccattgaggacagcagggacaagcccacctacagtgtcctgctagggcagctgtttgctttcatcggcaccaaccctgaccaagctgtgtccagcagcagtttccttttggctgcacagacaaggtggcggcggggaaacactcgcaagcaggcactggtgcacatgcgggaattgctgacagctgccgtacgagtcgggggagtgacgcatcttgtgggtccagtgacgatggtccttcagggaggacccagaattgaagaactcacatgtggtgggatggtcgagcaggtccaggaagcctttggcgagaccatgacctctgttgtgtctctgtgtgctcgttaccctatcgcttgcgcaaatagcattggactcttatgtaccataccttacaccaggagcgaagagaagtgcctggtacgcagtggccttgtgcagctcatggatcgactgtgtagcttgagcaatcagaccgagtccagctccagtgagaaacagaccaagaagcagaaggtggccaccatggcctgggctgccttccaggtgcttgccaaccgctgtgttgagtgggaaaaagaggaaggtggctccacagaggctgtgcactcaggtctggcccggcaggtgtccagccttctcactaaccatcttgcccgagccacagagtgctgtggcaaccaggctgctgggaatgacgcgctccaggatgtccttagtcttctcaatgatctctcaaggagccacataggtaaagccatcctgagccagccagcttgtgtgtccaaactcctctccctgctgcttgaccaacgcccgtctccaaagctagtccttattattctccagctgtgccgggcggcgctgcccctgatgagcgtagaagactgtggaaacgtggagctcccaccctggagctactctgtcccctccttaaacagtgagcaggaggatcccagcgacccagcttccaagatcgcctccctgctcttagcaaagctggcagattatgtggttccaggatgtcagacagttctttctccaaccgcttctgaacctgacaccacattgacaaaaaccagtcccaagaattccttgaaaggagataaagatcctggagaagagagtgaggctgtggatggcaagctctcgatatttatccacaagcgggaagaccagtcatcccatgaagtcctccagccattgctaagtagttcagaaggacggcccttccgacttggtactggcgccaacatggagaaagttgtgaagatggatcgagacatgaccaagggtggctgttgcgaagtgattacagaagaggctgcagccgccctgcggaaagccaccaagtgggcacagtcaggcctcatcgtcagcattgggccacctgtagagtctatcaacccagagactgtgagtggactatccacaggcgacaaaaagaaaactgcccaaacttccatttgccgagagaggaactcggagcttgcaaggactgatcctgtgcgtcccttcatcagtgggcatgtggcaaacagcatggctgcagaagtgatcgccttgctacatagcttgctcatggcacctgaatcaaatgctgctcaaatatggaccacaacagcagagaaggttctgtctagagcactgatgtacattccacaattggggaaatacgcagaaagcattctggaaaatggcagcagcagtggcaggaaacttgccaaacttcagagaattgcacgccaggccgttgccgcactgtgtgcacttggaggcttcaaagagacaatcaagataggatccgaggttcaggttttaggtagaggaatttcaggaagcattggagtagtggcttctatcaatgaacaggaaggtatagctacagtcagattcccacccatagactgtagaaagacttcgcaagcgtcagacacattgactattccattgtctagactttgtgttccaagatcagaggcattgcctcttcataaactgtccattactgagaaggtagtacaggcagtccagtccatgttgcttcctcaggagggaagtctctctattcacacctcacttcctgcaacaggagatgggtcagctcctgtgatggcagtcgttcggctccttgctgaaataaggacaagagcatgcctggtcatggcccagcttttagaagacagcttattttgtgaagaattcatacaacaatgtccagcagctgttgaagttcttaacctagtagcccaggaatgtagtgctggagagcgacttgcagttgtggaggtacagtgtgaacggctgaggatgctctaccgggactgtgctcggcccccaccacctcctttgcaggctgaccgaagacagcccaaagagattacttggagcccctcgcgagtgtttccgcctgttcgagcctgcatgttctcatctcaccttacctcagtcaccttcctggctgaccccagcgctgggggaggcctgccccggggcacttttatctatgccacttcaccactgccagttcaggccccgtctttttactgggaaattgaaatcgtttcctatggagacaccgatgatgacaccggacccatagtttcctttggcttcactacagaagcagagaagcgagatggggcttggactaatccagtgggcacttgtcttttccataacaacggccgagccgtgcactataatggctccagtttgttacagtggaagagcgttcgcttagacgtgactctctcccccggtgacgtggcaggaattggctgggagagaactgaggggactccacctcctccgggacagccagccaagggccgggtgtacttcacatactgcgggcagcgcctctcaccatatcttgaagacgtctctggtggcatgtggccagtggttcacattcagaaaaagaacaccaaaacccgagctaactttggctcccggccgtttgcctacgcggaagggcaggcccaccgcaatgctgctgacctgtgcactgacctagcagaagagatcagcgctaactttgaggccctgcctttcgccatggcatctgacagtgacaatgatgctggcaccagtattgcatcagacccaggcactcatgggccaccatgccggattgctgccgtggccaccgctcagcaacaatatgatagtgacacctcctgtcattataaagtcgagctcagctatgagaatttcatcacctctggcccagaccctcacccgcctcccattgcagatgatgaaagcgatgatgatgacgatgatgacatccctcaggaggaccactacgccctgctggtgaaagcatgggagaccaaggtttttcctaccatccgaagacgcttccgcaatgaagcagagcggaaatcgggcctggaccagataaagggggccttacaactaggtatggtggatattgcccgacagacggttgaatttctctacgaagagaatggtggcatcccaagagacctttatcttcccaccattgaagacattaaagacgaagcaaacaagttcacaattgataaagttcgaaaaggtctcacagtagtaacccgctctccagacagcaataatgtagccagcagtgctgttggaactgctctgccaaaatttgccatccgagggatgctgaaaacctttgggcttcatggagtcgtcttagatgttgattcagtgaatgaactggtgcaggtagaaacgtacctccgcagtgaaggtgtgctggtgcgatactggtatcctattgacatgttggaaaggcccccagcaggctaccgaaggactgccaccaatgggctggtcacactggacaataccaaccttcaaattcacagggagctgctgcgctgcgaggctgcgctggccaggctgtactgccgcatggccctgctcaatatcttcgccccgaagttgcctcacttgttcactcgcctcttccacatccctgccatccgggacattaccctggagcacctgcaactgctgtccaatcagctcctcgcacctcctctcccagacggcaccatcagctccagctcgatcctcctggcgcagtctttacagcattgcatccattcccagaactgctccgccacggacctcttttaccagggcaactcccagacagtgagagagtggctcaacgtggccatcacccggaccctgcaccagggcgaggagagccttttagagctgacgaaacagatctgctctttcctgcagacagcaccagagcagttcccctccgaagagttcccaatttccgaatccaaagtcaacatggacgtgaatttccccggggcagcttttgttgttgtgtcttgtaaagaaagtcaatctggattccgcaaagactcctctctgtacaaggcaccgtgggcacgggtgctcgtatatggcctcggccacaaagtgaagcgaaatggccagctgaacctcatcgaggccgcctgttacccgcgggacgcgtccccagccaacactgggcttgcacctccccccaccgctgaccagtacccctctgtggtcctctccacagacagggtccacatcaaactgggggtgtctccacctcctggagcagtcctggtgttacattccctgcccctggagttcccactggctatggccttcgcagagcagctgctgtcctggaaatcagaggacagtgaagggaagtccgaagatgagcctgacaccattccgacatccgtcctcctgcaggtggtggagctgctaggaaacttcttgtggaccacggacatggcagcctgcgtgaaggagcttgttttccatctcctggcagagctcctgcgcacggtgcacaccctggagcagaggcggcaccccgctggcctgtcctcctcaatcgccctccagctgaacccctgcctggccatgctgatggccttgcagtcggagctccacaagctgtacgacgaggagacgcagaactgggtctcaggcggcgcctgcgggggctccgggggggcggcggccggtgaccagggcaggttctctacgtattttcatgcactcatggaagggtgcctggctgtggccgaagtgaccctgcctactaacatgagtgtcacagccagtggggtgacctcagcgaccgccccaaatctcagtgactcgtcctcctcctcctcgtcctccccaggacagaccccacagagtcccagcctcctctccaagaggaaaaaagtcaagatgaagcgggaaaaggcctcctcgtcgggcaagcgccagtcttcccgcaccgtggactcggaccccaccgtgctcagcatcggaggcagcaagcccgaggacatgctgtggttccaccgcgcactcaccctgctcatcatcctccgccacctcaccaggaaggacccacaggggctgggcgtgacgagtgacgccatcgccgatgcctgccaggccctggtgggccccaccgcccacagccgcttgctggtgatctccgggatccccacccacctggacgagggcgtagtcagaggcgccatccgcaaggcctgcaacgcccacggcggggtcttcaaagacgagatctacatcccgctgcaggaagaagacaccaagaagccaaaagacaaggccgagggcggggacgggaaagttgagcccgagaagacactggccttccccggcacagacagcatggaggtcagcacgtccagcagcctgacccccgccatgagcatcagcgcctccgcctccaccagccaggcctccatctgcagctcgcagggcatctcccaaaccgtcagcgacctctctgtggatccgctgcctgccggcctcgagctgcccatccctccgggcctgttggagccccacgcggtgtccagccaggaaagcctggacatttccctgtgcagcaccggcagcctgggcagcctgggcagcctgggggagcccctggacaatgcagagacggcctcggtgtcggacatgggctccatgtacacagtcacttccctggacaaccagcccctcgccgcccgccccatcaaaggcttcgcagtcgtggagataagatcccgagccaaaattgagaaaattcgagcaagtttatttaacaataatgacttgattggtttgtcaagtttggatggtgaagatgaattgatggaaatgtcaacagaagagattctaaccgtgtctgtagtaaatcagagtctctttgatactcaagggagcccagggttagaagattatttcaatgataagtcaattaaaggggagaagctggtgcccggagccagagaggttctgacggagatatttaagagttgtgcccattcagagcagacgctgagcctgacaccagcgaagcccatcagagtctctgacatttatcttagcaaagagcagatcaactcccagaccccaggcaacctcctccacctcttcttcaccaatgtccggccgccaaaaaaggtgctggaggatcagctcacccagatcctgaggaagtatggcgtgccaaagcccaagtttgacaagagcaagtacagcaaggccgggaaggagcagcaccccgtgaaggtggtgagcaccaagcggcctatcaccaagccgcccgccaaggacaaggctgtgctcaacagcgtcaggactgccttaagtgagaagaagccaactgtgaagccaaaatcaccagaaaagagcaaaccagatgaaaaggacccagaaaagtcacctaccaaaaaacaagaagtccctgaggaaaaatacctgacgctggaaggatttcacaaatttgttattgaccgagccaggcaagatatccgtagcgtctggagggcgatcttgtcctgtggttacgatcttcactttgagaggtgcgcatgcatcgatgtccgacatgcacagaaggcctcaagaaagtggaccctggagatggacgtggcacttgtgcagtacatcaaccagctatgccgccacctcgccatcacacccgcacggctccatccccatgaggtgtacctggaccccgcggatgctgctgaccccagagtggcctgtctcctgaacgtgcccatcgagagcctgcgcctgcgcttcgccttgctgcagtccctcaacaccacactggagaccttcttcctgcccctggtggagctgcgccagacacccatgtatacccacagcatcgccgccctgctgaaggaggccaaagggctgatcttctatgacacgaaggtgaccgtgatgaatcgagtgctgaatgccactgtgcagaggacagcggaccacgcggcccctgagatcaccttggacccactggaaattgtgggaggggaaatcagagcttctgaaaactcctacttctgtcaggctgccaggcagctggcctcagtgccgtcgtctcagctctgcgtcaagctggccagtggcggtgaccccacatatgccttcaacatccgcttcactggcgaggaggtccatggcaccagcggctctttccgccacttcctgtggcaggtgtgtaaggagctgcagagttcctcgctgtcgctgctgctgctgtgccccagctcagctgtcaataagaacaagggcaagtatatcctgaccccgagccccatcacctacggggaggagcagctgctgcacttcctggggcagctgctggggattgcaattcgggcagacgtcccgctgcccctggacctcctgccctccttctggaagacgctggtgggcgagcccttggaccctgagcaagacctgcaggaagcggatatcctcacctacaattacgtcaagaagtttgagagcatcaatgatgagaccgagctggaggccctgtgcgctgagatcgcctcccagcacctggccacggagagccctgacagccccaacaagccctgctgcaggttcacctacctgaccatgacgggcgaggaggtggagctgtgcagccggggccggcacatccttgtggcgtgggagaacaaggacatctacgcggcagccatccggagcctgcggctgcgggagctgcagaatgtggagtgcgtgacggccgtgcgggccggcctgggctccatcatccccctgcagctgctgaccatgctcagcccactggagatggagctgcgcacctgcggcctcccctacatcaacctcgagttcctcaaggcccacaccatgtaccaagtggggctgatggagacggaccagcacatcgagttcttctggggggccctggagatgttcacccaggaggagctgtgcaagttcatcaagtttgcctgcaaccaggagcgcatcccgttcacctgcccctgcaaagatgggggtcccgacactgcccatgtgcccccgtaccccatgaagatcgcccccccagatggcacagcaggtaccgccctcccctggccatgtcccaagtagggacacactagcctttctctgtttggaactggggctgccaggccccatgtgaagggagaacaatgaacaggagccccacgtgccaaaactcagacatcattgaggattagggcccggcaggaaccagccatacaggcctgctgttagatactttctcatatcttaaaagaagctgaaaatccagaatgcttcaaatcttctaacttttaaatgcagaaaaa

SEQ ID NO: 1600 - DNA, 11197 bp, Homo sapiens; identical to SEQ ID NO: 1593

SEQ ID NO: 1601 - DNA, 9738 bp, Homo sapiens
aatgaaagaactagaacttttatgttcaatgaaggaagtctcctttgatgggaatgatcttgaaaacatggtcctatcactgagggagaagttcctacaagaagtgaattctcttattcagaaaccctcacacccactggctaaaacaaagacgttagtgaagagtttaatgaaccgagccgagctgttgctgcatgtcaccatcgcagcccagtcgggcctcacgagaagcatctctgggacccctgctgaaacaccagcttgtaaatcagcttctgaaacaaaagtgatatctcacgctgtcaggcagcctgtttttcttcgcagcatgtcagctccttctgacctggaaatgattggtaatgaagatttggaatttactagagcaaatcagaggcgtcgccacgtgaccagccaccgcagcagctcctttacactcctgcagtcgctggccattgaggacagcagggacaagcccacctacagtgtcctgctagggcagctgtttgctttcatcggcaccaaccctgaccaagctgtgtccagcagcagtttccttttggctgcacagacaaggtggcggcggggaaacactcgcaagcaggcactggtgcacatgcgggaattgctgacagctgccgtacgagtcgggggagtgacgcatcttgtgggtccagtgacgatggtccttcagggaggacccagaattgaagaactcacatgtggtgggatggtcgagcaggtccaggaagcctttggcgagaccatgacctctgttgtgtctctgtgtgctcgttaccctatcgcttgcgcaaatagcattggactcttatgtaccataccttacaccaggagcgaagagaagtgcctggtacgcagtggccttgtgcagctcatggatcgactgtgtagcttgagcaatcagaccgagtccagctccagtgagaaacagaccaagaagcagaaggtggccaccatggcctgggctgccttccaggtgcttgccaaccgctgtgttgagtgggaaaaagaggaaggtggctccacagaggctgtgcactcaggtctggcccggcaggtgtccagccttctcactaaccatcttgcccgagccacagagtgctgtggcaaccaggctgctgggaatgacgcgctccaggatgtccttagtcttctcaatgatctctcaaggagccacataggtaaagccatcctgagccagccagcttgtgtgtccaaactcctctccctgctgcttgaccaacgcccgtctccaaagctagtccttattattctccagctgtgccgggcggcgctgcccctgatgagcgtagaagactgtggaaacgtggagctcccaccctggagctactctgtcccctccttaaacagtgagcaggaggatcccagcgacccagcttccaagatcgcctccctgctcttagcaaagctggcagattatgtggttccaggatgtcagacagttctttctccaaccgcttctgaacctgacaccacattgacaaaaaccagtcccaagaattccttgaaaggagataaagatcctggagaagagagtgaggctgtggatggcaagctctcgatatttatccacaagcgggaagaccagtcatcccatgaagtcctccagccattgctaagtagttcagaaggacggcccttccgacttggtactggcgccaacatggagaaagttgtgaagatggatcgagacatgaccaagggtggctgttgcgaagtgattacagaagaggctgcagccgccctgcggaaagccaccaagtgggcacagtcaggcctcatcgtcagcattgggccacctgtagagtctatcaacccagagactgtgagtggactatccacaggcgacaaaaagaaaactgcccaaacttccatttgccgagagaggaactcggagcttgcaaggactgatcctgtgcgtcccttcatcagtgggcatgtggcaaacagcatggctgcagaagtgatcgccttgctacatagcttgctcatggcacctgaatcaaatgctgctcaaatatggaccacaacagcagagaaggttctgtctagagcactgatgtacattccacaattggggaaatacgcagaaagcattctggaaaatggcagcagcagtggcaggaaacttgccaaacttcagagaattgcacgccaggccgttgccgcactgtgtgcacttggaggcttcaaagagacaatcaagataggatccgaggttcaggttttaggtagaggaatttcaggaagcattggagtagtggcttctatcaatgaacaggaaggtatagctacagtcagattcccacccatagactgtagaaagacttcgcaagcgtcagacacattgactattccattgtctagactttgtgttccaagatcagaggcattgcctcttcataaactgtccattactgagaaggtagtacaggcagtccagtccatgttgcttcctcaggagggaagtctctctattcacacctcacttcctgcaacaggagatgggtcagctcctgtgatggcagtcgttcggctccttgctgaaataaggacaagagcatgcctggtcatggcccagcttttagaagacagcttattttgtgaagaattcatacaacaatgtccagcagctgttgaagttcttaacctagtagcccaggaatgtagtgctggagagcgacttgcagttgtggaggtacagtgtgaacggctgaggatgctctaccgggactgtgctcggcccccaccacctcctttgcaggctgaccgaagacagcccaaagagattacttggagcccctcgcgagtgtttccgcctgttcgagcctgcatgttctcatctcaccttacctcagtcaccttcctggctgaccccagcgctgggggaggcctgccccggggcacttttatctatgccacttcaccactgccagttcaggccccgtctttttactgggaaattgaaatcgtttcctatggagacaccgatgatgacaccggacccatagtttcctttggcttcactacagaagcagagaagcgagatggggcttggactaatccagtgggcacttgtcttttccataacaacggccgagccgtgcactataatggctccagtttgttacagtggaagagcgttcgcttagacgtgactctctcccccggtgacgtggcaggaattggctgggagagaactgaggggactccacctcctccgggacagccagccaagggccgggtgtacttcacatactgcgggcagcgcctctcaccatatcttgaagacgtctctggtggcatgtggccagtggttcacattcagaaaaagaacaccaaaacccgagctaactttggctcccggccgtttgcctacgcggaagggcaggcccaccgcaatgctgctgacctgtgcactgacctagcagaagagatcagcgctaactttgaggccctgcctttcgccatggcatctgacagtgacaatgatgctggcaccagtattgcatcagacccaggcactcatgggccaccatgccggattgctgccgtggccaccgctcagcaacaatatgatagtgacacctcctgtcattataaagtcgagctcagctatgagaatttcatcacctctggcccagaccctcacccgcctcccattgcagatgatgaaagcgatgatgatgacgatgatgacatccctcaggaggaccactacgccctgctggtgaaagcatgggagaccaaggtttttcctaccatccgaagacgcttccgcaatgaagcagagcggaaatcgggcctggaccagataaagggggccttacaactaggtatggtggatattgcccgacagacggttgaatttctctacgaagagaatggtggcatcccaagagacctttatcttcccaccattgaagacattaaagacgaagcaaacaagttcacaattgataaagttcgaaaaggtctcacagtagtaacccgctctccagacagcaataatgtagccagcagtgctgttggaactgctctgccaaaatttgccatccgagggatgctgaaaacctttgggcttcatggagtcgtcttagatgttgattcagtgaatgaactggtgcaggtagaaacgtacctccgcagtgaaggtgtgctggtgcgatactggtatcctattgacatgttggaaaggcccccagcaggctaccgaaggactgccaccaatgggctggtcacactggacaataccaaccttcaaattcacagggagctgctgcgctgcgaggctgcgctggccaggctgtactgccgcatggccctgctcaatatcttcgccccgaagttgcctcacttgttcactcgcctcttccacatccctgccatccgggacattaccctggagcacctgcaactgctgtccaatcagctcctcgcacctcctctcccagacggcaccatcagctccagctcgatcctcctggcgcagtctttacagcattgcatccattcccagaactgctccgccacggacctcttttaccagggcaactcccagacagtgagagagtggctcaacgtggccatcacccggaccctgcaccagggcgaggagagccttttagagctgacgaaacagatctgctctttcctgcagacagcaccagagcagttcccctccgaagagttcccaatttccgaatccaaagtcaacatggacgtgaatttccccggggcagcttttgttgttgtgtcttgtaaagaaagtcaatctggattccgcaaagactcctctctgtacaaggcaccgtgggcacgggtgctcgtatatggcctcggccacaaagtgaagcgaaatggccagctgaacctcatcgaggccgcctgttacccgcgggacgcgtccccagccaacactgggcttgcacctccccccaccgctgaccagtacccctctgtggtcctctccacagacagggtccacatcaaactgggggtgtctccacctcctggagcagtcctggtgttacattccctgcccctggagttcccactggctatggccttcgcagagcagctgctgtcctggaaatcagaggacagtgaagggaagtccgaagatgagcctgacaccattccgacatccgtcctcctgcaggtggtggagctgctaggaaacttcttgtggaccacggacatggcagcctgcgtgaaggagcttgttttccatctcctggcagagctcctgcgcacggtgcacaccctggagcagaggcggcaccccgctggcctgtcctcctcaatcgccctccagctgaacccctgcctggccatgctgatggccttgcagtcggagctccacaagctgtacgacgaggagacgcagaactgggtctcaggcggcgcctgcgggggctccgggggggcggcggccggtgaccagggcaggttctctacgtattttcatgcactcatggaagggtgcctggctgtggccgaagtgaccctgcctactaacatgagtgtcacagccagtggggtgacctcagcgaccgccccaaatctcagtgactcgtcctcctcctcctcgtcctccccaggacagaccccacagagtcccagcctcctctccaagaggaaaaaagtcaagatgaagcgggaaaaggcctcctcgtcgggcaagcgccagtcttcccgcaccgtggactcggaccccaccgtgctcagcatcggaggcagcaagcccgaggacatgctgtggttccaccgcgcactcaccctgctcatcatcctccgccacctcaccaggaaggacccacaggggctgggcgtgacgagtgacgccatcgccgatgcctgccaggccctggtgggccccaccgcccacagccgcttgctggtgatctccgggatccccacccacctggacgagggcgtagtcagaggcgccatccgcaaggcctgcaacgcccacggcggggtcttcaaagacgagatctacatcccgctgcaggaagaagacaccaagaagccaaaagacaaggccgagggcggggacgggaaagttgagcccgagaagacactggccttccccggcacagacagcatggaggtcagcacgtccagcagcctgacccccgccatgagcatcagcgcctccgcctccaccagccaggcctccatctgcagctcgcagggcatctcccaaaccgtcagcgacctctctgtggatccgctgcctgccggcctcgagctgcccatccctccgggcctgttggagccccacgcggtgtccagccaggaaagcctggacatttccctgtgcagcaccggcagcctgggcagcctgggcagcctgggggagcccctggacaatgcagagacggcctcggtgtcggacatgggctccatgtacacagtcacttccctggacaaccagcccctcgccgcccgccccatcaaaggcttcgcagtcgtggagataagatcccgagccaaaattgagaaaattcgagcaagtttatttaacaataatgacttgattggtttgtcaagtttggatggtgaagatgaattgatggaaatgtcaacagaagagattctaaccgtgtctgtagtaaatcagagtctctttgatactcaagggagcccagggttagaagattatttcaatgataagtcaattaaaggggagaagctggtgcccggagccagagaggttctgacggagatatttaagagttgtgcccattcagagcagacgctgagcctgacaccagcgaagcccatcagagtctctgacatttatcttagcaaagagcagatcaactcccagaccccaggcaacctcctccacctcttcttcaccaatgtccggccgccaaaaaaggtgctggaggatcagctcacccagatcctgaggaagtatggcgtgccaaagcccaagtttgacaagagcaagtacagcaaggccgggaaggagcagcaccccgtgaaggtggtgagcaccaagcggcctatcaccaagccgcccgccaaggacaaggctgtgctcaacagcgtcagcaggactgccttaagtgagaagaagccaactgtgaagccaaaatcaccagaaaagagcaaaccagatgaaaaggacccagaaaagtcacctaccaaaaaacaagaagtccctgaggaaaaatacctgacgctggaaggatttcacaaatttgttattgaccgagccaggcaagatatccgtagcgtctggagggcgatcttgtcctgtggttacgatcttcactttgagaggtgcgcatgcatcgatgtccgacatgcacagaaggcctcaagaaagtggaccctggagatggacgtggcacttgtgcagtacatcaaccagctatgccgccacctcgccatcacacccgcacggctccatccccatgaggtgtacctggaccccgcggatgctgctgaccccagagtggcctgtctcctgaacgtgcccatcgagagcctgcgcctgcgcttcgccttgctgcagtccctcaacaccacactggagaccttcttcctgcccctggtggagctgcgccagacacccatgtatacccacagcatcgccgccctgctgaaggaggccaaagggctgatcttctatgacacgaaggtgaccgtgatgaatcgagtgctgaatgccactgtgcagaggacagcggaccacgcggcccctgagatcaccttggacccactggaaattgtgggaggggaaatcagagcttctgaaaactcctacttctgtcaggctgccaggcagctggcctcagtgccgtcgtctcagctctgcgtcaagctggccagtggcggtgaccccacatatgccttcaacatccgcttcactggcgaggaggtccatggcaccagcggctctttccgccacttcctgtggcaggtgtgtaaggagctgcagagttcctcgctgtcgctgctgctgctgtgccccagctcagctgtcaataagaacaagggcaagtatatcctgaccccgagccccatcacctacggggaggagcagctgctgcacttcctggggcagctgctggggattgcaattcgggcagacgtcccgctgcccctggacctcctgccctccttctggaagacgctggtgggcgagcccttggaccctgagcaagacctgcaggaagcggatatcctcacctacaattacgtcaagaagtttgagagcatcaatgatgagaccgagctggaggccctgtgcgctgagatcgcctcccagcacctggccacggagagccctgacagccccaacaagccctgctgcaggttcacctacctgaccatgacgggcgaggaggtggagctgtgcagccggggccggcacatccttgtggcgtgggagaacaaggacatctacgcggcagccatccggagcctgcggctgcgggagctgcagaatgtggagtgcgtgacggccgtgcgggccggcctgggctccatcatccccctgcagctgctgaccatgctcagcccactggagatggagctgcgcacctgcggcctcccctacatcaacctcgagttcctcaaggcccacaccatgtaccaagtggggctgatggagacggaccagcacatcgagttcttctggggggccctggagatgttcacccaggaggagctgtgcaagttcatcaagtttgcctgcaaccaggagcgcatcccgttcacctgcccctgcaaagatgggggtcccgacactgcccatgtgcccccgtaccccatgaagatcgcccccccagatggcacagcaggttccccagactctcgctacatccgcgtggagacctgcatgttcatgatcaagcttccccagtactcctctctggaaatcatgctggagaaacttcgttgtgccattcactaccgtgaagaccccctcagtggctgatgggagggagccccagaattaggctgtcactgaggcacccactctgctggcttgggaagccaccactgcggcccgtccctccagggccctgcgtgaggagttggcaacattttgcttttccaaactttcgtccacattccagggcctcctggaagacttaaccttttgtctttgaaatgcatcaaggaccattatagaaaggatcccctgacctaaggatgaaatcgacctagggttaatcatgacagctgcatcagttgtattggatgcaagtcaactctggagtcctcatcccttgaatggacttgtcagctacctccccaggaggagttcagaagcttctgttggccatcacttgagtagatgacaagctgtaaggtatctgctgctaacgtggctgcttctccgagagcacattgaggtccagacagatccaaaccttggccctaaaaaatgtgtgctgtaaagttacttgatgtatatttattataattatttatggttgcatttaacaaacttttcattcaatctgatgctatttacaccatgctgtgtaaaggaagctcactaaaggaaaaaagtcacaccaataaataaccttcatctaattttgatttaccttaagagttgtgtgatcatctactcttgctgagcaagttcaaaggctggcatgcttggatggctctgatatttaagtgctgccaagtggctaggaattaaagtgtttctaatta

SEQ ID NO: 1602 - DNA, 10978 bp, Homo sapiens
aatgaaagaactagaacttttatgttcaatgaaggaagtctcctttgatgggaatgatcttgaaaacatggtcctatcactgagggagaagttcctacaagaagtgaattctcttattcagaaaccctcacacccactggctaaaacaaagacgttagtgaagagtttaatgaaccgagccgagctgttgctgcatgtcaccatcgcagcccagtcgggcctcacgagaagcatctctgggacccctgctgaaacaccagcttgtaaatcagcttctgaaacaaaagtgatatctcacgctgtcaggcagcctgtttttcttcgcagcatgtcagctccttctgacctggaaatgattggtaatgaagatttggaatttactagagcaaatcagaggcgtcgccacgtgaccagccaccgcagcagctcctttacactcctgcagtcgctggccattgaggacagcagggacaagcccacctacagtgtcctgctagggcagctgtttgctttcatcggcaccaaccctgaccaagctgtgtccagcagcagtttccttttggctgcacagacaaggtggcggcggggaaacactcgcaagcaggcactggtgcacatgcgggaattgctgacagctgccgtacgagtcgggggagtgacgcatcttgtgggtccagtgacgatggtccttcagggaggacccagaattgaagaactcacatgtggtgggatggtcgagcaggtccaggaagcctttggcgagaccatgacctctgttgtgtctctgtgtgctcgttaccctatcgcttgcgcaaatagcattggactcttatgtaccataccttacaccaggagcgaagagaagtgcctggtacgcagtggccttgtgcagctcatggatcgactgtgtagcttgagcaatcagaccgagtccagctccagtgagaaacagaccaagaagcagaaggtggccaccatggcctgggctgccttccaggtgcttgccaaccgctgtgttgagtgggaaaaagaggaaggtggctccacagaggctgtgcactcaggtctggcccggcaggtgtccagccttctcactaaccatcttgcccgagccacagagtgctgtggcaaccaggctgctgggaatgacgcgctccaggatgtccttagtcttctcaatgatctctcaaggagccacataggtaaagccatcctgagccagccagcttgtgtgtccaaactcctctccctgctgcttgaccaacgcccgtctccaaagctagtccttattattctccagctgtgccgggcggcgctgcccctgatgagcgtagaagactgtggaaacgtggagctcccaccctggagctactctgtcccctccttaaacagtgagcaggaggatcccagcgacccagcttccaagatcgcctccctgctcttagcaaagctggcagattatgtggttccaggatgtcagacagttctttctccaaccgcttctgaacctgacaccacattgacaaaaaccagtcccaagaattccttgaaaggagataaagatcctggagaagagagtgaggctgtggatggcaagctctcgatatttatccacaagcgggaagaccagtcatcccatgaagtcctccagccattgctaagtagttcagaaggacggcccttccgacttggtactggcgccaacatggagaaagttgtgaagatggatcgagacatgaccaagggtggctgttgcgaagtgattacagaagaggctgcagccgccctgcggaaagccaccaagtgggcacagtcaggcctcatcgtcagcattgggccacctgtagagtctatcaacccagagactgtgagtggactatccacaggcgacaaaaagaaaactgcccaaacttccatttgccgagagaggaactcggagcttgcaaggactgatcctgtgcgtcccttcatcagtgggcatgtggcaaacagcatggctgcagaagtgatcgccttgctacatagcttgctcatggcacctgaatcaaatgctgctcaaatatggaccacaacagcagagaaggttctgtctagagcactgatgtacattccacaattggggaaatacgcagaaagcattctggaaaatggcagcagcagtggcaggaaacttgccaaacttcagagaattgcacgccaggccgttgccgcactgtgtgcacttggaggcttcaaagagacaatcaagataggatccgaggttcaggttttaggtagaggaatttcaggaagcattggagtagtggcttctatcaatgaacaggaaggtatagctacagtcagattcccacccatagactgtagaaagacttcgcaagcgtcagacacattgactattccattgtctagactttgtgttccaagatcagaggcattgcctcttcataaactgtccattactgagaaggtagtacaggcagtccagtccatgttgcttcctcaggagggaagtctctctattcacacctcacttcctgcaacaggagatgggtcagctcctgtgatggcagtcgttcggctccttgctgaaataaggacaagagcatgcctggtcatggcccagcttttagaagacagcttattttgtgaagaattcatacaacaatgtccagcagctgttgaagttcttaacctagtagcccaggaatgtagtgctggagagcgacttgcagttgtggaggtacagtgtgaacggctgaggatgctctaccgggactgtgctcggcccccaccacctcctttgcaggctgaccgaagacagcccaaagagattacttggagcccctcgcgagtgtttccgcctgttcgagcctgcatgttctcatctcaccttacctcagtcaccttcctggctgaccccagcgctgggggaggcctgccccggggcacttttatctatgccacttcaccactgccagttcaggccccgtctttttactgggaaattgaaatcgtttcctatggagacaccgatgatgacaccggacccatagtttcctttggcttcactacagaagcagagaagcgagatggggcttggactaatccagtgggcacttgtcttttccataacaacggccgagccgtgcactataatggctccagtttgttacagtggaagagcgttcgcttagacgtgactctctcccccggtgacgtggcaggaattggctgggagagaactgaggggactccacctcctccgggacagccagccaagggccgggtgtacttcacatactgcgggcagcgcctctcaccatatcttgaagacgtctctggtggcatgtggccagtggttcacattcagaaaaagaacaccaaaacccgagctaactttggctcccggccgtttgcctacgcggaagggcaggcccaccgcaatgctgctgacctgtgcactgacctagcagaagagatcagcgctaactttgaggccctgcctttcgccatggcatctgacagtgacaatgatgctggcaccagtattgcatcagacccaggcactcatgggccaccatgccggattgctgccgtggccaccgctcagcaacaatatgatagtgacacctcctgtcattataaagtcgagctcagctatgagaatttcatcacctctggcccagaccctcacccgcctcccattgcagatgatgaaagcgatgatgatgacgatgatgacatccctcaggaggaccactacgccctgctggtgaaagcatgggagaccaaggtttttcctaccatccgaagacgcttccgcaatgaagcagagcggaaatcgggcctggaccagataaagggggccttacaactaggtatggtggatattgcccgacagacggttgaatttctctacgaagagaatggtggcatcccaagagacctttatcttcccaccattgaagacattaaagacgaagcaaacaagttcacaattgataaagttcgaaaaggtctcacagtagtaacccgctctccagacagcaataatgtagccagcagtgctgttggaactgctctgccaaaatttgccatccgagggatgctgaaaacctttgggcttcatggagtcgtcttagatgttgattcagtgaatgaactggtgcaggtagaaacgtacctccgcagtgaaggtgtgctggtgcgatactggtatcctattgacatgttggaaaggcccccagcaggctaccgaaggactgccaccaatgggctggtcacactggacaataccaaccttcaaattcacagggagctgctgcgctgcgaggctgcgctggccaggctgtactgccgcatggccctgctcaatatcttcgccccgaagttgcctcacttgttcactcgcctcttccacatccctgccatccgggacattaccctggagcacctgcaactgctgtccaatcagctcctcgcacctcctctcccagacggcaccatcagctccagctcgatcctcctggcgcagtctttacagcattgcatccattcccagaactgctccgccacggacctcttttaccagggcaactcccagacagtgagagagtggctcaacgtggccatcacccggaccctgcaccagggcgaggagagccttttagagctgacgaaacagatctgctctttcctgcagacagcaccagagcagttcccctccgaagagttcccaatttccgaatccaaagtcaacatggacgtgaatttccccggggcagcttttgttgttgtgtcttgtaaagaaagtcaatctggattccgcaaagactcctctctgtacaaggcaccgtgggcacgggtgctcgtatatggcctcggccacaaagtgaagcgaaatggccagctgaacctcatcgaggccgcctgttacccgcgggacgcgtccccagccaacactgggcttgcacctccccccaccgctgaccagtacccctctgtggtcctctccacagacagggtccacatcaaactgggggtgtctccacctcctggagcagtcctggtgttacattccctgcccctggagttcccactggctatggccttcgcagagcagctgctgtcctggaaatcagaggacagtgaagggaagtccgaagatgagcctgacaccattccgacatccgtcctcctgcaggtggtggagctgctaggaaacttcttgtggaccacggacatggcagcctgcgtgaaggagcttgttttccatctcctggcagagctcctgcgcacggtgcacaccctggagcagaggcggcaccccgctggcctgtcctcctcaatcgccctccagctgaacccctgcctggccatgctgatggccttgcagtcggagctccacaagctgtacgacgaggagacgcagaactgggtctcaggcggcgcctgcgggggctccgggggggcggcggccggtgaccagggcaggttctctacgtattttcatgcactcatggaagggtgcctggctgtggccgaagtgaccctgcctactaacatgagtgtcacagccagtggggtgacctcagcgaccgccccaaatctcagtgactcgtcctcctcctcctcgtcctccccaggacagaccccacagagtcccagcctcctctccaagaggaaaaaagtcaagatgaagcgggaaaaggcctcctcgtcgggcaagcgccagtcttcccgcaccgtggactcggaccccaccgtgctcagcatcggaggcagcaagcccgaggacatgctgtggttccaccgcgcactcaccctgctcatcatcctccgccacctcaccaggaaggacccacaggggctgggcgtgacgagtgacgccatcgccgatgcctgccaggccctggtgggccccaccgcccacagccgcttgctggtgatctccgggatccccacccacctggacgagggcgtagtcagaggcgccatccgcaaggcctgcaacgcccacggcggggtcttcaaagacgagatctacatcccgctgcaggaagaagacaccaagaagccaaaagacaaggccgagggcggggacgggaaagttgagcccgagaagacactggccttccccggcacagacagcatggaggtcagcacgtccagcagcctgacccccgccatgagcatcagcgcctccgcctccaccagccaggcctccatctgcagctcgcagggcatctcccaaaccgtcagcgacctctctgtggatccgctgcctgccggcctcgagctgcccatccctccgggcctgttggagccccacgcggtgtccagccaggaaagcctggacatttccctgtgcagcaccggcagcctgggcagcctgggcagcctgggggagcccctggacaatgcagagacggcctcggtgtcggacatgggctccatgtacacagtcacttccctggacaaccagcccctcgccgcccgccccatcaaaggcttcgcagtcgtggagataagatcccgagccaaaattgagaaaattcgagcaagtttatttaacaataatgacttgattggtttgtcaagtttggatggtgaagatgaattgatggaaatgtcaacagaagagattctaaccgtgtctgtagtaaatcagagtctctttgatactcaagggagcccagggttagaagattatttcaatgataagtcaattaaaggggagaagctggtgcccggagccagagaggttctgacggagatatttaagagttgtgcccattcagagcagacgctgagcctgacaccagcgaagcccatcagagtctctgacatttatcttagcaaagagcagatcaactcccagaccccaggcaacctcctccacctcttcttcaccaatgtccggccgccaaaaaaggtgctggaggatcagctcacccagatcctgaggaagtatggcgtgccaaagcccaagtttgacaagagcaagtacagcaaggccgggaaggagcagcaccccgtgaaggtggtgagcaccaagcggcctatcaccaagccgcccgccaaggacaaggctgtgctcaacagcgtcagcaggactgccttaagtgagaagaagccaactgtgaagccaaaatcaccagaaaagagcaaaccagatgaaaaggacccagaaaagtcacctaccaaaaaacaagaagtccctgaggaaaaatacctgacgctggaaggatttcacaaatttgttattgaccgagccaggcaagatatccgtagcgtctggagggcgatcttgtcctgtggttacgatcttcactttgagaggtgcgcatgcatcgatgtccgacatgcacagaaggcctcaagaaagtggaccctggagatggacgtggcacttgtgcagtacatcaaccagctatgccgccacctcgccatcacacccgcacggctccatccccatgaggtgtacctggaccccgcggatgctgctgaccccagagtggcctgtctcctgaacgtgcccatcgagagcctgcgcctgcgcttcgccttgctgcagtccctcaacaccacactggagaccttcttcctgcccctggtggagctgcgccagacacccatgtatacccacagcatcgccgccctgctgaaggaggccaaagggctgatcttctatgacacgaaggtgaccgtgatgaatcgagtgctgaatgccactgtgcagaggacagcggaccacgcggcccctgagatcaccttggacccactggaaattgtgggaggggaaatcagagcttctgaaaactcctacttctgtcaggctgccaggcagctggcctcagtgccgtcgtctcagctctgcgtcaagctggccagtggcggtgaccccacatatgccttcaacatccgcttcactggcgaggaggtccatggcaccagcggctctttccgccacttcctgtggcaggtgtgtaaggagctgcagagttcctcgctgtcgctgctgctgctgtgccccagctcagctgtcaataagaacaagggcaagtatatcctgaccccgagccccatcacctacggggaggagcagctgctgcacttcctggggcagctgctggggattgcaattcgggcagacgtcccgctgcccctggacctcctgccctccttctggaagacgctggtgggcgagcccttggaccctgagcaagacctgcaggaagcggatatcctcacctacaattacgtcaagaagtttgagagcatcaatgatgagaccgagctggaggccctgtgcgctgagatcgcctcccagcacctggccacggagagccctgacagccccaacaagccctgctgcaggttcacctacctgaccatgacgggcgaggaggtggagctgtgcagccggggccggcacatccttgtggcgtgggagaacaaggacatctacgcggcagccatccggagcctgcggctgcgggagctgcagaatgtggagtgcgtgacggccgtgcgggccggcctgggctccatcatccccctgcagctgctgaccatgctcagcccactggagatggagctgcgcacctgcggcctcccctacatcaacctcgagttcctcaaggcccacaccatgtaccaagtggggctgatggagacggaccagcacatcgagttcttctggggggccctggagatgttcacccaggaggagctgtgcaagttcatcaagtttgcctgcaaccaggagcgcatcccgttcacctgcccctgcaaagatgggggtcccgacactgcccatgtgcccccgtaccccatgaagatcgcccccccagatggcacagcaggttccccagactctcgctacatccgcgtggagacctgcatgttcatgatcaagcttccccagtactcctctctggaaatcatgctggagaaacttcgttgtgccattcactaccgtgaagaccccctcagtggctgatgggagggagccccagaattaggctgtcactgaggcacccactctgctggcttgggaagccaccactgcggcccgtccctccagggccctgcgtgaggagttggcaacattttgcttttccaaactttcgtccacattccagggcctcctggaagacttaaccttttgtctttgtacgtttcgtgatgggttggttcttttgctgcctgtttgtggtctatttgtaggatagtttagttcccagacagtttgtgtctaatttgatcttcttggacattgtccctcatggccaccagattctaatgccataaggccccagctggttccccatcacagaaccacccagcaggaagccgggggtacaatgacctcggccacacagagcgctcgtgctttcagcagagcgcctccacagacaagcctgtggccagccctgccctccagcctcgagctggagttgctccagaggcagccccagcaggcctccctccacatagaggtggctgggccaattgcccaaacacgtgagacacacagggagctttatgtgttcatcttcctgctttagaacttgctcccggtcttggtttttctgaggaaaagcccacagtggttcccctgcccctcccatacctccctatctgccgtctgtctctttgggccctggtctgacagttttcatctgaggcctcctcgggagcaggagacttaagggttcatcccgaccttagttcacagagcctagctgggtgcatcccagccgcagggggtgagaagacacccagagatgggggacaatgctcaggtgggggcctcctccgagactctggttgagaggaaagcacatgattcaagcctaccccacaaaaaaggagcacaaaatgctcagaaatggcccttcctccctgcagtgacgtaggacaagggaaagggccacacccattttcaaaagagtggactgaggtgctctgctcaatttggggtctgctttagtgacccagacactcaagtccagatggagactccaggggggtccttctgcccctctggccagccccacccagcactccccatcaccccatgtaagtgtgtatgccagggctgagctgcctccaggctcacccactgcatctttgccccaaataggtctttgtccagtggtactttgttcatgagcagcacaggccatcttgttggacactgtcactttgggccttgccaggtctcacagaatcacatcgctgtatttattgtataatattgtgaatattggaagttttgagtgagtgctgtctagaaggttttggagtgtggatgctggtccaagaaagaagatgtgccctggcctgctggaaagattgtgaattctagagatagagccgttagcatccatctcctccctgtaactcttaggaaatgcatcaaggaccattatagaaaggatcccctgacctaaggatgaaatcgacctagggttaatcatgacagctgcatcagttgtattggatgcaagtcaactctggagtcctcatcccttgaatggacttgtcagctacctccccaggaggagttcagaagcttctgttggccatcacttgagtagatgacaagctgtaaggtatctgctgctaacgtggctgcttctccgagagcacattgaggtccagacagatccaaaccttggccctaaaaaatgtgtgctgtaaagttacttgatgtatatttattataattatttatggttgcatttaacaaacttttcattcaatctgatgctatttacaccatgctgtgtaaaggaagctcactaaaggaaaaaagtcacaccaataaataaccttcatctaattttgatttaccttaagagttgtgtgatcatctactcttgctgagcaagttcaaaggctggcatgcttggatggctctgatatttaagtgctgccaagtggctaggaattaaagtgtttctaatta

SEQ ID NO: 1603 - DNA, 2658 bp, Homo sapiens
ggcagtgggcggcgtagagcactgcagcagcaatgacggagggcacgtgtctgcggcgccgagggggcccctacaagaccgagcccgccaccgacctcggccgctggcgactcaactgcgagaggggccggcagacgtggacctacctgcaggacgagcgcgccggccgcgagcagaccggcctggaagcctacgccctggggctggacaccaagaattactttaaggacttgcccaaagcccacaccgcctttgagggggctctgaacgggatgacattttacgtggggctgcaggctgaggatgggcactggacgggtgattatggtggcccacttttcctcctgccaggcctcctgatcacttgccacgtggcacgcatccctctgccagccggatacagagaagagattgtgcggtacctgcggtcagtgcagctccctgacggtggctggggcctgcacattgaggataagtccaccgtgtttgggactgcgctcaactatgtgtctctcagaattctgggtgttgggcctgacgatcctgacctggtacgagcccggaacattcttcacaagaaaggtggtgctgtggccatcccctcctgggggaagttctggctggctgtcctgaatgtttacagctgggaaggcctcaataccctgttcccagagatgtggctgtttcctgactgggcaccggcacacccctccacactctggtgccactgccggcaggtgtacctgcccatgagctactgctacgccgttcggctgagtgccgcggaagacccgctggtccagagcctccgccaggagctctatgtggaggacttcgccagcattgactggctggcgcagaggaacaacgtggcccccgacgagctgtacacgccgcacagctggctgctccgcgtggtatatgcgctcctcaacctgtatgagcaccaccacagtgcccacctgcggcagcgggccgtgcagaagctgtatgaacacattgtggccgacgaccgattcaccaagagcatcagcatcggcccgatctcgaaaaccatcaacatgcttgtgcgctggtatgtggacgggcccgcctccactgccttccaggagcatgtctccagaatcccggactatctctggatgggccttgacggcatgaaaatgcagggcaccaacggctcacagatctgggacaccgcattcgccatccaggctctgcttgaggcgggcgggcaccacaggcccgagttttcgtcctgcctgcagaaggctcatgagttcctgaggctctcacaggtcccagataaccctcccgactaccagaagtactaccgccagatgcgcaagggtggcttctccttcagtacgctggactgcggctggatcgtttctgactgcacggctgaggccttgaaggctgtgctgctcctgcaggagaagtgtccccatgtcaccgagcacatccccagagaacggctctgcgatgctgtggctgtgctgctgaacatgagaaatccagatggagggttcgccacctatgagaccaagcgtggggggcacttgctggagctgctgaacccctcggaggtcttcggggacatcatgattgactacacctatgtggagtgcacctcagccgtgatgcaggcgcttaagtatttccacaagcgtttcccggagcacagggcagcggagatccgggagaccctcacgcagggcttagagttctgtcggcggcagcagagggccgatggctcctgggaaggctcctggggagtttgcttcacctacggcacctggtttggcctggaggccttcgcctgtatggggcagacctaccgagatgggactgcctgtgcagaggtctcccgggcctgtgacttcctgctgtcccggcagatggcagacggaggctggggggaggactttgagtcctgcgaggagcggcgttatttgcagagtgcccagtcccagatccataacacatgctgggccatgatggggctgatggccgttcggcatcctgacatcgaggcccaggagagaggagtccggtgtctacttgagaaacagctccccaatggcgactggccgcaggaaaacattgctggggtcttcaacaagtcctgtgccatctcctacacgagctacaggaacatcttccccatctgggccctcggccgcttctcccagctgtaccctgagagagcccttgctggccacccctgagaacatgcctacctgctgggtgccgtctgtgcgttccatggccttcaagtcacaggacgcagcgattccctgccctcttcggtgttattacacaggcaggacttcagtgtcagtatccctgccttcagtcttctttagaaatcacatctgtgttcaatccattgtttagagggagtgtatttttcctgttccacgaagaggactttttgttcacaattggatcacaatgcagaggagtctgttcctcccccgtcggcttctcggtgctgggagggtgacctgtcccagatgactcatcaccctgacatgctcttgacaaaggacaccaccaagaggagatggcagctgtaccggtgcagcctctgtctgagggggatatttgcctcagtgtgattaaaaatcagtcatgaaagaaaaaaaaaaaaaa

SEQ ID NO: 1604 - DNA, 4225 bp, Homo sapiens
ggcagtgggcggcgtagagcactgcagcagcaatgacggagggcacgtgtctgcggcgccgagggggcccctacaagaccgagcccgccaccgacctcggccgctggcgactcaactgcgagaggggccggcagacgtggacctacctgcaggacgagcgcgccggccgcgagcagaccggcctggaagcctacgccctggggctggacaccaagaattactttaaggacttgcccaaagcccacaccgcctttgagggggctctgaacgggatgacattttacgtggggctgcaggctgaggatgggcactggacgggtgattatggtggcccacttttcctcctgccaggcctcctgatcacttgccacgtggcacgcatccctctgccagccggatacagagaagagattgtgcggtacctgcggtcagtgcagctccctgacggtggctggggcctgcacattgaggataagtccaccgtgtttgggactgcgctcaactatgtgtctctcagaattctgggtgttgggcctgacgatcctgacctggtacgagcccggaacattcttcacaagaaaggtggtgctgtggccatcccctcctgggggaagttctggctggctgtcctgaatgtttacagctgggaaggcctcaataccctgttcccagagatgtggctgtttcctgactgggcaccggcacacccctccacactctggtgccactgccggcaggtgtacctgcccatgagctactgctacgccgttcggctgagtgccgcggaagacccgctggtccagagcctccgccaggagctctatgtggaggacttcgccagcattgactggctggcgcagaggaacaacgtggcccccgacgagctgtacacgccgcacagctggctgctccgcgtggtatatgcgctcctcaacctgtatgagcaccaccacagtgcccacctgcggcagcgggccgtgcagaagctgtatgaacacattgtggccgacgaccgattcaccaagagcatcagcatcggcccgatctcgaaaaccatcaacatgcttgtgcgctggtatgtggacgggcccgcctccactgccttccaggagcatgtctccagaatcccggactatctctggatgggccttgacggcatgaaaatgcagggcaccaacggctcacagatctgggacaccgcattcgccatccaggctctgcttgaggcgggcgggcaccacaggcccgagttttcgtcctgcctgcagaaggctcatgagttcctgaggctctcacaggtcccagataaccctcccgactaccagaagtactaccgccagatgcgcaagggtggcttctccttcagtacgctggactgcggctggatcgtttctgactgcacggctgaggccttgaaggctgtgctgctcctgcaggagaagtgtccccatgtcaccgagcacatccccagagaacggctctgcgatgctgtggctgtgctgctgaacatgagaaatccagatggagggttcgccacctatgagaccaagcgtggggggcacttgctggagctgctgaacccctcggaggtcttcggggacatcatgattgactacacctatgtggagtgcacctcagccgtgatgcaggcgcttaagtatttccacaagcgtttcccggagcacagggcagcggagatccgggagaccctcacgcagggcttagagttctgtcggcggcagcagagggccgatggctcctgggaaggctcctggggagtttgcttcacctacggcacctggtttggcctggaggccttcgcctgtatggggcagacctaccgagatgggactgcctgtgcagaggtctcccgggcctgtgacttcctgctgtcccggcagatggcagacggaggctggggggaggactttgagtcctgcgaggagcggcgttatttgcagagtgcccagtcccagatccataacacatgctgggccatgatggggctgatggccgttcggcatcctgacatcgaggcccaggagagaggagtccggtgtctacttgagaaacagctccccaatggcgactggccgcaggaaaacattgctggggtcttcaacaagtcctgtgccatctcctacacgagctacaggaacatcttccccatctgggccctcggccgcttctcccagctgtaccctgagagagcccttgctggccacccctgagaacatgcctacctgctgggtgccgtctgtgcgttccagtgaggccaaggggtcctggccgggttggggagccctcccataaccctgtcttgggctccaacccctcaacctctatctcatagatgtgaatctgggggccaggctggaggcagggatggggacagggtgggtggcttagactcttgatttttactgtaggttcatttctgaaagtagcttgtcgggcttgggtgaggaagggggcacaggagccgtgacccctgaggaggcacagcgccttctgccacctctgggcacggcctcaaggtagtgaggctaggaggttttttctgaccaatagctgagttcttgggagaggagcagctgtgcctgtgtgattccttagtgtcgagtgggctctgggctggggtcggccctgggcaggcttctcctgcaccttttgtctgctgggctgagggacacgagggcaaccctgtgacaatggcaggtagtgtgcatccgtgaatagcccagtgcgggggttgctcatggagcatcctgaggccgtgcagcagggagccccatgcccctgggtcgtgagcttgcctgcgtatggggtggtgtcatggagcctcatgcccctgggtcgtgagctcgcctgagtatggggtggtgtcatggagccgcatacccctgggttgtgagctcgcctgcatatgcagggtctgtcatggaacatcccaagtctgtgcagcagggagccccatgcccctgggacatgaacccacctgcgtggaatgctgtttgtgaggtgtctacagggtttatagtagtcttgtggacacagaaatgcacaggggacacttacggacacagaaatgcacaggggaggccgagcataaccaggggtgaggggcaggcagcagttgtagttactgccgcggggcactgctatgtgcagggacagccagcgcccagcccatcaccactccctgggctggctggcaggtatggcaccctgggagcccggcatatacccagggcacccctacggctgccgccagtctcatgcccaggtgggtgctctgggctggagcgagggccaggttttgggccgaggcttccccaggcaatcctgtgagctcccttctagcctctgacccagtctggtctggcttgcatggatgtagggcttggggtgggaagttcaggtcctggctttgcctttgcctgatgtggatgagcagctcacatgctcagggccacctgagactgtcactgctctcccctggctactgggaggagtcactgagagcttcgttacccctgctgccttgcccagggcacaccctatacctcctcatctgctcttcccctccctgccgccttctgggcaggtagcagtccctggcctctccccctggctgatcactctccctcaggcagtggagatctgcgtctggacaccctcagatcctgtcattgcctgcccagagtccttcaggggcacccctctgccttggtgtgcggtccagggctctcacccaggtgccgcaccctctggggtcttctgtccagctcccttgccccatgtgctgtcactgactctccttgggactcgcctgcctgctcagagccctgcagggcttggtcagctgcctgttcagtgtcaacacttccctgcacatcttaaaactgggctttattttcgctgaaggaactgtgttgggacccttgacatctgtcaggtttgcacatgctgtttttttttctcagcccacgtgttctcccccacgtggggtagcagcaggacagacagtgaatcacagagtctgccctgagcagaggctgctgtccctgggactcctagccatggtcagactgtacaaaacggttttccagaaatgaaatgtaaatccatttttatactgaaaatgttactgaaagtcacttttatgagcatctgccttaataaacagacattgattcccttatcagaaaaaaaaaaaaaaaaa

SEQ ID NO: 1605 - DNA, 1908 bp, Homo sapiens
gaaagatggcgtcctcggagcaggcagagcagccgagccagccaagctctactccaggaagtgaaaatgtgctgcctcgagagccgctgattgccacggcagtgaagtttctacagaattcccgggtccgccagagcccacttgcaaccaggagagcatttctaaagaagaaagggctgacagatgaagagattgatatggccttccagcagtcgggcactgctgccgatgagccttcgtccttgggcccagccacacaggtggttcctgtccagccccctcacctcatatctcagccatacagtcccgcaggctcccgatggcgagattacggcgccctggccatcatcatggcaggcattgcatttggctttcaccagctctacaagaaatacctgctccccctcatcctgggcggccgagaggacagaaagcagctggagaggatggaggccggtctctctgagctgagtggcagcgtggcccagacagtgactcagttacagacgaccctcgcctccgtccaggagctgctgattcagcagcagcagaagatccaggagcttgcccacgagctggccgctgccaaggccaccacatccaccaactggatcctggagtcccagaatatcaacgaactcaagtccgaaattaactccttgaaagggcttcttttaaatcggaggcagttccctccatccccatcagccccgaagatcccctcctggcagatcccagtcaagtcaccgtcaccctccagccctgcggccgtgaaccaccacagcagcagcgacatctcacctgtcagcaacgagtccacgtcgtcctcgcctgggaaggagggccacagccccgagggctccacggtcacctaccacttgctgggcccccaggaggaaggcgagggggtggtggacgtcaagggccaggtgcggatggaggtgcaaggcgaggaggagaagagggaggacaaggaggacgaggaggatgaggaggatgatgatgtgagccatgtggacgaggaggactgcctgggggtgcagagggaggaccgccggggcggggatgggcagatcaacgagcaggtggagaagctgcggcggcccgagggcgccagcaacgagagtgagcgggactagggctgcgcctgctgcctccagccctgaggatggcatctagtgtgcccgtgcgtggccataccctgcctccctctctggccctgggagggcagcttggagcccaggtagggggcagagctgtcctcagctgcactgcggcctggtggcagtgtggggagtcacacttctgtccacctggcctcctctcgcctggccgccagccccagccccagccccagccccaggcccagctgcctttggctttgatctcaagtcaggctgaaggcagcgaagcctcggggcccaagcccctccccagccccctctcccggacagacgccttgcccagggtgtgtttgctgagtgtcttgactaccgtgacaccacgcatggccagagctagcgtccctactgcctcccgactcctcagtggaggaggagctgcggtccctctggtgtctgccatccccctccctccctgggcccggccctggacccgtcaggtgcctgtccccagccccaaccccactcatgccccgtcgtcctcccagacaaatgaaaccacgctgcgcttccgatgcccccgcttgccgtgtaatggttcagctaatcccatggcgagatgggggctcattccggaggaggagccaggcagcagggccttcctgaccaacagccagttttgtccttccccccaggaaaaaaatgttcatttgtgtgatcatgtatagacctcagaacggaagataggactgtatataattgtaataaataccagttgccactattt

SEQ ID NO: 1606 - DNA, 4096 bp, Homo sapiens
acgatggcagcgtcagtggcagctgcagcccggaggctgcggcgggccattcgaaggtcgcccgcatggcggggcctcagccatcggccgctctcatcggagccccctgcagccaaggcctcggccgtgagggccgcctttctgaacttctttcgggaccgccatggccaccggctggtgccctccgcttccgtgcggccccgcggcgaccccagtttgctttttgtcaatgcgggcatgaaccagttcaagccaatctttctgggcaccgtggatccacgaagcgagatggcaggcttccgacgtgtggccaacagccagaaatgtgtgagagctggaggacaccataacgacctggaagatgtgggtcgagacctttcccatcataccttctttgaaatgcttggcaattgggcctttgggggtgaatattttaaggaggaggcttgtaacatggcctgggaactgctgactcaggtctatgggatccctgaggaaaggctctggatctcctactttgatggtgaccccaaggcagggctggacccagacctggagaccagggacatctggctgagcttaggggtgcctgctagccgtgtgctttcctttggaccacaagagaacttctgggagatgggggatactggcccttgtgggccctgtactgagatccactacgaccttgctggtggggtgggagccccccagctggtagagctttggaacctggtcttcatgcaacacaacagagaggcagatggaagcctgcagcccctgccccagcggcatgtggacacaggaatgggcctggaaaggctggtggctgtgctgcaaggcaaacactccacctatgacactgacctcttttccccgctgctcaacgccatacagcagggctgcagggcacccccttacttgggccgagtaggggtggcagacgaggggcgcacagacacagcgtaccgcgtggtggctgaccacatccgcacactcagtgtctgcatctctgatggcgtcttccctgggatgtcaggtcccccgctggttcttcgtcggatcctgcgtcgagctgtgcgtttctccatggagatcttaaaggcaccacctggcttcctaggcagcctggtacctgtagtggtggagacactgggagatgcttatccagaactgcaaaggaactcagcccagatcgccaacctggtgtcagaggacgaggcagccttcctggcctccctggagcggggtaggcggatcattgatcggactctgaggaccctggggccttcagatatgttccctgctgaagtggcctggtccttgtcactgtgtggagacctgggactccccttggacatggtagagctgatgctggaggagaaaggggtccagctagactccgctggactggagcggttggcccaagaggaggcccagcaccgggcacggcaggctgagccagttcagaagcagggattgtggcttgatgtccatgcgcttggggagctgcagcgccaaggagtgcccccaactgacgacagccccaagtacaactactccctgcgacccagcggaagttatgagttcggcacctgtgaggcccaggtgttgcaactgtatacagaggacgggacagcagtggcctccgtggggaaaggccagcgctgtggcctcctcttggacaggaccaacttctacgcagaacaggggggccaggcttcagaccgtggctacctggtgcgggcagggcaagaggacgtgctgttcccagtagcccgggcccaggtctgtggaggtttcatcctgcatgaggcagtagcccctgagtgcctgcggttaggggaccaggtgcagctgcatgtggatgaggcctggcgtctaggctgcatggcgaagcatacggccacccacctgctgaactgggcactgaggcagaccctgggccctggcacagagcagcagggctcccatctcaatcctgagcagctgcgcttggatgtgaccacccagaccccattgaccccagagcagctccgggcagtggagaacactgtgcaggaggccgtggggcaggatgaggctgtgtacatggaggaggtgcccctggcgctcactgcccaggtccctggcctgcgctctctggatgaggtttacccagaccctgtgcgggtggtatcagtgggggtgcccgtggcccatgcattggacccagcctcccaagccgcactgcagacctctgtggagctatgctgtgggacgcacctgttacgtactggggctgtaggggacctggttatcatcggggaccgccagctttccaagggcactacccgcctgctggccgtcactggggagcaggcccagcaggcccgagagctaggccagagcctggcccaggaagtgaaagcggccactgagcggctgagtctggggagccgggatgtggcggaggcactgaggctgtccaaggacataggacgactcattgaagctgtggaaactgctgtgatgccccagtggcagcggcgggagctgctggccacagtgaagatgctgcagcggcgtgccaacactgccatccgtaagctgcaaatgggacaggctgcaaagaaaactcaggagctgctggagcggcactcgaaggggcctctgattgtggacacagtctctgctgagtctctctcagtgctggtgaaggtggtacggcagctgtgtgagcaggcccccagcacgtctgtgctcctactcagcccccagcccatggggaaggtgctgtgtgcctgtcaggtggcccagggtgccatgcccaccttcacagcagaggcctgggcactggcagtgtgcagccacatggggggcaaggcgtggggctcgcgagtggtggcccaaggcaccggaagcactactgacctggaagctgccctcagtatagcccaaacctatgccctcagccagctctgacccaggtccgcccagggacccacatggactaaaggcaatgccaggagccctgaaggagccagcagaaccttcccacatgctgaagcgaggactagaggctggaggccaagcagctgagccaaagaagatcacctgggccagggcctacatgacacaaggagacatgggctagggaaggcagaactgggcccaaagacacacacccccttggtgaaagagaagacatggacaattatggctgtgactgcacattagaaattatttcactggccgggtgtggtggttcacacctgtaatccaagcactttgggaggccgaggcaggtagatcatgaggtcagaagatcaaaaccatcctggctaacacggtgaaaccccatctctactaaaaatacaaaaaattagccgggtgtggtggcacacacctgtagtcccagctactcgggaggctgaggcagaagaatcgcttgaacctgggaggtggaggttgcagtgggccaagatcgcaccactgcactccagcctgggtgacagagcgagactctgtctcaaataaataaattatttcacagaggatagcaagctccagaaggttctattacctttaaaaaagagtagttttgcccctcccagcaacctggtatgggtgccctaagaccagtctgaactcacactgtctgaaaggccacccaggatccaaatcgggccatcttcattgccatgagtgttcggacaggctctgcgtgccaggcaacagtgggcagacaaagggctccctggctactgggaagatacagaaccatcctgtgaaaatcatttcagcactggagaccttctttgctattacttctttcattaacaatgacctctaatttaaattgggccctgctggtttgttgatgaattgagcaactgagaacgtggcgggcactaaactgacagttccttccttcatggagcctgcttcatgtggaggaaacaggaaataaagcaaaagaagagggtcaggcttggtggctcatgcctataatcctggcattttaggaggctgaggttggagaatcgcttgaggccagaagtgcaagaccagcctgcgcaaacagcaagaccctgtctacaaaaaaaaaaaaaaaaaa

SEQ ID NO: 1607 - DNA, 1652 bp, Homo sapiens
ctgcttaaacctctgtctctgacggtccctgccaatcgctctggtcgaccccaacacactaggaggacagacacaggctccaaactccactaaccagagctgtgattgtgcccgctgagtggactgcgttgtcagggagtgagtgctccatcatcgggagaatccaagcaggaccgccatggaggaaggtcaatattcagagatcgaggagcttcccaggaggcggtgttgcaggcgtgggactcagatcgtgctgctggggctggtgaccgccgctctgtgggctgggctgctgactctgcttctcctgtggcactgggacaccacacagagtctaaaacagctggaagagagggctgcccggaacgtctctcaagtttccaagaacttggaaagccaccacggtgaccagatggcgcagaaatcccagtccacgcagatttcacaggaactggaggaacttcgagctgaacagcagagattgaaatctcaggacttggagctgtcctggaacctgaacgggcttcaagcagatctgagcagcttcaagtcccaggaattgaacgagaggaacgaagcttcagatttgctggaaagactccgggaggaggtgacaaagctaaggatggagttgcaggtgtccagcggctttgtgtgcaacacgtgccctgaaaagtggatcaatttccaacggaagtgctactacttcggcaagggcaccaagcagtgggtccacgcccggtatgcctgtgacgacatggaagggcagctggtcagcatccacagcccggaggagcaggacttcctgaccaagcatgccagccacaccggctcctggattggccttcggaacttggacctgaagggggagtttatctgggtggatgggagccacgtggactacagcaactgggctccaggggagcccaccagccggagccagggcgaggactgcgtgatgatgcggggctccggtcgctggaacgacgccttctgcgaccgtaagctgggcgcctgggtgtgcgaccggctggccacatgcacgccgccagccagcgaaggttccgcggagtccatgggacctgattcaagaccagaccctgacggccgcctgcccaccccctctgcccctctccactcttgagcatggatacagccaggcccagagcaagaccctgaagacccccaaccacggcctaaaagcctctttgtggctgaaaggtccctgtgacattttctgccacccaaacggaggcagctgacacatctcccgctcctctatggcccctgccttcccaggagtacaccccaacagcaccctctccagatgggagtgcccccaacagcaccctctccagatgagagtacaccccaacagcaccctctccagatgagagtacaccccaacagcaccctctccagatgagagtacaccccaacagcaccctctccagatgcagccccatctcctcagcaccccaggacctgagtatccccagctcaggtggtgagtcctcctgtccagcctgcatcaataaaatggggcagtgatggcctcccaaaaaaaaaaaaaaaaaaaaaaaaaaaaaaaaaaaaaaaaaaaaaaaaaaaaaaaaaaaaaaaaaaaaaaaaaaaaaaaaaaaaaaaaaaaa

SEQ ID NO: 1608 - DNA, 1089 bp, Homo sapiens
ggcacagtaagtactttctgtgccgctactgtctatccgcagccatccgcctttctttcgggctaggccgccccggggactgagagttaaggagagttggaggctttactgggccacagggttcctactcgcccctgggcctccggacaaaatggggtctgcggttggtgtcctggcaaaagcagggtagaagggctgcggggcgggcccagaatccgagcctgcagagatgggagcagttgcagtgttgagggcggaagaggagtgcgtcttgttttgggaactgcttcacaggatccagaaaaggaaatgcccggcgaagccacagaaaccgtccctgctacagagcaggagttgccgcagccccaggctgagacagggtctggaacagaatctgacagtgatgaatcagtaccagagcttgaagaacaggattccacccaggcaaccacacaacaagcccagctggcggcagcagctgaaatcgatgaagaaccagtcagtaaagcaaaacagagtcggagtgaaaagaaggcacggaaggctatgtccaaactgggtcttcggcaggttacaggagttactagagtcactatccggaaatctaagaatatcctctttgtcatcacaaaaccagatgtctacaagagccctgcttcagatacttacatagtttttggggaagccaagatcgaagatttatcccagcaagcacaactagcagctgctgagaaattcaaagttcaaggtgaagctgtctcaaacattcaagaaaacacacagactccaactgtacaagaggagagtgaagaggaagaggtcgatgaaacaggtgtagaagttaaggacatagaattggtcatgtcacaagcaaatgtgtcgagagcaaaggcagtccgagccctgaagaacaacagtaatgatattgtaaatgcgattatggaattaacaatgtaaccatatggaagcaactttttttggtgtctcaaaggagtaactgcagcttggtttgaaatttgtactgtttctatcataaataaagttatggcttcttgttggaaaaaaaaaaaaaaaaaaaaaaaaaaaaaa

SEQ ID NO: 1609 - DNA, 2579 bp, Homo sapiens
aagccccgcccggccgggctccgcgccttcccttccctcccttcctccaagcttctcggttccctcccccgagataccggcgccatgtccagcgctcggacccccctacccacgctgaacgagagggacacggagcagcccaccttgggacaccttgactccaagcccagcagtaagtccaacatgattcggggccgcaactcagccacctctgctgatgagcagccccacattggaaactaccggctcctcaagaccattggcaagggtaattttgccaaggtgaagttggcccgacacatcctgactgggaaagaggtagctgtgaagatcattgacaagactcaactgaactcctccagcctccagaaactattccgcgaagtaagaataatgaaggttttgaatcatcccaacatagttaaattatttgaagtgattgagactgagaaaacgctctaccttgtcatggagtacgctagtggcggagaggtatttgattacctagtggctcatggcaggatgaaagaaaaagaggctcgagccaaattccgccagatagtgtctgctgtgcagtactgtcaccagaagtttattgtccatagagacttaaaggcagaaaacctgctcttggatgctgatatgaacatcaagattgcagactttggcttcagcaatgaattcacctttgggaacaagctggacaccttctgtggcagtcccccttatgctgccccagaactcttccagggcaaaaaatatgatggacccgaggtggatgtgtggagcctaggagttatcctctatacactggtcagcggatccctgccttttgatggacagaacctcaaggagctgcgggaacgggtactgaggggaaaataccgtattccattctacatgtccacggactgtgaaaacctgcttaagaaatttctcattcttaatcccagcaagagaggcactttagagcaaatcatgaaagatcgatggatgaatgtgggtcacgaagatgatgaactaaagccttacgtggagccactccctgactacaaggacccccggcggacagagctgatggtgtccatgggttatacacgggaagagatccaggactcgctggtgggccagagatacaacgaggtgatggccacctatctgctcctgggctacaagagctccgagctggaaggcgacaccatcaccctgaaaccccggccttcagctgatctgaccaatagcagcgccccatccccatcccacaaggtacagcgcagcgtgtcggccaatcccaagcagcggcgcttcagcgaccaggctggtcctgccattcccacctctaattcttactctaagaagactcagagtaacaacgcagaaaataagcggcctgaggaggaccgggagtcagggcggaaagccagcagcacagccaaggtgcctgccagccccctgcccggtctggagaggaagaagaccaccccaaccccctccacgaacagcgtcctctccaccagcacaaatcgaagcaggaattccccacttttggagcgggccagcctcggccaggcctccatccagaatggcaaagacagcacagccccccagcgtgtccctgttgcctccccatccgcccacaacatcagcagcagtggtggagccccagaccgaactaacttcccccggggtgtgtccagccgaagcaccttccatgctgggcagctccgacaggtgcgggaccagcagaatttgccctacggtgtgaccccagcctctccctctggccacagccagggccggcggggggcctctgggagcatcttcagcaagttcacctccaagtttgtacgcaggaacctgaatgaacctgaaagcaaagaccgagtggagacgctcagacctcacgtggtgggcagtggcggcaacgacaaagaaaaggaagaatttcgggaggccaagccccgctccctccgcttcacgtggagtatgaagaccacgagctccatggagcccaacgagatgatgcgggagatccgcaaggtgctggacgcgaacagctgccagagcgagctgcatgagaagtacatgctgctgtgcatgcacggcacgccgggccacgaggacttcgtgcagtgggagatggaggtgtgcaaactgccgcggctctctctcaacggggttcgatttaagcggatatcgggcacctccatggccttcaaaaacattgcctccaaaatagccaacgagctgaagctttaacaggctgccaggagcgggggcggcgggggcgggccagctggacgggctgccggccgctgcgccgccccacctgggcgagactgcagcgatggattggtgtgtctcccctgctggcacttctcccctccctggcccttctcagttttctcccacattcacccctgcccagagattcccccttctcctctcccctactggaggcaaaggaaggggagggtggatgggggggcagggctccccctcggtactgcggttgcacagagtatttcgcctaaaccaagaaattttttattaccaaaaagaaaaaaaaaaaaaaaaaa

SEQ ID NO: 1610 - DNA, 2654 bp, Homo sapiens
cccaccttgggacaccttgactccaagcccagcagtaagtccaacatgattcggggccgcaactcagccacctctgctgatgagcagccccacattggaaactaccggctcctcaagaccattggcaagggtaattttgccaaggtgaagttggcccgacacatcctgactgggaaagaggtagctgtgaagatcattgacaagactcaactgaactcctccagcctccagaaactattccgcgaagtaagaataatgaaggttttgaatcatcccaacatagttaaattatttgaagtgattgagactgagaaaacgctctaccttgtcatggagtacgctagtggcggagaggtatttgattacctagtggctcatggcaggatgaaagaaaaagaggctcgagccaaattccgccagatagtgtctgctgtgcagtactgtcaccagaagtttattgtccatagagacttaaaggcagaaaacctgctcttggatgctgatatgaacatcaagattgcagactttggcttcagcaatgaattcacctttgggaacaagctggacaccttctgtggcagtcccccttatgctgccccagaactcttccagggcaaaaaatatgatggacccgaggtggatgtgtggagcctaggagttatcctctatacactggtcagcggatccctgccttttgatggacagaacctcaaggagctgcgggaacgggtactgaggggaaaataccgtattccattctacatgtccacggactgtgaaaacctgcttaagaaatttctcattcttaatcccagcaagagaggcactttagagcaaatcatgaaagatcgatggatgaatgtgggtcacgaagatgatgaactaaagccttacgtggagccactccctgactacaaggacccccggcggacagagctgatggtgtccatgggttatacacgggaagagatccaggactcgctggtgggccagagatacaacgaggtgatggccacctatctgctcctgggctacaagagctccgagctggaaggcgacaccatcaccctgaaaccccggccttcagctgatctgaccaatagcagcgccccatccccatcccacaaggtacagcgcagcgtgtcggccaatcccaagcagcggcgcttcagcgaccaggcagctggtcctgccattcccacctctaattcttactctaagaagactcagagtaacaacgcagaaaataagcggcctgaggaggaccgggagtcagggcggaaagccagcagcacagccaaggtgcctgccagccccctgcccggtctggagaggaagaagaccaccccaaccccctccacgaacagcgtcctctccaccagcacaaatcgaagcaggaattccccacttttggagcgggccagcctcggccaggcctccatccagaatggcaaagacagcctaaccatgccagggtcccgggcctccacggcttctgcttctgccgcagtctctgcggcccggccccgccagcaccagaaatccatgtcggcctccgtgcaccccaacaaggcctctgggctgccccccacggagagtaactgtgaggtgccgcggcccagcacagccccccagcgtgtccctgttgcctccccatccgcccacaacatcagcagcagtggtggagccccagaccgaactaacttcccccggggtgtgtccagccgaagcaccttccatgctgggcagctccgacaggtgcgggaccagcagaatttgccctacggtgtgaccccagcctctccctctggccacagccagggccggcggggggcctctgggagcatcttcagcaagttcacctccaagtttgtacgcagaaatctgtctttcaggtttgccagaaggaacctgaatgaacctgaaagcaaagaccgagtggagacgctcagacctcacgtggtgggcagtggcggcaacgacaaagaaaaggaagaatttcgggaggccaagccccgctccctccgcttcacgtggagtatgaagaccacgagctccatggagcccaacgagatgatgcgggagatccgcaaggtgctggacgcgaacagctgccagagcgagctgcatgagaagtacatgctgctgtgcatgcacggcacgccgggccacgaggacttcgtgcagtgggagatggaggtgtgcaaactgccgcggctctctctcaacggggttcgatttaagcggatatcgggcacctccatggccttcaaaaacattgcctccaaaatagccaacgagctgaagctttaacaggctgccaggagcgggggcggcgggggcgggccagctggacgggctgccggccgctgcgccgccccacctgggcgagactgcagcgatggattggtgtgtctcccctgctggcacttctcccctccctggcccttctcagttttctcttacatgtttgtggggggtgggagattgttctccagcaccccacattcacccctgcccagagattcccccttctcctctcccctactggaggcaaaggaaggggagggtggatgggggggcagggctccccctcggtactgcggttgcacagagtatttcgcctaaaccaagaaattttttattaccaaaaa

SEQ ID NO: 1611 - DNA, 2803 bp, Homo sapiens
tcctggaattgcacgcgcttcctgaccaccaggctctggcccttgagaagccagcggggctttgtccctgttgctctccttgccaaacccagtctctctgctagtggtggtttcggttgcgacaccgtccaggttcccaggcaggaaccgctcggcctggctgcttagctacttttcactgaggaggtggtggaaggtgtcgcctgctctggctgagtaagggtggctggctgagccggcagcccccgccctaggcctggctcttcccggcctctgtactttgccctcgctgcctgacaggttctgctgtgggctctgctgaatggaagtcgctggtagtccttttccctttctccagtcggcccaccttgggacaccttgactccaagcccagcagtaagtccaacatgattcggggccgcaactcagccacctctgctgatgagcagccccacattggaaactaccggctcctcaagaccattggcaagggtaattttgccaaggtgaagttggcccgacacatcctgactgggaaagaggtagctgtgaagatcattgacaagactcaactgaactcctccagcctccagaaactattccgcgaagtaagaataatgaaggttttgaatcatcccaacatagttaaattatttgaagtgattgagactgagaaaacgctctaccttgtcatggagtacgctagtggcggagaggtatttgattacctagtggctcatggcaggatgaaagaaaaagaggctcgagccaaattccgccagatagtgtctgctgtgcagtactgtcaccagaagtttattgtccatagagacttaaaggcagaaaacctgctcttggatgctgatatgaacatcaagattgcagactttggcttcagcaatgaattcacctttgggaacaagctggacaccttctgtggcagtcccccttatgctgccccagaactcttccagggcaaaaaatatgatggacccgaggtggatgtgtggagcctaggagttatcctctatacactggtcagcggatccctgccttttgatggacagaacctcaaggagctgcgggaacgggtactgaggggaaaataccgtattccattctacatgtccacggactgtgaaaacctgcttaagaaatttctcattcttaatcccagcaagagaggcactttagagcaaatcatgaaagatcgatggatgaatgtgggtcacgaagatgatgaactaaagccttacgtggagccactccctgactacaaggacccccggcggacagagctgatggtgtccatgggttatacacgggaagagatccaggactcgctggtgggccagagatacaacgaggtgatggccacctatctgctcctgggctacaagagctccgagctggaaggcgacaccatcaccctgaaaccccggccttcagctgatctgaccaatagcagcgccccatccccatcccacaaggtacagcgcagcgtgtcggccaatcccaagcagcggcgcttcagcgaccaggctggtcctgccattcccacctctaattcttactctaagaagactcagagtaacaacgcagaaaataagcggcctgaggaggaccgggagtcagggcggaaagccagcagcacagccaaggtgcctgccagccccctgcccggtctggagaggaagaagaccaccccaaccccctccacgaacagcgtcctctccaccagcacaaatcgaagcaggaattccccacttttggagcgggccagcctcggccaggcctccatccagaatggcaaagacagcacagccccccagcgtgtccctgttgcctccccatccgcccacaacatcagcagcagtggtggagccccagaccgaactaacttcccccggggtgtgtccagccgaagcaccttccatgctgggcagctccgacaggtgcgggaccagcagaatttgccctacggtgtgaccccagcctctccctctggccacagccagggccggcggggggcctctgggagcatcttcagcaagttcacctccaagtttgtacgcaggaacctgaatgaacctgaaagcaaagaccgagtggagacgctcagacctcacgtggtgggcagtggcggcaacgacaaagaaaaggaagaatttcgggaggccaagccccgctccctccgcttcacgtggagtatgaagaccacgagctccatggagcccaacgagatgatgcgggagatccgcaaggtgctggacgcgaacagctgccagagcgagctgcatgagaagtacatgctgctgtgcatgcacggcacgccgggccacgaggacttcgtgcagtgggagatggaggtgtgcaaactgccgcggctctctctcaacggggttcgatttaagcggatatcgggcacctccatggccttcaaaaacattgcctccaaaatagccaacgagctgaagctttaacaggctgccaggagcgggggcggcgggggcgggccagctggacgggctgccggccgctgcgccgccccacctgggcgagactgcagcgatggattggtgtgtctcccctgctggcacttctcccctccctggcccttctcagttttctcccacattcacccctgcccagagattcccccttctcctctcccctactggaggcaaaggaaggggagggtggatgggggggcagggctccccctcggtactgcggttgcacagagtatttcgcctaaaccaagaaattttttattaccaaaaagaaaaaaaaaaaaaaaaaa

SEQ ID NO: 1612 - DNA, 2965 bp, Homo sapiens
tcctggaattgcacgcgcttcctgaccaccaggctctggcccttgagaagccagcggggctttgtccctgttgctctccttgccaaacccagtctctctgctagtggtggtttcggttgcgacaccgtccaggttcccaggcaggaaccgctcggcctggctgcttagctacttttcactgaggaggtggtggaaggtgtcgcctgctctggctgagtaagggtggctggctgagccggcagcccccgccctaggcctggctcttcccggcctctgtactttgccctcgctgcctgacaggttctgctgtgggctctgctgaatggaagtcgctggtagtccttttccctttctccagtcggcccaccttgggacaccttgactccaagcccagcagtaagtccaacatgattcggggccgcaactcagccacctctgctgatgagcagccccacattggaaactaccggctcctcaagaccattggcaagggtaattttgccaaggtgaagttggcccgacacatcctgactgggaaagaggtagctgtgaagatcattgacaagactcaactgaactcctccagcctccagaaactattccgcgaagtaagaataatgaaggttttgaatcatcccaacatagttaaattatttgaagtgattgagactgagaaaacgctctaccttgtcatggagtacgctagtggcggagaggtatttgattacctagtggctcatggcaggatgaaagaaaaagaggctcgagccaaattccgccagatagtgtctgctgtgcagtactgtcaccagaagtttattgtccatagagacttaaaggcagaaaacctgctcttggatgctgatatgaacatcaagattgcagactttggcttcagcaatgaattcacctttgggaacaagctggacaccttctgtggcagtcccccttatgctgccccagaactcttccagggcaaaaaatatgatggacccgaggtggatgtgtggagcctaggagttatcctctatacactggtcagcggatccctgccttttgatggacagaacctcaaggagctgcgggaacgggtactgaggggaaaataccgtattccattctacatgtccacggactgtgaaaacctgcttaagaaatttctcattcttaatcccagcaagagaggcactttagagcaaatcatgaaagatcgatggatgaatgtgggtcacgaagatgatgaactaaagccttacgtggagccactccctgactacaaggacccccggcggacagagctgatggtgtccatgggttatacacgggaagagatccaggactcgctggtgggccagagatacaacgaggtgatggccacctatctgctcctgggctacaagagctccgagctggaaggcgacaccatcaccctgaaaccccggccttcagctgatctgaccaatagcagcgccccatccccatcccacaaggtacagcgcagcgtgtcggccaatcccaagcagcggcgcttcagcgaccaggctggtcctgccattcccacctctaattcttactctaagaagactcagagtaacaacgcagaaaataagcggcctgaggaggaccgggagtcagggcggaaagccagcagcacagccaaggtgcctgccagccccctgcccggtctggagaggaagaagaccaccccaaccccctccacgaacagcgtcctctccaccagcacaaatcgaagcaggaattccccacttttggagcgggccagcctcggccaggcctccatccagaatggcaaagacagcctaaccatgccagggtcccgggcctccacggcttctgcttctgccgcagtctctgcggcccggccccgccagcaccagaaatccatgtcggcctccgtgcaccccaacaaggcctctgggctgccccccacggagagtaactgtgaggtgccgcggcccagcacagccccccagcgtgtccctgttgcctccccatccgcccacaacatcagcagcagtggtggagccccagaccgaactaacttcccccggggtgtgtccagccgaagcaccttccatgctgggcagctccgacaggtgcgggaccagcagaatttgccctacggtgtgaccccagcctctccctctggccacagccagggccggcggggggcctctgggagcatcttcagcaagttcacctccaagtttgtacgcaggaacctgaatgaacctgaaagcaaagaccgagtggagacgctcagacctcacgtggtgggcagtggcggcaacgacaaagaaaaggaagaatttcgggaggccaagccccgctccctccgcttcacgtggagtatgaagaccacgagctccatggagcccaacgagatgatgcgggagatccgcaaggtgctggacgcgaacagctgccagagcgagctgcatgagaagtacatgctgctgtgcatgcacggcacgccgggccacgaggacttcgtgcagtgggagatggaggtgtgcaaactgccgcggctctctctcaacggggttcgatttaagcggatatcgggcacctccatggccttcaaaaacattgcctccaaaatagccaacgagctgaagctttaacaggctgccaggagcgggggcggcgggggcgggccagctggacgggctgccggccgctgcgccgccccacctgggcgagactgcagcgatggattggtgtgtctcccctgctggcacttctcccctccctggcccttctcagttttctcccacattcacccctgcccagagattcccccttctcctctcccctactggaggcaaaggaaggggagggtggatgggggggcagggctccccctcggtactgcggttgcacagagtatttcgcctaaaccaagaaattttttattaccaaaaagaaaaaaaaaaaaaaaaaa

SEQ ID NO: 1613 - DNA, 1242 bp, Homo sapiens
atttcatgttatacttaataaaacaaaacatacctgtatacacacacattcactcacattgaagatgcaagatgaagaaagatacatgacattgaatgtacagtcaaagaaaaggagttctgcccaaacatctcaacttacatttaaagattattcagtgacgttgcactggtataaaatcttactgggaatatctggaaccgtgaatggtattctcactttgactttgatctccttgatcctgttggtttctcagggagtattgctaaaatgccaaaaaggaagttgttcaaatgccactcagtatgaggacactggagatctaaaagtgaataatggcacaagaagaaatataagtaataaggacctttgtgcttcgagatctgcagaccagacagtactatgccaatcagaatggctcaaataccaagggaagtgttattggttctctaatgagatgaaaagctggagtgacagttatgtgtattgtttggaaagaaaatctcatctactaatcatacatgaccaacttgaaatggcttttatacagaaaaacctaagacaattaaactacgtatggattgggcttaactttacctccttgaaaatgacatggacttgggtggatggttctccaatagattcaaagatattcttcataaagggaccagctaaagaaaacagctgtgctgccattaaggaaagcaaaattttctctgaaacctgcagcagtgttttcaaatggatttgtcagtattagagtttgacaaaattcacagtgaaataatcaatgatcactatttttggcctattagtttctaatattaatctccaggtgtaagattttaaagtgcaattaaatgccaaaatctcttctcccttctccctccatcatcgacactggtctagcctcagagtaacccctgttaacaaactaaaatgtacacttcaaaatttttacgtgatagtataaaccaatgtgacttcatgtgatcatatccaggatttttattcgtcgcttattttatgccaaatgtgatcaaattatgcctgtttttctgtatcttgcgttttaaattcttaataaggtcctaaacaaaatttcttatatttctaatggttgaattataatgtgggtttatacattttttacccttttgtcaaagagaattaactttgtttccaggcttttgctactcttcactcagctacaataaacatcctgaatgttttcttaaaaaa

SEQ ID NO: 1614 - DNA, 1646 bp, Homo sapiens
cactgcgaagcccagctgcgcgcgccttgggattgactgtccacgctcgcccggctcgtccgacgcgccctccgccagccgacagacacagccgcacgcactgccgtgttctccctgcggctcggacacatagtatgaccattaggtgtttcgtctcccacccattttctatggaaaaccaaggggatcgggccatgatagccactggcagctttgaagaacgggacacctttagagaagcttgatcttggaggcctcaccgtgagaccttacaaagccggattccggcagagttcctctatctcgtcttgttgctgattaaaggtgcccctgtctccagtttttctccatctcctgggacgtagcaggaaatcagcatcatggttgggttcaaggccacagatgtgccccctactgccactgtgaagtttcttggggctggcacagctgcctgcatcgcagatctcatcacctttcctctggatactgctaaagtccggttacagatccaaggagaaagtcaggggccagtgcgcgctacagccagcgcccagtaccgcggtgtgatgggcaccattctgaccatggtgcgtactgagggcccccgaagcctctacaatgggctggttgccggcctgcagcgccaaatgagctttgcctctgtccgcatcggcctgtatgattctgtcaaacagttctacaccaagggctctgagcatgccagcattgggagccgcctcctagcaggcagcaccacaggtgccctggctgtggctgtggcccagcccacggatgtggtaaaggtccgattccaagctcaggcccgggctggaggtggtcggagataccaaagcaccgtcaatgcctacaagaccattgcccgagaggaagggttccggggcctctggaaagggacctctcccaatgttgctcgtaatgccattgtcaactgtgctgagctggtgacctatgacctcatcaaggatgccctcctgaaagccaacctcatgacagatgacctcccttgccacttcacttctgcctttggggcaggcttctgcaccactgtcatcgcctcccctgtagacgtggtcaagacgagatacatgaactctgccctgggccagtacagtagcgctggccactgtgcccttaccatgctccagaaggaggggccccgagccttctacaaagggttcatgccctcctttctccgcttgggttcctggaacgtggtgatgttcgtcacctatgagcagctgaaacgagccctcatggctgcctgcacttcccgagaggctcccttctgagcctctcctgctgctgacctgatcacctctggctttgtctctagccgggccatgctttccttttcttccttctttctcttccctccttcccttctctccttccctctttccccacctcttccttccgctcctttacctaccaccttccctctttctacattctcatctactcattgtctcagtgctggtggagttgacatttgacagtgtgggaggcctcgtaccagccaggatcccaagcgtcccgtcccttggaaagttcagccagaatcttcgtcctgcccccgacagcccagcctagcccacttgtcatccataaagcaagctcaaccttgg

SEQ ID NO: 1615 - DNA, 1439 bp, Homo sapiens
atcttcaagtatggggtctgctggcttgtcgcggctgcatgggcttttcgcggtctataagcccccggggctaaaatggaagcacctgcgggatacagtggagctacaacttctgaagggtctcaatgccaggaagcctcccgctcctaaacagcgtgttcgcttcttgctgggccccatggaaggcagcgaagagaaggagctgaccctcacagccaccagcgtaccctctttcatcaaccatccactggtatgtggaccagcattcgcccatctcaaggttggcgtgggacatcggttggatgcccaggcttctggagtacttgtgctcggcgtgggacatggatgcaggctcctcaccgatatgtacaatgctcatcttaccaaggattacacagtgcgtggcctcctgggcaaagctacagatgacttccgtgaggacgggaggctggtagagaagacaacctatgaccacgtgaccagagagaagctggaccgcattctggccgttatccaaggctcccatcagaaggccctggtgatgtactccaacctcgacctgaagacccaggaggcctatgagatggccgtgagaggcctgatccggcccatgaacaagtccccgatgctgataactggcatccgatgcctctactttgcacctccggaattcctcttagaggtgcagtgcatgcatgagacgcagaaagagctgcggaagttggttcatgaaatcggcctggaactaaagaccactgctgtctgcacccaagtgcggcgcacgcgcgacggcttcttcacgctagacagtgccctcctgaggacccagtgggacctaaccaacatccaggatgctatccgggctgctacccctcaggtagctgcagagctggagaagagcttgagcccggggctggacaccaagcagctccccagtccgggatggtcctgggactcccagggcccgagctctaccttggggctggagaggggtgcggggcagtgaatgcccaggcagctcctggggcagtggatggataaatagaagaactgctatgagctggacctgatagctgtgcagaaagtgagagcaggggcaccttttctacgtaagacacaaaactcaagctgtaacagaaaggtcaatggacttgacccaactgagaaggaaaaacttctgtatggaggaaaagacagtaaacatgacagactgatagaaagtattggcagaccaggcgtggtggcgggcacttgtaatcccagctactcccaaggctgaggcaggagaattgcttgagcccaggagtttaaggttgtagtgcgctagacggcgcctgtgaatagccactgcactctagtctggggaacatatgagacccctgccatctcaaaaaaaaaaaaattctcaataaactatgtgcccacgaaaattaaaaatt

SEQ ID NO: 1616 - DNA, 1347 bp, Homo sapiens
gtggacggagaaagtgaaaggtgaggcacggccctgcagattttccagcggatcccccggtggcctcatgtcgcgcagtggaaccgatcctcagcaacgccagcaggcgtcagaggcggacgccgcagcagcaaccttccgggcaaacgaccatcagcatatccgctacaacccgctgcaggatgagtgggtgctggtgtcagctcaccgcatgaagcggccctggcagggtcaagtggagccccagcttctgaagacagtgccccgccatgaccctctcaaccctctgtgtcctggggccatccgagccaacggagaggtgaatccccagtacgatagcaccttcctgtttgacaacgacttcccagctctgcagcctgatgcccccagtccaggacccagtgatcatccccttttccaagcaaagtctgctcgaggagtctgtaaggtcatgtgcttccacccctggtcggatgtaacgctgccactcatgtcggtccctgagatccgggctgttgttgatgcatgggcctcagtcacagaggagctgggtgcccagtacccttgggtgcagatctttgaaaacaaaggtgccatgatgggctgttctaacccccacccccactgccaggtatgggccagcagtttcctgccagatattgcccagcgtgaggagcgatctcagcaggcctataagagtcagcatggagagcccctgctaatggagtacagccgccaggagctactcaggaaggaacgtctggtcctaaccagtgagcactggttagtactggtccccttctgggcaacatggccctaccagacactgctgctgccccgtcggcatgtgcggcggctacctgagctgacccctgctgagcgtgatgatctagcctccatcatgaagaagctcttgaccaagtatgacaacctctttgagacgtcctttccctactccatgggctggcatggggctcccacaggatcagaggctggggccaactggaaccattggcagctgcacgctcattactaccctccgctcctgcgctctgccactgtccggaaattcatggttggctacgaaatgcttgctcaggctcagagggacctcacccctgagcaggctgcagagagactaagggcacttcctgaggttcattaccacctggggcagaaggacagggagacagcaaccatcgcctgaccacgccgaccacagggccttgaatccttttttgttttcaacagtcttgctgaattaagcagaaagggccttgaatcctggcctggaatttgggcagatatagcattaataaaactgtgcatctcaaaaaaaaaaaaaaa

SEQ ID NO: 1617 - DNA, 3359 bp, Homo sapiens
ggaagcagcttgcaaatggcgtctccctcgctggagcggccagaaaaaggcgctggaaaaagtgaatttcgtaaccagaagccgaagccggagaaccaagatgaatcagaactccttacggttcctgatggttggaaggaaccagctttttccaaagaggacaatcccagaggacttttggaggagagcagtttcgcaactttgttcccaaaatacagggaagcttacttgaaagagtgttggccattggtgcagaaagccttaaatgaacatcatgttaatgcaaccctggacctgatcgaaggcagcatgactgtttgtactacaaagaagacttttgatccatatatcatcattagggccagagatctgataaaactgttagcaaggagtgtttcatttgaacaggcagtacgaattcttcaggatgatgttgcatgtgacatcattaaaataggttctttagtaaggaataaagagagatttgtaaaacgaagacaacggcttattggtcccaaaggatctacattgaaggcattggaactcttaactaattgttacattatggttcagggaaacacagtttcagccattggaccttttagtggcttaaaagaggttagaaaagtagtccttgatactatgaagaatattcatccaatttataacattaaaagcttaatgattaagagagagttggcaaaagattctgaattacgatcacaaagttgggagagatttttgccacagttcaagcacaaaaatgtgaataaacgcaaggaaccaaagaaaaaaactgttaagaaagaatatacgccattcccaccaccacaaccaggaagtcagatcgataaagaattggctagtggtgaatactttttgaaggcaaatcagaagaagcggcagaaaatggaagcaataaaggctaaacaagcagaagccatcagtaagagacaagaggaaagaaacaaagcatttattccacctaaggaaaaaccaattgtgaaacctaaggaagcttctactgaagctaaaattgatgtggccagcatcaaggaaaaggttaagaaagcaaagaataagaaactgggagctcttacagctgaagaaattgcacttaagatggaggcagatgaaaagaaaaagaagaaaaaaaagtaacatacccaaaactccttgactagaactatctccttttgtaaaggattttgagatatcaggcattagttgccttatttgtgagaaattttctgagggctttttttttttttggtggtggtggttgttcatagaagagtgttctttataaattatattattattgtattttttgaaaaatttatactagaaagtggtatatatgtctttgtatacattacgaccattgtgattatccattaaatccagtgtctgatgctattggttagtaatgatgtcccagcatttgatgttccctctctaatgataacaagtaaatatttaggtttatcccttttgaaagtttggttttacttttaacagtccatgaacagaaaattaaggcctctaaaatcagatcccctagttactcctctgttctgaatctggggaagtagtaaaccaaaaagacagggaaaaccagatatttagagtcgaagcagcatgcaaaaaataataatgtttttaactaatgaaggctactggagttactaagaatcacctaaaaatgtgctactgtaccttgctcattttgcagatttagaagctgaaacatgggttaggttacttactaaaagtccacctgtggcaacctgcaaataatgcttatttatactaaagatgagtttatctgatagagttaggaaatttcttcttttgagtaagagtattgctataacatatatttttttctgaaatgttttaaaatagaagtacacctaattgttattggttaaaaagaaagccatatgtgaatgaggttggtttttgggttttttctttcctgaattgtattagtccaaaagaactaaattagggtacttgtgctgtaccaaaatggtaattataacagacagtattagaattactgaattaacaatgagaaagagagaagtgtatctgttacgtggatatatgggccagcctggatatacaacagagtagtaacctgtgaaacaaacatagaatatcctcttagacattgttcctcataatgcactgacagaattcacatagctcttaatgaaacaatttaagattgatgtacgtacgtttgacttggtctcgctgtcggttaactgtaaagttagggggaagaaagaaaaaaaattaaaagggtagacacagttgagagttttattttaaaaagctaagtcttataattatgaccattaacttgctttggctttattgcagtgactttccaagtttaattattcaaaactttttgaactgactgaattaacttggtatttttaagttgactttttacataaactttataaaccttttataaaaaggaaactataccattactataaatggaaaatcattttacacatcatacctagcaggtaataaaatttaaaaaataaaaattaaatattagaatgtgagaaatttattaaaatatagttctaaaaataagtttcttcctgagaagaatgatactgtttatgatgaatccatagtgaaaagacagtgacctctctttcatccagtctagtatatcactaaatcatcattacgatgtttggctatcaagtcattaattactgtcctcctttcactgagctttattcaaattttgacaatcagagcactgggaagaaataaattccacaactgcctttagccttctggatactttcttttataaaatagaaaccttttccacaccagttctgcagcagtcgctattagatgctcgtggtagaacccatcaatcatctggtcctctgggtactggtgagcatccctggtcttcatacctgtgagtgggctttgtggtgaattactgtaaatatgctaccctcacttttcttggcagttatgtccatgaaatcaagagtgtgatgttctagttatttttttttatatatatttttaaatgttcaatattcaactattgaaacaaatgtacatctgtgaactagctaaaatcatcttatgtaccactaatatgcccagcacattttgtaaaacagtcctgatttggcctccaagggtatttattgaactaccagcagtatctaggagaccacgaaggaataccacgaaggaatttatgctccagtgcttgccataatttgtctgagaaggaatctgttaaataaaagcttttatcctctaaaaaaaaaaaaagaaaaaaaaaaaaaaaa

SEQ ID NO: 1618 - DNA, 1191 bp, Homo sapiens
cttgaggaagcccagtacatttcaagttggtcgcggcttgggctccgctttggggaggggcagcaggtttattcactggatctctgaatacccaggccccctccaccatggccagccggggtgggggccggggtcgtggccggggccagttgaccttcaacgtggaggccgtgggcattgggaaaggggatgctttgcccccacccaccctgcagccttctccactcttccctcccttggagttccgcccagtacctttgccctcaggcgaggaaggggaatatgtcctggcactgaagcaagagctacgaggagccatgaggcagctcccctacttcatccggccagctgtccccaagagagatgtggagcgttattcagacaaatatcagatgtcaggtccgattgacaatgccatcgattggaaccctgattggcggcgtctaccccgggagctaaagatccgagtgcggaagctacagaaggaacggattacaattctgctccccaagaggccccctaagaccacagaagataaggaggaaacaatacagaaactagagaccctggagaagaaggaagaagaagtaacttcagaggaggatgaggagaaagaagaagaagaagagaaggaagaggaggaagaagaagagtatgatgaagaagaacatgaagaggaaactgattacatcatgtcatattttgacaatggagaggactttggtggtgacagtgatgacaatatggacgaggctatatactgaagaaggactctggaccctcgtgtctttctttaggatacagagagtaactgtacctattatttgtttcttcagacaagcaaatcatttggtcagagttcatataatctgtctgttccctggagatgggaatagaggatgatgacagtttattttctacacttcccctccttccacatttgtatcacctttgctatcttggggaaagtgcaaaggacaaacatctcaattgtatgaagggagaaaggagaattgaaagaagaactggggttgttagagctgagatgactgtacacatacccctgcccaatttatatagctctttgtggagataattaggggtgggagcagtttgaaggagtaagcctggttttatacttttaaataaagtgtttttatctgtcaaaaaaaaaaaaaaaaaaaaaaaaaa

SEQ ID NO: 1619 - DNA, 2135 bp, Homo sapiens
cggacgcgtgggcagcaggagtcggggggccgccgaagatggggaacactacctcgtgctgcgtgtcgtccagtcccaagctccggaggaatgcccactcccggctggagtcctaccggccagacacggacctgagccgcgaggacacgggctgcaacctgcagcacatcagcgaccgggagaacatagacgatttgaacatggaattcaatccttcagatcatcctcgggccagcacaatattcctcagtaaatctcagacagacgtgagagaaaaacgcaagagtctcttcattaaccatcatcctccaggacaaatagcaaggaaatacagttcctgctccaccattttcctagatgatagcacagtcagtcaaccaaacctcaagtatacaattaaatgtgtcgctcttgcaatatattatcacatcaaaaacagggacccagatggaaggatgctcttagatatttttgatgaaaatcttcaccctctttcgaaatccgaagtgccaccagattatgacaaacacaacccagagcagaagcagatttaccggttcgttcggacactgttcagtgctgctcagctgacggctgaatgtgccatcgtcaccctggtgtaccttgaaagacttttaacatacgcagagatagatatctgtccggccaactggaagcggattgttttaggggcgatcctgctggcctccaaggtgtgggatgaccaggctgtatggaatgtggattactgccagatcctgaaagacatcacggtggaggacatgaacgagctagagcgacagtttcttgaattgctgcagttcaacatcaatgttccttccagtgtctatgccaagtattattttgatcttcgttctctggcagaagcgaacaacctgagctttcccttggagcccctgagcagggagagggctcacaagcttgaggccatctctcgcctctgcgaggacaagtacaaggacctaagaagatccgcgaggaagcgctcagccagtgcagacaacctgactctgccccggtggtccccagccatcatctcttaactacggaggcccgccggaggccacaccatcccttagtttctcctttagtttgagaaaagacagacttggggtgggtttgtttttgttttttctttccttttcttttttacgcatagctccgtcaagctgcctggatgagcgcccatgcagcaaggcttggaggaagcgtcagtgccctggagatcccagctcgctctccccactgtcagcaacagcacttccttcgtggaggaagtggactcgaatcctggaggaggaaataaagggaaagggaagtcgtggagaggcagggaaaatggttaagcagcccggccctctggagtccccatgggggcggtagctgaagttggcgagcgcagcggtggatgcagagctggctgcacccagggctgggccagtgtgtcctgtaagacttcttgcattccttctgctgcttttttgggatgggggtatttttgttcatttgtttttgccctgttttgattttggtcccacagagcaggggatgtagtttgtacccaccatggcgcagacttccaaataaatagtactggtcatttctctccgcactatttctgcgcgctgtcttctgagctttcttcctcaccagtgggctgtgcttgttccatttctgtacacccttattttataccgtttttcttcaacaatggcgaaattgactgtagtgctgaaccaaaagtatccctttccctccttattcctcaccccaagaacattctagatcacatgggtgcttgtgccttccgattttcttgcatttgtttttttcctgacctgaagttgttgttacaaaatcagtcagactttgtgggctgaaggacacggtgcagcagagggtgtccctgtgagagttctgcagagtgctgggcatgtgcctggaactaccgagtaggagccatttctttgtacccctgcctaatccattcctctccttccaagtccattgttgcaagcaatattcttctcaatttttatatgtttactttaaatcaaagttagtctatttgtataaaatttttaaaaaatctaaaagaaaaaaaaaaaaaaaaa

SEQ ID NO: 1620 - DNA, 1754 bp, Homo sapiens
aggagagatgtgagcctcgtaccaggaagatcatactgaggccaccaggttgagagccgcctggctggggggcttgtccggggacagcaggggcagaggcatggaggttcacagccaggaaatcgtgcagtgaacctgtcccctccggtcacaacatcaagagctgaactgggactagaagtcatcgccccagagctttttgctaccagaactgccgggtgaaaatctttggaagagaagtttgagaacctgttaaacaagctctctaggtaattctgtgcacgttcagtctgagaactgctgcatctgaagagatttgaacatggaattcaatccttcagatcatcctcgggccagcacaatattcctcagtaaatctcagacggacgtgagagaaaaacgcaagagtctcttcattaaccatcatcctccaggacaaatagcaaggaaatacagttcctgctccaccattttcctagatgatagcacagtcagtcaaccaaacctcaagtatacaattaaatgtgtcgctcttgcaatatattatcacatcaaaaacagggacccagatggaaggatgctcttagatatttttgatgaaaatcttcaccctctttcgaaatccgaagtgccaccagattatgacaaacacaacccagagcagaagcagatttaccggttcgttcggacactgttcagtgctgctcagctgacggctgaatgtgccgtcgtcaccctggtgtaccttgaaagacttttaacatacgcagagatagatatctgtccggccaactggaagcggattgttttaggggcgatcctgctggcctccaaggtgtgggatgaccaggctgtatggaatgtggattactgccagatcctgaaagacatcacggtggaggacatgagcgagctagagcgacagtttcttgaattgctgcagttcaacatcaatgttccttccagtgtctatgccaagtattattttgatcttcgttctctggcagaagcgaacaacctgagctttcccttggagcccctgagcagggagagggctcacaagcttgaggccatctctcgcctctgcgaggacaagtacaaggacctaagaagatccgcgaggaagcgctcagccagtgcagacaacctgactctgccccggtggtccccagccatcatctcttaactacggaggcccgccggaggccacaccatcccttagtttctcctttagtttgagaaaagacagacttggggtgggtttgtttttgttttttctttccttttctttttttacgcatagctccgtcaagctgcctggatgagcgcccatgcagcaaggcttggaggaagcgtcagtgccctggagatcccagctcgctctccccactgtcagcaacagcacttccttcgtggaggaagtggactcgaatcctggaggaggaaataaagggaaagggaagtcgtggagaggcagggaaaatggttaagcagcccggccctctggagtccccatgggggcggtagctgaagttggcgagcgcagcggtggatgcagagctggctgcacccagggctgggccagtgtgtcctgtaagacttcttgcattccttctgctgcttttttgggatgggggtatttttgttcatttgtttttgccctgttttgattttggtcccacagagcaggggatgtagtttgtacccaccatggcgcagacttccaaataaatagtactggtcatttctctctg

SEQ ID NO: 1621 - DNA, 2614 bp, Homo sapiens
attgcggagagcggctgatcgcagtccggaggtgaggcggaactctgagcaggtggtccattatggctgacatgcaaaatctggtagaaagattggagagggcagtgggccgcctggaggcagtatctcatacctctgacatgcaccgtgggtatgcagacagtccttcaaaagcaggagcagctccatatgtgcaggcatttgactcgctgcttgctggtcctgtggcagagtacttgaagatcagtaaagagattgggggagacgtgcagaaacatgcggagatggtccacacaggtttgaagttggagcgagctctgttggttacagcttctcagtgtcaacagccagcagaaaataagctttccgatttgttggcacccatctcagagcagatcaaagaagtgataacctttcgggagaagaaccgaggcagcaagttgtttaatcacctgtcagctgtcagcgaaagtatccaggccctgggctgggtggctatggctcccaagcctggcccttatgtgaaagaaatgaatgatgccgccatgttttatacaaaccgagtcctcaaagagtacaaagatgtggataagaagcatgtagactgggtcaaagcttatttaagtatatggacagagctgcaggcttacattaaggagttccataccaccggactggcctggagcaaaacggggcctgtggcaaaagaactgagcggactgccatctggaccctctgccggatcaggtcctcctccccctccaccaggcccccctcctcccccagtctctaccagttcaggctcagatgagtctgcttcccgctcagcactgttcgcgcagattaatcagggggagagcattacacatgccctgaaacatgtatctgatgacatgaagactcacaagaaccctgccctgaaggctcagagtggtccagtacgcagtggccccaaaccattctctgcacctaaaccccaaaccagcccatcccccaaacgagccacaaagaaggagccagctgtacttgaactggagggcaagaagtggagagtggaaaatcaggaaaatgtttccaacctggtgattgaggacacagagctgaaacaggtggcttacatatacaagtgtgtcaacacgacattgcaaatcaagggcaaaattaactccattacagtagataactgtaagaaacttggcctggtattcgatgacgtggtgggcattgtggagataatcaacagtaaggatgtcaaagttcaggtaatgggtaaagtgccaaccatatccatcaacaaaacagatggctgccatgcttacctgagcaagaattccctggattgtgaaatagtcagtgccaaatcttccgagatgaatgtcctcattcctacagaaggcggtgactttaatgaattcccagttcctgagcagttcaagaccctatggaacgggcagaagttggtcaccacagtgacagaaattgctggataagcgaagtgccactgggttctttgccctcccttcacaccatgggataaatctgtatcaagacggttcttttctagatttcctctacctttttgctcttaaaactgcttctctgctctgagaagcacagctacctgccttcactgaaatatacctcaggctgagatttggggtgggatagcaggtcagttgatcttctgcaggaaggtgcagcttttccatatcagctcaaccacgccgccagtccattcttaaggaactgccgactaggactgatgatgcattttagctttgagcttttgggggttattctaccaacaaacagtccattggaaagaaaacagtccctggaattaacagatcagaatgttcacactggttaatctttttttaacaatgagcatgaaggtagcagaagctggtgtgtttccagatggttcttctaaccaaactaatttttcactgttgacaagcgaggcaagggttgcactggaccaaaggctgaggcttggccatctagcattccatacaaaattgtttcctataagcattccttttattctctattctatcctgggtctgcctcaaccgtgagataggagagtctctggtactagctgctgtagcagtgcccttcatccagggcagttaatggagtcttggaccctttctttctctgggatccctgcccagcaccttcctatagagatgactttaaaaggaaaaaaaaaaaaaaacccacatgatttcaaggagtctggcattcctgaatccttcttccctgccaggtgcctgtcacctgtcttcactgcctccttttccctgtcatgctcatcagcttatggcttctgtctaagcacctgaacagaggactgaaacctccactgcaggctggttttaggtcttgaattatgtaagaatcttgcacagcactgctaatgtaaatttcagttgtttttccctctaggacaaacacttaccaaaatatgcaacttttttttggtgggaagagagattgtcctgtgatttctacccatttcctgaggcctgtggaaataaacctttatgtacttaaagttatacagaaaatagaataaagttaataccaaacttgaaaaagcggccgc

SEQ ID NO: 1622 - DNA, 4303 bp, Homo sapiens
cgccgcggcggcagctgagttgggctgaggtgtccctagctggctctgcggctcttccgggtctgggctcggagattcacaggcggcccgcgaggccgagcgagggacgcatggccctgaggcggccgcagggcttggcggggtccggaggttgacctcgcccccgcagccggccttcgaggctgcctcctccaggcagcctctggggcccgcgcccgcgcctgctcaggctcccgtgttcaggctgcccatcccctccccaccggcgtcccggacgttgggacctgtgaccgtggcctcgggctgggcttccaaagccggccgcagcccggcgacccccgaggcctctcgccccgggcccctagacctctcactatgaccgcggccgccgcctccaactgggggctgatcacgaacatcgtgaacagcatcgtaggggtcagtgtcctcaccatgcccttctgcttcaaacagtgcggcatcgtcctgggggcgctgctcttggtcttctgctcatggatgacgcaccagtcgtgcatgttcttggtgaagtcggccagcctgagcaagcggaggacctacgccggcctggcattccacgcctacgggaaggcaggcaagatgctggtggagaccagcatgatcgggctgatgctgggcacctgcatcgccttctacgtcgtgatcggcgacttggggtccaacttctttgcccggctgttcgggtttcaggtgggcggcaccttccgcatgttcctgctgttcgccgtgtcgctgtgcatcgtgctcccgctcagcctgcagcggaacatgatggcctccatccagtccttcagcgccatggccctcctcttctacaccgtgttcatgttcgtgatcgtgctctcctctctcaagcacggcctcttcagtgggcagtggctgcggcgggtcagctacgtccgctgggagggcgtcttccgctgcatccccatcttcggcatgtccttcgcctgccagtcccaggtgctgcccacctacgacagcctggatgagccgtcagtgaaaaccatgagctccatatttgcttcctcccttaatgtggtcaccaccttctacgtcatggtggggtttttcggctacgtcagcttcaccgaggccacggccggcaacgtgctcatgcactttccctccaacctggtgacggagatgctccgtgtgggcttcatgatgtcagtggctgtgggcttccccatgatgatcctgccatgcaggcaggccctgagcacgctgctgtgtgagcagcagcaaaaagatggcacctttgcagcagggggctacatgccccctctccggtttaaagcacttaccctctctgtggtgtttggaaccatggttggtggcatccttatccccaacgtggagaccatcctgggcctcacaggagcgaccatgggaagcctcatctgcttcatctgcccggcgctgatctacaagaaaatccacaagaacgcactttcctcccaggtggtgctgtgggtcggcctgggcgtcctggtggtgagcactgtcaccacactgtctgtgagcgaggaggtccccgaggacttggcagaggaagcccctggcggccggcttggagaggccgagggtttgatgaaggtggaggcagcgcggctctcagcccaggatccggttgtggccgtggctgaggatggccgggagaagccgaagctgccgaaggagagagaggagctggagcaggcccagatcaaggggcccgtggatgtgcctggacgggaagatggcaaggaggcaccggaggaggcacagctcgatcgccctgggcaagggattgctgtgcctgtgggcgaggcccaccgccacgagcctcctgttcctcacgacaaggtggtggtagatgaaggccaagaccgagaggtgccagaagagaacaaacctccatccagacacgcgggcggaaaggctccaggggtccagggccagatggcgccgcctctgcccgactcagaaagagagaaacaagagccggagcagggagaggttgggaagaggcctggacaggcccaggccttggaggaggcgggtgatcttcctgaagatccccagaaagttccagaagcagatggtcagccagctgtccagcctgcaaaggaggacctggggccaggagacaggggcctgcatcctcggccccaggcagtgctgtctgagcagcagaacggcctggcggtgggtggaggggaaaaggccaaggggggaccgccgccaggcaacgccgccggggacacagggcagcccgcagaggacagcgaccacggtgggaagcctcccctcccagcggagaagccggctccagggcctgggctgccgcccgagcctcgcgagcagagggacgtggagcgagcgggtggaaaccaggcggccagccagctggaggaagctggcagggcggagatgctggaccacgccgtcctgcttcaggtgatcaaagaacagcaggtgcagcaaaagcgcttgctggaccagcaggagaagctgctggcggtgatcgaggagcagcacaaggagatccaccagcagaggcaggaggacgaggaggataaacccaggcaggtggaggtgcatcaagagcccggggcagcggtgcccagaggccaggaggcccctgaaggcaaggccagggagacggtggagaatctgcctcccctgcctttggaccctgtcctcagagctcctgggggccgccctgctccatcccaggaccttaaccagcgctccctggagcactctgaggggcctgtgggcagagaccctgctggccctcctgacggcggccctgacacagagcctcgggcagcccaggccaagctgagagatggccagaaggatgccgcccccagggcagctggcactgtgaaggagctccccaagggcccggagcaggtgcccgtgccagaccccgccagggaagccgggggcccagaggagcgcctcgcagaggaattccctgggcaaagtcaggacgttactggcggttcccaagacaggaaaaaacctgggaaggaggtggcagccactggcaccagcattctgaaggaagccaactggctcgtggcagggccaggagcagagacgggggaccctcgcatgaagcccaagcaagtgagccgagacctgggccttgcagcggacctgcccggtggggcggaaggagcagctgcacagccccaggctgtgttacgccagccggaactgcgggtcatctctgatggcgagcagggtggacagcagggccaccggctggaccatggcggtcacctggagatgagaaaggcccgcgggggggaccatgtgcctgtgtcccacgagcagccgagaggcggggaggacgctgctgtccaggagcccaggcagaggccagagccagagctggggctcaaacgagctgtcccggggggccagaggccggacaatgccaagcccaaccgggacctgaaactgcaggctggctccgacctccggaggcgacggcgggaccttggccctcatgcagagggtcagctggccccgagggatggggtcatcattggccttaaccccctgcctgatgtccaggtgaacgacctccgtggcgccctggatgcccagctccgccaggctgcggggggagctctgcaggtggtccacagccggcagcttagacaggcgcctgggcctccagaggagtcctagcacctgctggccatgagggccacgccagccactgccctcctcggccagcagcaggtctgtctcagccgcatcccagccaaactctggaggtcacactcgcctctccccagggtttcatgtctgaggccctcaccaagtgtgagtgacagtataaaagattcactgtggcatcgtttccagaatgttcttgctgtcgttctgttgcagctcttagtctgaggtcctctgacctctagactctgagctcactccagcctgtgaggagaaacggcctccgctgcgagctggctggtgcactcccaggctcaggctggggagctgctgcgtctgtggtcaggcctcctgctcctgccagggagcacgcgtggtcttcgggttgagctcggccgtgcgtggaggtgcgcatggctgctcatggtcccaacacaggctactgtgagagccagcatccaaccccacgcttgcagtgactcagaatgataattattatgactgtttatcgatgcttcccacagtgtggtagaaagtcttgaataaacacttttgccttcacccagaaaaaaaaaaa

SEQ ID NO: 1623 - DNA, 3078 bp, Homo sapiens
cgccgcggcggcagctgagttgggctgaggtgtccctagctggctctgcggctcttccgggtctgggctcggagattcacaggcggcccgcgaggccgagcgagggacgcatggccctgaggcggccgcagggcttggcggggtccggaggttgacctcgcccccgcagccggccttcgaggctgcctcctccaggcagcctctggggcccgcgcccgcgcctgctcaggctcccgtgttcaggctgcccatcccctccccaccggcgtcccggacgttgggacctgtgaccgtggcctcgggctgggcttccaaagccggccgcagcccggcgacccccgaggcctctcgccccgggcccctagacctctcactatgaccgcggccgccgcctccaactgggggctgatcacgaacatcgtgaacagcatcgtaggggtcagtgtcctcaccatgcccttctgcttcaaacagtgcggcatcgtcctgggggcgctgctcttggtcttctgctcatggatgacgcaccagtcgtgcatgttcttggtgaagtcggccagcctgagcaagcggaggacctacgccggcctggcattccacgcctacgggaaggcaggcaagatgctggtggagaccagcatgatcgggctgatgctgggcacctgcatcgccttctacgtcgtgatcggcgacttggggtccaacttctttgcccggctgttcgggtttcaggtgggcggcaccttccgcatgttcctgctgttcgccgtgtcgctgtgcatcgtgctcccgctcagcctgcagcggaacatgatggcctccatccagtccttcagcgccatggccctcctcttctacaccgtgttcatgttcgtgatcgtgctctcctctctcaagcacggcctcttcagtgggcagtggctgcggcgggtcagctacgtccgctgggagggcgtcttccgctgcatccccatcttcggcatgtccttcgcctgccagtcccaggtgctgcccacctacgacagcctggatgagccgtcagtgaaaaccatgagctccatatttgcttcctcccttaatgtggtcaccaccttctacgtcatggtggggtttttcggctacgtcagcttcaccgaggccacggccggcaacgtgctcatgcactttccctccaacctggtgacggagatgctccgtgtgggcttcatgatgtcagtggctgtgggcttccccatgatgatcctgccatgcaggcaggccctgagcacgctgctgtgtgagcagcagcaaaaagatggcacctttgcagcagggggctacatgccccctctccggtttaaagcacttaccctctctgtggtgtttggaaccatggttggtggcatccttatccccaacgtggagaccatcctgggcctcacaggagcgaccatgggaagcctcatctgcttcatctgcccggcgctgatctacaagaaaatccacaagaacgcactttcctcccaggtggtgctgtgggtcggcctgggcgtcctggtggtgagcactgtcaccacactgtctgtgagcgaggaggtccccgaggacttggcagaggaagcccctggcggccggcttggagaggccgagggtttgatgaaggtggaggcagcgcggctctcagcccaggatccggttgtggccgtggctgaggatggccgggagaagccgaagctgccgaaggagagagaggagctggagcaggcccagatcaaggggcccgtggatgtgcctggacgggaagatggcaaggaggcaccggaggaggcacagctcgatcgccctgggcaagggattgctgtgcctgtgggcgaggcccaccgccacgagcctcctgttcctcacgacaaggtggtggtagatgaaggccaagaccgagaggtgccagaagagaacaaacctccatccagacacgcgggcggaaaggctccaggggtccagggccagatggcgccgcctctgcccgactcagaaagagagaaacaagagccggagcagggagaggttgggaagaggcctggacaggcccaggccttggaggaggcgggtgatcttcctgaagatccccagaaagttccagaagcagatggtcagccagctgtccagcctgcaaaggaggacctggggccaggagacaggggcctgcatcctcggccccaggcagtgctgtctgagcagcagaacggcctggcggtgggtggaggggaaaaggccaaggggggaccgccgccaggcaacgccgccggggacacagggcagcccgcagaggacagcgaccacggtgggaagcctcccctcccagcggagaagccggctccagggcctgggctgccgcccgagcctcgcgagcagagggacgtggagcgagcgggtggaaaccaggcggccagccagctggagggtaaggcctccgccctacagccgcctgcctcaggcccagggagcggcagccccctcccccagccctggggtgatgcccaggtcatcctcgggagccctgccaggccccccttctctttccagccgcctgctgagcagacccctcggagagctttctgctcccttcccatcagcagcttgctttctgggaaccttttatctgccttactcccctttaaacacctgcggcatcgtcacatggcttgtgattaccgttttatctcccttgctcccctttaaaacacctgcggcattgtcacttggcttgtgattaccatttcgtctttaaagcaggtttgttaacagttttaacactcggagtatttaaagccagccaggtgtgggcgtgcctgcacccagatgtggaggtttattttaaggctgtgccccaaggggacccagtttgggggtggctgtgcccgccctggtcctagcatagccctggcccagagcactgctcccacaccctcgggcctcggagctcggctgtgttcatctacagggatctgtcacctgtccctccaggaaagctccttacgcctttgctctcctgagaataaaacttgctctgaatcctcctccaaaaaaaaaaaaaaaaaa

SEQ ID NO: 1624 - DNA, 1807 bp, Homo sapiens
cgcacgctcgctcgtacggcggccgcggcggcagggcggggccggagcagcgggcggcggcggaggcggcgcccgggagcgctcttcgcttccctcggggtcttgctcggacctcggccaccgcctgggatccccaggactcgtgcgtgcagcatgggcggcgtcggggagccgggaccgcgggagggacccgcgcagccgggggcgccgctgcccaccttctgctgggagcagatccgcgcgcacgaccagcccggcgacaagtggctggtcatcgagcgccgcgtctacgacatcagccgctgggcacagcggcacccagggggcagccgcctcatcggccaccacggcgctgaggacgccacggatgccttccgtgccttccatcaagatctcaattttgtgcgcaagttcctacagcccctgttgattggagagctggctccggaagaacccagccaggatggacccctgaatgcgcagctggtcgaggacttccgagccctgcaccaggcagccgaggacatgaagctgtttgatgccagtcccaccttctttgctttcctactgggccacatcctggccatggaggtgctggcctggctccttatctacctcctgggtcctggctgggtgcccagtgccctggccgccttcatcctggccatctctcaggctcagtcctggtgtctgcagcatgacctgggccatgcctccatcttcaagaagtcctggtggaaccacgtggcccagaagttcgtgatggggcagctaaagggcttctccgcccactggtggaacttccgccacttccagcaccacgccaagcccaacatcttccacaaagacccagacgtgacggtggcgcccgtcttcctcctgggggagtcatccgtcgagtatggcaagaagaaacgcagatacctaccctacaaccagcagcacctgtacttcttcctgatcggcccgccgctgctcaccctggtgaactttgaagtggaaaatctggcgtacatgctggtgtgcatgcagtgggcggatttgctctgggccgccagcttctatgcccgcttcttcttatcctacctccccttctacggcgtccctggggtgctgctcttctttgttgctgtcagggtcctggaaagccactggttcgtgtggatcacacagatgaaccacatccccaaggagatcggccacgagaagcaccgggactgggtcagctctcagctggcagccacctgcaacgtggagccctcacttttcaccaactggttcagcgggcacctcaacttccagatcgagcaccacctcttccccaggatgccgagacacaactacagccgggtggccccgctggtcaagtcgctgtgtgccaagcacggcctcagctacgaagtgaagcccttcctcaccgcgctggtggacatcgtcaggtccctgaagaagtctggtgacatctggctggacgcctacctccatcagtgaaggcaacacccaggcgggcagagaagggctcagggcaccagcaaccaagccagcccccggcgggatcgatacccccacccctccactggccagcctgggggtgccctgcctgccctcctggtactgttgtcttcccctcggccccctcacatgtgtattcagcagccctatggccttggctctgggcctgatgggacaggggtagagggaaggtgagcatagcacattttcctagagcgagaattgggggaaagctgttatttttatattaaaatacattcagatgtaaaaaaaaaaaaaaaaaaaaaaaaaaaaa

SEQ ID NO: 1625 - DNA, 1767 bp, Homo sapiens
cagcggcggtggcccaggtagaggggtccgcgctggcggcggcggcggcgctgttccccgcgcggtccgcggagcggggtccgggctgcgcgacgtggggcggcggcggcactgcggccccggcccaagcccgaccccgggtcccctcctcggccgccccccgcccggccgcccgccctcgggcctccccccgggccctcggtcccctcccccgctggcggggcccggacagaagatggtgcagaagaaaccagccgaacttcagggtttccaccgttcgttcaaggggcagaaccccttcgagctggccttctccctagaccagcccgaccacggagactctgactttggcctgcagtgctcagcccgccctgacatgcccgccagccagcccattgacatcccggacgccaagaagaggggcaagaagaagaagcgcggccgggccaccgacagcttctcgggcaggtttgaagacgtctaccagctgcaggaagatgtgctgggggagggcgctcatgcccgagtgcagacctgcatcaacctgatcaccagccaggagtacgccgtcaagatcattgagaagcagccaggccacattcggagcagggttttcagggaggtggagatgctgtaccagtgccagggacacaggaacgtcctagagctgattgagttcttcgaggaggaggaccgcttctacctggtgtttgagaagatgcggggaggctccatcctgagccacatccacaagcgccggcacttcaacgagctggaggccagcgtggtggtgcaggacgtggccagcgccttggactttctgcataacaaaggcatcgcccacagggacctaaagccggaaaacatcctctgtgagcaccccaaccaggtctcccccgtgaagatctgtgacttcgacctgggcagcggcatcaaactcaacggggactgctcccctatctccaccccggagctgctcactccgtgcggctcggcggagtacatggccccggaggtagtggaggccttcagcgaggaggctagcatctacgacaagcgctgcgacctgtggagcctgggcgtcatcttgtatatcctactcagcggctacccgcccttcgtgggccgctgtggcagcgactgcggctgggaccgcggcgaggcctgccctgcctgccagaacatgctgtttgagagcatccaggagggcaagtacgagttccccgacaaggactgggcccacatctcctgcgctgccaaagacctcatctccaagctgctggtccgtgacgccaagcagaggctgagtgccgcccaagtcctgcagcacccctgggttcaggggtgcgccccggagaacaccttgcccactcccatggtcctgcagaggtgggacagtcacttcctcctccctccccacccctgtcgcatccacgtgcgacctggaggactggtcagaaccgttactgtgaatgagtgaagatcctggaggaccctgggccccaggccagctcccatcgctgggggacggtgaacggccatgtgttaatgttacgatgtttttaaaagacaaaaaaaaaaaaaaaacctcaaaagtttttttaaagtgggggaaaaacatccaagcactttaattccaatgtaccaggtgaactgacggagctcagaagttttcctttacaccaactgtcaatgccggaattttgtattctgttttgtaaagatttaataaaagtcaaaaaacttgcaaaaaaaaaaaaaaaaaaa

SEQ ID NO: 1626 - DNA, 3795 bp, Homo sapiens
cagcggcggtggcccaggtagaggggtccgcgctggcggcggcggcggcgctgttccccgcgcggtccgcggagcggggtccgggctgcgcgacgtggggcggcggcggcactgcggccccggcccaagcccgaccccgggtcccctcctcggccgccccccgcccggccgcccgccctcgggcctccccccgggccctcggtcccctcccccgctggcggggcccggacagaagatggtgcagaagaaaccagccgaacttcagggtttccaccgttcgttcaaggggcagaaccccttcgagctggccttctccctagaccagcccgaccacggagactctgactttggcctgcagtgctcagcccgccctgacatgcccgccagccagcccattgacatcccggacgccaagaagaggggcaagaagaagaagcgcggccgggccaccgacagcttctcgggcaggtttgaagacgtctaccagctgcaggaagatgtgctgggggagggcgctcatgcccgagtgcagacctgcatcaacctgatcaccagccaggagtacgccgtcaagatcattgagaagcagccaggccacattcggagcagggttttcagggaggtggagatgctgtaccagtgccagggacacaggaacgtcctagagctgattgagttcttcgaggaggaggaccgcttctacctggtgtttgagaagatgcggggaggctccatcctgagccacatccacaagcgccggcacttcaacgagctggaggccagcgtggtggtgcaggacgtggccagcgccttggactttctgcataacaaaggcatcgcccacagggacctaaagccggaaaacatcctctgtgagcaccccaaccaggtctcccccgtgaagatctgtgacttcgacctgggcagcggcatcaaactcaacggggactgctcccctatctccaccccggagctgctcactccgtgcggctcggcggagtacatggccccggaggtagtggaggccttcagcgaggaggctagcatctacgacaagcgctgcgacctgtggagcctgggcgtcatcttgtatatcctactcagcggctacccgcccttcgtgggccgctgtggcagcgactgcggctgggaccgcggcgaggcctgccctgcctgccagaacatgctgtttgagagcatccaggagggcaagtacgagttccccgacaaggactgggcccacatctcctgcgctgccaaagacctcatctccaagctgctggtccgtgacgccaagcagaggctgagtgccgcccaagtcctgcagcacccctgggttcaggggtgcgccccggagaacaccttgcccactcccatggtcctgcagaggaacagctgtgccaaagacctcacgtccttcgcggctgaggccattgccatgaaccggcagctggcccagcacgacgaggacctggctgaggaggaggccgcggggcagggccagcccgtcctggtccgagctacctcacgctgcctgcagctgtctccaccctcccagtccaagctggcgcagcggcggcaaagggccagtctgtcctcggccccagtggtcctggtgggagaccacgcctgaccctcccatctcccctctgtacataggtcacccgtcccccaatcaaatctaaaggttttttaagctatcgccagccggtgtccagcgggctgcccctcctctgcctggattcccaggcactaagctcagctgaggggggtgttttatagaaggtttttgcttttgggttttttttttcctgtttccacccctccccgttattttttcctttggatggttaaaagcattgcaggcacccgggaaggtgagcagagggtaggtgggtgggcttgtcccctccccggtcccccgccctgctcacctctactatgaaggtgcccccaggtcacctgtgctgcccgccatctgcccacgtggcttgcagtgactcaggagagcaggcccacagcgtttgccatcttgcagagctggggaggggcacaggaccctgccctcgtgttccctcccagcccgcagtatttcagggacaggctcttcccctctatccctcaccctgagagcacccctggtggcttggttggggaagggaggggctgcctgtctctggaggtgtcaggcaggcaggtggcaggcagctcacccacccaccccatgggatcccccagcccttcacccgcgcctgccttgtccccatgatagttgacaatcggggcttcctgcaaggcccgtctgtctgtccaggactcctggtggccagattcggcctccgaccttgaccttaaactgcagctgaccccaggggctcgccgctgcccctcccctccacaccaaggcctgagacagcaggagccccgcctggcccgaagccgtttccaccgcagcaggcagaggggctggacaggcactgtcagccaatgtggggggtcctgaagacacccccttggggcacccgagtgccccttctcagggctcagtctgaccgtagccacgtcctgcctcgcgccgcccctcgggcctgacctggaagctccgtcagctccgtccttgtccttagagctgagcccagaccccggggtctggccgaatcctcacccccagggcagtgtttttggtctgccaccttcaggaaaacggctgcggcctcggcctcccttcgggcacccaggaatgcgggggtctgctcagtccccccaccctccatgctccaacccccgggggctgcggagcctgctgccccctccccgcgggtggggacgttctatgcaatacagggttccactttagaagtgcgcgcggctagggtcaccgcccgcccttcccggcgcagcccccgagctccacagctggggcagcccctctggcttctaaatccgcggtcgggattcttcctcctgtttagttttttagtttttccttaaaaaaaaacaacacatcgatggactttgcttccctgttcttgaagaatacttgaatgtcggggggcctgggggtgggggcctcggagaccgtctgcctggccctgctgcccctcctgaatctcgtatgatggtcacagtccggtggccgtgggggtgctctgccttccctggtccccactgcccatatctgtggactgccccttccaaagacccctggggggggtggggcattccgcccacccctttcccccatcacttctcgcctgtcagtgattccatgtttcgtaacgggggattctctgcctttttgtatcaaagaacaagcaaatggacccccgcccgctgcaggcgcccatagccatcgggtctctaaagctgagtggctagcagcgtttgtttgtttgtttttttttttttttctgaaggtgggacagtcacttcctcctccctccccacccctgtcgcatccacgtgcgacctggaggactggtcagaaccgttactgtgaatgagtgaagatcctggaggaccctgggccccaggccagctcccatcgctgggggacggtgaacggccatgtgttaatgttacgatgtttttaaaagacaaaaaaaaaaaaaaaacctcaaaagtttttttaaagtgggggaaaaacatccaagcactttaattccaatgtaccaggtgaactgacggagctcagaagttttcctttacaccaactgtcaatgccggaattttgtattctgttttgtaaagatttaataaaagtcaaaaaacttgcaaaaaaaaaaaaaaaaaaaa

SEQ ID NO: 1627 - DNA, 3712 bp, Homo sapiens
caggtgcgagccactgcgctcggccgatactttcttagtgccccagtttaaggaagggcggttcaggagcagagagtctgacaggatcttactttatccctttagctctttttctttcaaattcctctgtctcgcttaaatcttcccgcatcttctcctttctatttaattctgccttccccggttctccttagaacctcatgtccttttctttagctccatttctttcacctcaaagctggccgccaccgctgccacctgctcagagtgaaataatgaaggtggtcaacctgaagcaagccattttgcaagcctggaaggagcgctggagtgactaccaatgggcaatcaacatgaagaaattctttcctaaaggagccacctgggatattctcaacctggcagatgcgttactagagcaggccatgattggaccatcccccaatcctctcatcttgtcctacctgaagtatgccattagttcccagatggtgtcctactcttctgtcctcacagccatcagtaagtttgatgacttttctcgggacctgtgtgtccaggcattgctggacatcatggacatgttttgtgaccgtctgagctgtcacggcaaagcagaggaatgcatcggactgtgccgagcccttcttagcgccctccactggctgctgcgctgcacggcagcctctgcagagcggctgcgggaggggctggaggccggcactccagccgctggggagaagcagcttgccatgtgccttcagcgcctggagaaaaccctcagcagcaccaagaaccgggccctgctgcacatcgccaaactagaggaggcctcttcttggactgccatcgagcattctctcttgaaacttggagagatcctggccaatctcagcaacccgcagctccggagtcaggccgagcagtgtggcaccctcattaggagcatccccacgatgctgtctgtgcatgcggagcagatgcacaagaccggcttccccactgtccacgccgtgatcctgctcgagggcaccatgaacctgacaggcgagacgcagtccctggtggagcagctgacgatggtgaagcgcatgcagcatatccccaccccactttttgtcctggagatctggaaagcttgcttcgtggggctcattgagtctcccgagggtacggaggagctcaagtggacagctttcactttcctcaagattccacaggttttggtgaagttgaagaagtactctcatggagacaaggacttcactgaggatgtcaactgtgcttttgagttcctgctgaagctcacccccttgttggacaaagctgaccagcgctgcaactgtgactgtacaaacttcctgctccaagaatgtggcaagcaggggcttctgtctgaggccagcgtcaacaaccttatggctaagcgcaaagcagaccgagagcacgcaccccagcagaaatcgggagagaatgccaacatccagcccaacatccagctgatcctccgggcggagcccactgtcacaaacatcctcaagacgatggatgcagaccactctaagtcaccggagggactgctgggagtcctgggccacatgctgtccgggaagagtctggacttgctgctggctgccgccgccgccactggaaagctgaaatccttcgcccggaaattcatcaatttgaatgaattcacaacctatggcagcgaagaaagcaccaaaccggcctccgtccgggccctgctgtttgacatctccttcctcatgctgtgccatgtggcccagacctatggttcagaggtgattctgtccgagtcgcgcacaggagctgaggtgcccttcttcgagacctggatgcagacctgcatgcctgaggagggcaagatcctgaaccctgaccacccctgcttccgccccgactccaccaaagtggagtccctggtggccctgctcaacaactcctcggagatgaagctagtgcagatgaagtggcatgaggcctgtctcagcatctcagccgccatcttggaaatcctcaatgcctgggagaatggggtcctggccttcgagtccatccagaaaatcactgataacatcaaagggaaggtatgcagtctggcggtgtgtgctgtggcttggcttgtggcccacgtccggatgctggggctggatgagcgtgagaagtcgctgcagatgatccgccagctggcagggccactgtttagtgagaacaccctgcagttctacaatgagagggtggtgatcatgaactcgatcctggagcgcatgtgtgccgacgtgctgcagcagacagccacgcagatcaagtttccctccaccggggtggacacaatgccctactggaacctgctgccccccaagcggcccatcaaagaggtgctgacggacatttttgccaaggtgctggagaagggctgggtggacagccgctccatccacatctttgacaccctgctgcacatgggcggcgtctactggttctgcaacaacctgattaaggagctgctgaaggagacgcggaaggagcacacgctgcgggcagtggagctgctctactccatcttctgcctggacatgcagcaagtgaccctggtcctgctgggccacatcctacctggcctgctcactgactcctccaagtggcacagcctcatggaccccccgggcactgctcttgccaagctggccgtgtggtgtgccctcagttcctactcctcccacaagggacaggcgtccacccgccagaagaagagacaccgcgaagacattgaggattatatcagcctcttccccctggacgatgtgcagccttcgaagttgatgcgactgctgagctctaatgaggacgatgccaacatcctttcgagccccacagaccgatccatgagcagctccctctcagcctctcagctccacacggtcaacatgcgggaccctctgaaccgagtcctggccaacctgttcctgctcatctcctccatcctggggtctcgcaccgctggcccccacacccagttcgtgcagtggttcatggaggagtgtgtggactgcctggagcagggtggccgtggcagcgtcctgcagttcatgcccttcaccaccgtgtcggaactggtgaaggtgtcagccatgtctagccccaaggtggttctggccatcacggacctcagcctgcccctgggccgccaggtggctgctaaagccattgctgcactctgaggggcttggcatggccgcagtgggggctggggactggcgcagccccaggcgcctccaagggaagcagtgaggaaagatgaggcatcgtgcctcacatccgctccacatggtgcaagagcctctagcggcttccagttccccgctcctgactcctgacctccaggatgtctcccggttttttttttcaaaatttcctctccatctgctggcccctgaggagagtgagcagcctggaccacaagcccagtggtcacccctgtgtgcgcccgccccagcccaggagtagtcttacctctgaggaactttttagatgcaaagtgtgtatgtgtgtgtgtgtgtgtgtgtgtgtgtgtttgtgtgtattttgtaatatgtgagggaaatctaccttcgttcatgtataaataaagctcctcgtggctccctttgtgaaaaaaaaaaaaaaaaaaaaaaaaaaaaaaaaaaaa

SEQ ID NO: 1628 - DNA, 2547 bp, Homo sapiens
agcgggcgccggacgacctgtggcccaatggcggcggcgcgcgggcacgctgggggccggccagacgggccgacttttccagaagacccggatagttcctcccggccacgccgcgccggctctgggcactcagcatcgtttccttttcctccgctggagcagctatggcggcggtgaagaccctgaaccccaaggccgaggtggcccgagcgcaggcggcgctggcggtcaacatcagcgcagcgcggggtctgcaggacgtgctaaggaccaacctggggcccaagggcaccatgaagatgctcgtttctggcgctggagacatcaaacttactaaagacggcaatgtgctgcttcacgaaatgggccttcatcctagaataatcactgaaggatttgaagctgcaaaggaaaaggcccttcagtttttggaagaagtcaaagtaagcagagagatggacagggaaacacttatagatgtggccagaacatctcttcgtactaaagttcatgctgaacttgcagatgtcttaacagaggctgtagtggactccattttggccattaaaaagcaagatgaacctattgatctcttcatgattgagatcatggagatgaaacataaatctgaaactgatacaagcttaatcagagggcttgttttggaccacggagcacggcatcctgatatgaagaaaagggtggaggatgcatacatcctcacttgtaacgtgtcattagagtatgagaaaacagaagtgaattctggctttttttacaagagtgcagaagagagagaaaaactcgtgaaagctgaaagaaaattcattgaagatagggttaaaaaaataatagaactgaaaaggaaagtctgtggcgattcagataaaggatttgttgttattaatcaaaagggaattgaccccttttccttagatgctctttcaaaagaaggcatagttgctctgcgcagagctaaaaggagaaatatggagaggctgactcttgcttgtggtggggtagccctgaattcttttgacgacctaagtcctgactgcttgggacatgcaggacttgtatatgagtatacattgggagaagagaagtttacctttattgagaaatgtaacaaccctcgttctgtcacattattgatcaaaggaccaaataagcacacactcactcagatcaaagatgcagtgagggacggcttgagggctgtcaaaaatgctattgatgatggctgtgtggttccaggtgctggtgccgtggaagtggcaatggcagaagccctgattaaacataagcccagtgtaaagggcagggcacagcttggagtccaagcatttgctgatgcattgctcattattcccaaggttcttgctcagaactctggttttgaccttcaggaaacattagttaaaattcaagcagaacattcagaatcaggtcagcttgtgggtgtggacctgaacacaggtgagccaatggtggcagcagaagtaggcgtatgggataactattgtgtaaagaaacagcttcttcactcctgcactgtgattgccaccaacattctcttggttgatgagatcatgcgagctggaatgtcttctctgaaaggttgaattgaagcttcctctgtatctgaatcttgaagactgcaaagtgatcctgaggattacagctgtggaatttttgtccaagcttcaaataattttgaaagaaattttcccatatgaaaaaaggagagaacactggcatctgttgaaatttggaagttctgaaattatagtatttttaaaaattgcactgaagtgtatacacataaagcaggtcttttatccagtgaacaggatgttttgctttagcagcagtgacataaaattccatgttagataagcatatgttacttaccttgttattaaatatttcttgaaaagcaaattttaatggtttaattttatgtggacgtatgttaaattatccaactaccctattgttaagcatttggttttaaaatttttatgctaatataaatgctcaagtaatttaaaatattgaaagcatccctgttggtataaatttctgagtaaatgcattggatcagttggactttgaacgcctttgaaatggctttgctaaaatgctcccgccacaaagttgtaggaaatgggaagaggagtcaactagaggcaagggagttgagagagctgcaactgtaaagggcaagaacaggcagaggtaaaaagatgatggaaggtgtggtgactaagggccacggttattgggtgaaatttgagattgtaggccaactgtattttcaagcttctgaacttaggcaaaatattcatcgcaaagtctctagcgtcatatttttctcacccaaattacgtttccacgagattatttatatatagttggtctatctctgcagtccttgaaggtgaagttgtgtgttactaggctgtgttttgggatgtcagcagtggcctgaagtgagttgtgcaataaatgttaagttgaaacctcaaaaaaaaaaaaaaaaaa

SEQ ID NO: 1629 - DNA, 2682 bp, Homo sapiens
agcgggcgccggacgacctgtggcccaatggcggcggcgcgcgggcacgctgggggccggccagacgggccgacttttccagaagacccggatagttcctcccggccacgccgcgccggctctgggcactcagcatcgtttccttttcctccgctggagcagctatggcggcggtgaagaccctgaaccccaaggccgaggtggcccgagcgcaggcggcgctggcggtcaacatcagcgcagcgcggggtctgcaggacgtgctaaggaccaacctggggcccaagggcaccatgaagatgctcgtttctggcgctggagacatcaaacttactaaagacggcaatgtgctgcttcacgaaatgcaaattcaacacccaacagcttccttaatagcaaaggtagcaacagcccaggatgatataactggtgatggtacgacttctaatgtcctaatcattggagagctgctgaaacaggcggatctctacatttctgaaggccttcatcctagaataatcactgaaggatttgaagctgcaaaggaaaaggcccttcagtttttggaagaagtcaaagtaagcagagagatggacagggaaacacttatagatgtggccagaacatctcttcgtactaaagttcatgctgaacttgcagatgtcttaacagaggctgtagtggactccattttggccattaaaaagcaagatgaacctattgatctcttcatgattgagatcatggagatgaaacataaatctgaaactgatacaagcttaatcagagggcttgttttggaccacggagcacggcatcctgatatgaagaaaagggtggaggatgcatacatcctcacttgtaacgtgtcattagagtatgagaaaacagaagtgaattctggctttttttacaagagtgcagaagagagagaaaaactcgtgaaagctgaaagaaaattcattgaagatagggttaaaaaaataatagaactgaaaaggaaagtctgtggcgattcagataaaggatttgttgttattaatcaaaagggaattgaccccttttccttagatgctctttcaaaagaaggcatagttgctctgcgcagagctaaaaggagaaatatggagaggctgactcttgcttgtggtggggtagccctgaattcttttgacgacctaagtcctgactgcttgggacatgcaggacttgtatatgagtatacattgggagaagagaagtttacctttattgagaaatgtaacaaccctcgttctgtcacattattgatcaaaggaccaaataagcacacactcactcagatcaaagatgcagtgagggacggcttgagggctgtcaaaaatgctattgatgatggctgtgtggttccaggtgctggtgccgtggaagtggcaatggcagaagccctgattaaacataagcccagtgtaaagggcagggcacagcttggagtccaagcatttgctgatgcattgctcattattcccaaggttcttgctcagaactctggttttgaccttcaggaaacattagttaaaattcaagcagaacattcagaatcaggtcagcttgtgggtgtggacctgaacacaggtgagccaatggtggcagcagaagtaggcgtatgggataactattgtgtaaagaaacagcttcttcactcctgcactgtgattgccaccaacattctcttggttgatgagatcatgcgagctggaatgtcttctctgaaaggttgaattgaagcttcctctgtatctgaatcttgaagactgcaaagtgatcctgaggattacagctgtggaatttttgtccaagcttcaaataattttgaaagaaattttcccatatgaaaaaaggagagaacactggcatctgttgaaatttggaagttctgaaattatagtatttttaaaaattgcactgaagtgtatacacataaagcaggtcttttatccagtgaacaggatgttttgctttagcagcagtgacataaaattccatgttagataagcatatgttacttaccttgttattaaatatttcttgaaaagcaaattttaatggtttaattttatgtggacgtatgttaaattatccaactaccctattgttaagcatttggttttaaaatttttatgctaatataaatgctcaagtaatttaaaatattgaaagcatccctgttggtataaatttctgagtaaatgcattggatcagttggactttgaacgcctttgaaatggctttgctaaaatgctcccgccacaaagttgtaggaaatgggaagaggagtcaactagaggcaagggagttgagagagctgcaactgtaaagggcaagaacaggcagaggtaaaaagatgatggaaggtgtggtgactaagggccacggttattgggtgaaatttgagattgtaggccaactgtattttcaagcttctgaacttaggcaaaatattcatcgcaaagtctctagcgtcatatttttctcacccaaattacgtttccacgagattatttatatatagttggtctatctctgcagtccttgaaggtgaagttgtgtgttactaggctgtgttttgggatgtcagcagtggcctgaagtgagttgtgcaataaatgttaagttgaaacctcaaaaaaaaaaaaaaaaaa

SEQ ID NO: 1630 - DNA, 731 bp, Homo sapiens
cttgccggaaatgacgaacgagtcaaccggatcggtgactgtggagggcgagctgagccctggccgccgccacaatgggccgcgagtttgggaatctgacgcggatgcggcatgtgatcagctacagcttgtcaccgttcgagcagcgcgcctatccgcacgtcttcactaaaggaatccccaatgttctgcgccgcattcgggagtctttctttcgcgtggtgccgcagtttgtagtgttttatcttatctacacatgggggactgaagagttcgagagatccaagaggaagaatccagctgcctatgaaaatgacaaatgagcaacgcatccggatgacggttccctgtctctgaaagacctttctctggaagaggagtctgcattgtagtgtctcaaagacacaataaacttcctatggtctgcactgttgtgatattacatttttgtgagtagaatcctgtgtgaccactaatattcaagttcatgaagcgcccctcctcagcatgagtcttgaagttttgcctggtctcgggttttggtgaaagagcagggctccccctttgttccattatctacaagaaagtagctgcaggtactcctgcatctaaccatttgtgggtgacatgggctatggcgagtgctggttcttggccctctgctcccatagcaacaataaagtctactaactatattgtaattagtatgtgtcagggacgcttttattttt

SEQ ID NO: 1631 - DNA, 4371 bp, Homo sapiens
gaattccgggctgtttagctgtaattagggtgcaaggataaggtgtaagaactggctggaggttgaatgttttcctggaggagtgttagcatcaactagatccctggaatttctgcctttctgtctcaagatgcatgtctttgtccagagtacctgtggagaagaaacaatggattccttagaccatatgctgacagatcctctggaacttggtccgtgtggagatggccatggcacgcgcatcatggaggattgcctcctgggaggcaccagagttagtctgcccgaggaccttctggaggatcctgagatcttctttgatgttgtcagcctctcaacatggcaggaagtgttaagtgattctcaacgtgaacacctccagcagtttctgccccagtttcctgaagacagtgctgagcagcagaatgaactcatcttagccttgttcagtggggagaacttccgctttggaaaccctctgcacattgcccagaagcttttccgagacggacactttaaccccgaggtggtcaagtaccggcagttatgcttcaagtcacagtacaagcgctacctcaactcccagcagcagtatttccatcggctgctgaagcaaattcttgcttcccggagtgatctgctggagatggcccggcggagtggccccgcccttcccttccggcagaaacgcccttcaccatcccgcacacctgaggagcgggagtggcggacccagcagcgctacttgaaggtcttaagggaagtgaaagaggagtgtggtgacacagccctgtcatctgatgaagaggccacgttggatttacaagaacaattttcttttgaagatctcagctcatggcttccgagctctccagcacgttctcctagtcctgcggtgcccctgcgggtggtgcccacactttcaaccacggatatgaaaaccgcagataaagtagaactgggggacagtgacctgaagataatgttaaagaagcaccacgagaagcggaaacatcagccagatcacccggaccttttgacaggggacctgactctcaatgacatcatgactcgagtaaatgctggcaggaagggctctctggcagccttatatgacttggctgtccttaaaaaaaaggttaaggaaaaagaggaaaagaagaagaagaaaataaaaacgatcaaatcagaggcagaggacctggccgagccgctaagcagtactgaaggggtcgcacctctctcacaggccccctctccgctggcaattcctgctatcaaggaagagccccttgaagacctcaagccttgccttggaatcaatgaaatatcttccagcttcttctctcttctattagagatcttgctgctggagagtcaggctagccttcctatgctagaggagcgagttttggattggcagtcatcgccagccagctccctcaacagctggttctctgcggcccccaactgggctgagttggtactaccagccctgcagtatcttgctggagaaagtcgagctgttccttccagtttctctccatttgttgaattcaaagagaaaacccagcagtggaagttgcttggccaatcccaagataatgaaaaggaattagctgctctcttccagctatggctagagaccaaagatcaggccttctgtaagcaagaaaatgaagacagctcagatgccacaacacctgtccctcgggtaagaactgactatgtggtgcgtcccagcacgggggaggagaaacgggtttttcaggagcaggagcgttacaggtatagccaaccccataaggcgttcacctttcgcatgcacggctttgagtctgtggtggggccagtgaagggcgtgtttgacaaggagacctcgctcaacaaggctcgggagcactccctgctgcgctccgaccggcctgcctacgtcaccattctgtctcttgttcgggacgctgcggctcgactgcctaatggagaaggcacacgggcagagatctgtgaactgcttaaggactcccagtttcttgcaccagatgtcaccagcactcaggtaaatacagtagtgagtggtgcactggatcggctacattacgaaaaagatccctgtgtgaaatacgacattggacgaaagctgtggatctacctgcatcgtgaccggagtgaagaagagtttgagcggattcaccaagcacaagcagctgcagctaaagccagaaaagctcttcagcaaaaacccaagcccccatccaaggtgaagtccagtagcaaggagagctccataaaggtccttagcagtggcccttctgagcagagccagatgagcctcagtgactccagtatgccacccaccccagtcacacctgtaacccccaccacaccagcattgcccgccattcccatctcccctccacctgtatcggcagtgaacaaaagcggcccttccacagtctcagaaccagctaagtctagctcgggtgttcttctggtgtcttcaccaacaatgccacatctgggaacaatgctttccccagcttccagccagactgcacccagttctcaggctgccgcccgggtcgtgagccactctggctctgctggactgtctcaggtgcgagtggtggcccagcctagccttcctgctgttccccagcagtcgggagggccggcacagacattgccacagatgccagcaggaccgcagatccgggttccagccactgccacacagaccaaagtagtgccccagacagtaatggccactgtgcccgtcaaagcgcagactacggcagccactgtgcagcggcctggacccgggcagacagggctcacggtgacaagtctccctgccacagccagccctgtgagtaagccagccacgagttctcctgggacctctgctcccagtgcctccacggctgccgtcattcaaaatgtcacaggacagaacatcatcaagcaggtggcaatcactgggcagcttggtgtgaagccccaaacaggcaacagcattccactcacagccactaacttccgcatccagggtaaggatgtattgcgtctgccgccctcttccatcaccacagatgccaagggccagacggttctgcgaatcactccggacatgatggccacattggccaagtcccaggttaccacagtcaaattgacccaggacctcttcgggacaggaggcaacactacaggcaaaggcatctctgccaccttacacgtcacttccaatccagtacatgcagctgatagccctgccaaggccagttcagccagtgccccttcatccactccaacaggtaccactgtggtcaaagtgactcctgacctcaagccaacagaagcctcaagttcggcttttcgcttgatgccagctcttggcgtgagtgtggctgaccagaagggaaaaagcacagtggcctcttcagaagcaaaaccagctgccacgatccgcatcgtgcagggactgggagtgatgcctcccaaagcaggccagaccatcaccgttgcaacccacgccaagcaaggggcctcggtggccagtgggtctggaactgtccatacttcagcggtgtccttacccagtatgaatgctgctgtgtccaagactgtagctgtggcttctggggctgcaagcacccccatcagcatcagcacaggagcccccaccgtgcggcaggtccctgtcagcaccacggttgtgtccacgtcccaggctgggaagttgcctacacggatcacagttcccctctctgtgatcagccagccaatgaagggcaagagcgtggtcacagcccccatcatcaaaggcaaccttggagccaacctcagtgggttgggccgcaacatcatcctcacaactatgccagcaggcactaagctcattgctggcaataagcctgttagtttcctcactgctcagcagttgcagcagcttcagcagcaaggtcaggccacacaggtgcgcatccagactgtccctgcatcccatctccaacagggaacagcttctggctcctccaaagcagtctccactgttgttgtgactacagctccgtctcctaaacaggcacctgagcaacaatgattatgagagaggatggcttccgtgaaagaccatgcctggtctgctctggctgagaagggaccagggaggttgcatcattgttttaagcttgcctgttcaaggcagccaggcgaggggtgatggcaacggtggcctggattcgtggcctggattctgctgccacgtgccatagtggagcaccctgagaaagttcactccagggttccaaggtctgctctctaccaatctaggagaatattctgttgaaattgcagaaccggaattcc

SEQ ID NO: 1632 - DNA, 1559 bp, Homo sapiens
ccccagtctgagaacaagaaagaagaacttctgtctcgagggtctcactgtcaaccaggccagagtgcagtgaagatcatacctcactacatccgtgaactcccgggctcctcccacctaagtctcttgagtagctgggacttcaggagactgaagccaaggataccagcagagccaacatttgcttcaagttcctgggcctgctgacagcgtgcaggatgctgttggaacccggcagaggctgctgtgccctggccatcctgctggcaattgtggacatccagtctggtggatgcattaacatcaccagctcagcttcccaggaaggaacgcgactaaacttaatctgtactgtatggcataagaaagaagaggctgaggggtttgtagtgtttttgtgcaaggacaggtctggagactgttctcctgagaccagtttaaaacagctgagacttaaaagggatcctgggatagatggtgttggtgaaatatcatctcagttgatgttcaccataagccaagtcacaccgttgcacagtgggacctaccagtgttgtgccagaagccagaagtcaggtatccgccttcagggccattttttctccattctattcacagagacagggaactacacagtgacgggattgaaacaaagacaacaccttgagttcagccataatgaaggcactctcagttcaggcttcctacaagaaaaggtctgggtaatgctggtcaccagccttgtggcccttcaagctttgtaagccttgtgccaaaagaaacttttaaaacagctacagcaagatgagtctgactatggcttagtatctttctcattacaataggcacagagaagaatgcaacagggcacaggggaagagatgctaaatataccaagaatctgtggaaatataagctggggcaaatcagtgtaatccttgactttgctcctcaccatcagggcaaacttgccttcttccctcctaagctccagtaaataaacagaacagctttcaccaaagtgggtagtatagtcctcaaatatcggataaatatatgcgtttttgtaccccagaaaaacttttcctccctcttcatcaacatagtaaaataagtcaaacaaaatgagaacaccaaattttgggggaataaatttttatttaacactgcaaaggaaagagagagaaaacaagcaaagataggtaggacagaaaggaagacagccagatccagtgattgacttggcatgaaaatgagaaaatgcagacagacctcaacattcaacaacatccatacagcactgctggaggaagaggaagatttgtgcagaccaagagcaccacagactacaactgcccagcttcatctaaatacttgttaacctctttggtcatttctctttttaaataaatgcccatagcagtatttggagtattttcttttctcctaaatccacaaactctcttctttctctttggacagatgacctcttgtcatagttaagcagagagtgggcaggatattcctgataggaggaactacatgaataaaggggtaag

SEQ ID NO: 1633 - DNA, 3293 bp, Homo sapiens
cgctccctcccctcctagctggcttcggcggggacggcggcggcggcggcggcggcggcggcgggcggggagggcgtgcgccggccgagaggtgtcggcggcgaggcaaaggaagtttcaagtggaaggtcgtccgtcggccggcgcgtcctcctgctctcctccgcagcatcatggcggagccgagcggctcgcccgtgcacgtccagcttccccagcaggcggccccggtgacagcggcggcggcggcggccccggcggccgcgacagcagcgccggccccggcagctcccgcggccccggccccggccccggccccggccccggcggcacaggctgtcggctggcccatctgcagggacgcgtacgagctgcaggaggttatcggcagtggagctactgctgtggttcaggcagccctatgcaaacccaggcaagaacgtgtagcaataaaacggatcaacttggaaaaatgccagaccagtatggatgaactattaaaagaaattcaagccatgagtcagtgcagccatcccaacgtagtgacctattacacctcttttgtggtcaaagatgaactttggctggtcatgaaattactaagtggaggttcaatgttggatatcataaaatacattgtcaaccgaggagaacacaagaatggagttctggaagaggcaataatagcaacaattcttaaagaggttttggaaggcttagactatctacacagaaacggtcagattcacagggatttgaaagctggtaatattcttctgggtgaggatggttcagtacaaatagcagattttggggtaagtgcgttcctagcaacagggggtgatgttacccgaaataaagtaagaaaaacattcgttggcaccccatgttggatggctcctgaagtcatggaacaggtgagaggctatgacttcaaggctgacatgtggagttttggaataactgccattgaattagcaacaggagcagcgccttatcacaaatatcctcccatgaaagtgttaatgttgactttgcaaaatgatccacccactttggaaacaggggtagaggataaagaaatgatgaaaaagtacggcaagtcctttagaaaattactttcactgtgtcttcagaaagatccttccaaaaggcccacagcagcagaacttttaaaatgcaaattcttccagaaagccaagaacagagagtacctgattgagaagctgcttacaagaacaccagacatagcccaaagagccaaaaaggtaagaagagttcctgggtcaagtggtcaccttcataaaaccgaagacggggactgggagtggagtgacgacgagatggatgagaagagcgaagaagggaaagcagctttttctcaggaaaagtcacgaagagtaaaagaagaaaatccagagattgcagtgagtgccagcaccatccccgaacaaatacagtccctctctgtgcacgactctcagggcccacccaatgctaatgaagactacagagaagcttcttcttgtgccgtgaacctcgttttgagattaagaaactccagaaaggaacttaatgacatacgatttgagtttactccaggaagagatacagcagatggtgtatctcaggagctcttctctgctggcttggtggatggtcacgatgtagttatagtggctgctaatttacagaagattgtagatgatcccaaagctttaaaaacattgacatttaagttggcttctggctgtgatgggtcggagattcctgatgaagtgaagctgattgggtttgctcagttgagtgtcagctgatgtatgtcccttgatgtcaccctgatctgtcatgccccaccgccacccctactcccttcaaccctccctctttctgcccatttcctcccaccccctcactcccatttcctagcaaaatcagaagattgtgaagaggccggcttcaacaaaatgggataaaaaaataattttttaaaacttacaacactccgagttctgctttattctctagcaatccacagtacaagaacaagcaaatgccacagctgcacgactgttgctcatttttccaaaagctatttaatattcttagcaatcaatttggatatcccttaagtgaaaagaatctgaaatacactcaggtggtcttatttattggcaacaaaaggaattttctatccagaagcctatttctcctttcattgttgttatttctgttataatactttaaattgtacatctgacaatactgcctcttttatgttgtatttagaaattaatatacttataaaattaagatttattagccaaacttgaattctagttttaaaactgactgtgaattttatttttcatatatttatgcattacacaccttagctataagaaaaaaagggttttgattatatgcttcttgcagttaatctcgttatttaaacaaaaagttttgggtctgtctttggagtatttgtaacttctaaattttgaaatgactgaattaggaatttggatgcttattcttttagtctgtttgcctaaaaaccaatttacaatctgactgtctcttgggagagggaggtgccttgcaaactttcacattaagaatgtgcctgaggctgctttactctggaatagtctcagatctaaaatttcctctatataaggtggcatatgttaagttttgcttcattggaccgtttagaatgctatgtaaaatgttgccattctgttagattgctaactatatacccatctctgatttggctctccttaagtgataggatttgttattctaaaggtgataaacttgaaaatatcagaatctgagttttacttgaaattttgcagaatacccaggtggagtgaaaattggaagggttttgtgcaatgactaaaaggtaaaacgctgttaaggttcaagaatcaatactttcaacccaagtagccccctgcttgactgtatattatggaactagtaaaccttaggattttgaaaattggagtctaatctttcaaggaggtgggctcccaggatggtaccattgctctttcctagctaaccctagatatggcagctctttaatgtacttcaaaaagcaaatatatattactaaggaaaaaaagttatttataattgccttgtcataattgttaaggtgttctagagccatttgcatacaatttaatgtaatttcattccattctattgtttacacaacgattactcgaagatgactgcaaaggtaaaaggaaaataaaagtgtattgcacaatgag

SEQ ID NO: 1634 - DNA, 4582 bp, Homo sapiens
ccagggtgaaagttcagcgcgccggcggcacttccaacatggcggcggccggggcggcggtagcgcgcagcccgggaatcggagcgggacctgcgctgagagcccggcgctcgcccccgccgcgggccgcacggctgccgcggctgctagtgctgctagcggcggcggcggtggggccgggcgcgggcggtgcggcgcggctgtaccgcgcgggcgaggacgccgtgtgggtgctggacagcggcagcgtgcgcggggccaccgccaacagctcggccgcgtggctcgtgcagttctactcgtcgtggtgtggccactgcatcgcgtacgcgcccacttggcgggccctggctggggatgtgcgagactgggccagtgccattcgcgtcgcagctctggactgcatggaagagaagaaccaggccgtgtgccatgactacgacatccacttctaccccaccttccggtattttaaagcatttacaaaggagtttacaactggagaaaattttaaaggacctgaccgagagctgcgaacagtcagacagacgatgattgacttcctgcagaaccacacggaaggaagccggccccctgcctgcccgcgcctagaccccattcagcccagtgatgttctttcccttcttgacaaccgtggcagccattacgtggctattgtctttgaaagcaacagctcctaccttggacgggaggtgatcttagacctgatcccgtatgaaagcatcgtggtgacccgagcactggacggggacaaagcatttctggagaaacttggtgtttcttcagtcccttcgtgttacctgatctacccaaatgggtcgcatggattgattaacgtcgtgaagcctctgcgggccttcttttcgtcttatttgaagtcattgccggatgtgaggaaaaaatcgcttcccttgcctgaaaagccacacaaagaagaaaattcagaaatcgtggtttggagagaatttgacaagtcgaagctgtacacggtggacctggagtcagggctacactacctcctgcgggtggagctggcagcccacaagtccctggccggagcagagctgaagacgctcaaggactttgtgactgtcttggccaagctgttccctggacggccgccagtcaagaagctgttggagatgctgcaggagtggctggccagccttcccctggacaggatcccctacaacgccgtgcttgacctggtcaacaacaagatgcggatttctggaatattccttactaatcacataaagtgggttggatgtcaaggaagccgatctgagttgaggggttacccgtgttctctctggaaactgttccacactttgactgttgaagcctcgacccacccagatgcactggttggcacaggctttgaagacgacccccaggctgtgctgcagacaatgaggaggtacgttcacaccttctttgggtgtaaggaatgtggtgagcactttgaggaaatggctaaagaatccatggactcggtgaaaaccccagaccaagccatcctctggctgtggaagaagcataatatggtgaacggccgcctggcaggccatctgagtgaggatccccggtttccaaagcttcagtggcccactccggacctctgcccagcctgccatgaggaaattaagggcctggccagctgggatgaaggccacgtgctcacattcttgaagcagcactatggccgcgacaacctcttagacacgtattccgcagaccagggggattccagtgaaggaggaaccctggccaggggtgaggaagaggagaaaagactcactcccccagaggtgtcccatggagaccgagacacccagagcgtccgtccacctggtgcactgggccccaggcctgcccttccagagagcttgcatcacagcttggacgggaaactccagagtctggatgggcccggggcccacaaggaggtgggcggggccgcacccttcctcggggttgacttctccagcctggacatgagtctctgtgtcgtgctgtacgtggcttcatccctgttcctcatggtgatgtacttcttcttccgggtgaggtccaggcggtggaaggtcaagcaccaccacccggccgtgtgagtgcccgggtgctgccagccacggcggaagctcccttggaggcagccctgccccgtgccacctgcagctttaatatttatgatcagggattttataaacatgcgggcctggtttcacatcggatggcaccttttggcttcaaagtcctggttttacaaacgctcttctaacaagggaagaacacggggtaattttgtggggatatttgcattcctggcgtactcaagtctgttcatgctccttttgcaggtcttacagcaaaaagacttctgtatttttactcttctagatgtgaaaagagggtgcagagtccaggccagatagtcttccccacacactttcatctcgtttcctccactccgccccatcctgcagggccttgtttttgtatttggagaacctcgcccatcccccccgcggctcctggctcccccccccccaccttggccctccctgcaccctccactcccctcgctccccctccccccgctccccccacgccccctgctccaggctgccaagtgttttcctttagccgggcggggacagacagagccggaagcgcagtcggcctctgcagcccctccaagcaagtgctccagggactatcctgtgtttgtagctgcttccctagggcaggttcctgagggctctccttgttcctccgggtgttcgacaccagacgtggggatttcaacaggggaggagccaaggaattctgtggctgtgctgcgtttcagaaaataacccccagaggccttgggctgtggacctgggggttggaaggatgggggctcatttaaccctcagaggcagcgcctttgtctgtctatctggtgacaagagagagacaagtaaatgggggccgttgggacggcgggtgcctggagggcagctctgggctcagcgggcagtgcttagagcacaggcccctctgttgggggatggggaggagagcagtctgcccttgggagcgtaggccccagggagacttctaaagccccccctgtcgtctgctcttcacccagcaccacagaggcacctgctgcacacacaagcatctcactcggcccacggagggggccaggcttcctttgcctgaagctgttttgggaagggtctccacacaggcactgatctcccaagcttttgtcatgatgtcttttaccatttgataattttaaacattgtttttaaacccaaaacatttagtggtccgttgcctctgaagatgtaaacaaacaaatacactatttctgggaacatttatattgagattctttgtggctattggtgtgtctcacaggcaaaatttgatttggctaaaataggctcagatgtatttgtgtgcccgtgtgtgtgtgtgtgtgtgtgtgtgtgtgtgtgtgtgtatgagagagagagagactttgacggttgtagatattttttccgctttgcctactttatgttgtataatcatgtgtttactaacaagttgatgacatggatgtattcataagaccatgtaatattgatgtgattgttgtcgcttgagaaaaaaaggcaacagctgattctttcaacaactgtcacagaatggctgggctgagaacgctgcccagggccctgcagctggcgggagaggtgtctggtgggagcggtgtctggtgcgtcagcctgctgcttcgtgtctcactcgagagttgcttctggtttcacactttttaacccctctgtgctttagcagccgtgaccttgccttcattgcttcatccagtgcaggcctgggttattgaagacaccaaagtgtttctcttccagtttgaaaaccaggcaggtttacacgtgggtttcagtgtatttgcctttgaacccttcaaactaaactttagccttttggctggtgttgaatgtctttagctggggtgacctggagtgacctgggacggtgttgtggtttaccgtctccagcttcagcctttccagaaacccttgtggagggcagtgttggctgcaggtttcatcatattgcagtttgaggtcaccactatttggggaacaagcttgcgtcctgctgaggggcaggattttcagcagagcgtcggtggggctgggccgtcgtggaggtggccccaggagtcatatggccatactcagacacaccttgtgtggcctgctcagagctggatgccacctttaggcaatgtttagagtctattttctaaagttttaagtattttaagaggtattgagactaatgaatataatagttcagtaatttaaatgcttatttattttcagtggaaggatttttattaaaaagaagctaattgacatggaaatgtcagtgaaatttcttacctgcaaggaaagtgaacattttgtatttaagtaaactataatgtgcacattttaataaagaaatctgacatttgaaaaaaaaaaaaaaaaaaaaaaaaaaaaaa

SEQ ID NO: 1635 - DNA, 1384 bp, Homo sapiens
accgttcttttaactgcgcaggcgcgccggaagcacctagagagcggcgcgtgcgcagcgggagtcgaagcggagatcccggggtcgcgcgagagccgcaagcggagttggtgggcgctatgctatcacccgaggcagagcgagtgctgcggtaccttgtagaagtggaggagctcgccgaggaggtgctggcggacaagcggcagattgtggacctggacactaaaaggaatcagaatcgagagggcctgagggccctgcagaaggatctcagcctctctgaagatgtgatggtttgcttcgggaacatgtttatcaagatgcctcaccctgagacaaaggaaatgattgaaaaagatcaagatcatctggataaagaaatagaaaaactgcggaagcaacttaaagtgaaggtcaaccgcctttttgaggcccaaggcaaaccggagctgaagggttttaacttgaaccccctcaaccaggatgagcttaaagctctcaaggtcatcttgaaaggatgagactcaagaaccaagatgggggaccagcaaccccccagggtcatggaggacccaggaccctccaaccttgacacctgtaaggacaggatctgccctgtaaggggccagccgtcaggaatctggccatgaaaacctctttgtagtgcttggctactctgtgatggcaggagggaaccttcagcctgtctggctgctggacctggacaccagggctcggtggacacaagatctattgacgggccttggtagccaccagtgggtgtgtggggcagtggctgtgggggtgtaagaatgactgcaacaggcacttcccaacaatggcctgctgttcacatggaccctgagcaaggaaggagggagggaggggcagagtggagtgtcattccagcattcctctcagaagggagagaggttttcaggctggtgccatgcgattggaataaagcaggaggctcatgggtggttgctgaatgaagaacagaatcttggtgctttgtggctcaccacagccatctgtggggcaggcacacacacctcccgccagctccaattttgcactttttccctgcttgattccaagagtaggtgctgcctagcagcccttcgtggccactctttactcaggagggccttgcagagtcctgcaccaggcctgggtgagtggatgcgcctcttaccatatgacacgtgtcaagatgcccttccgccccctctgaaagtggggcccggccagcactgctcgttactgtctgccttcagtggtctgaggtcccagtatgaactgccgtgaagtcaaaactcttatgtgttcattaagggctcaataaatgttagctgaatgaatgaatagcaaaaaaaaaaaa

SEQ ID NO: 1636 - DNA, 2569 bp, Homo sapiens
gtttgatttttgtgggccttacttttcccatttgctcatgtatgtctatattcctatatctaatgtttcttaaaagacaaatctgactgtgtaggtgcatttgtttaaaaaatataactccccattgcctctgggataaagtcttatctcagtttacatatattcttgataacctctccaactttatgtctcaccacccccactcacttcgtaattcgtgccttatcagaatggacctgttatactggcagttcaccatatataccattacattttgtttctcccatctctcaggtagacttacactttcggcccagcacatcagtcatcgcccttgcttgctttcctattcactcctgttctggaaggtgcaccaccttttcttggaaggcttcccttgctctcccaggctagatgagatgtccttccatcagttcccacagcaccctgtgcatgtatctgttgtgcacttaccaatagtatacaagggatctatgacccaagtctctccccactagcttgtaagctcctcacagacaggaaccatgttttgtctttgtactccagtgcctagtatataagagatactcaataaataaatatttgtcaaatcaactaattgattccttgtgacctaattctagagaatgggaagaaggcctgttattttgttgtcctttatggttctttaggaaagctctccaagcttggcatttgtcagggtgggaggaaaactgttgaagtattaagactggacacatggctgctaattcatcagcttatcattgaaaaagtccatagccaaaacctgactgtgcacttactataggaccctgacctgcctgggtctccctgtctctccagccagtatatttaaaggtaatgagataatgatgagtgttttgaaaaatgtttagtgttcaaatagaaaccattcgtgtcccttcactctctgaacatagtctgcaaatctctccctctctggtatgtttctgttttgtggattagactgctaaataagcgaagagttaattttgaagttcaggtcaacaaattcctgtttggagacgggctgttcctgaataccaggttgttatctgtctattacagccccttcacttctgggctcctggccctttgcgaagtacttcagaaagcctagagagaagagagggccctcaaatcccattccagcccctaaatgaaagtggcatcacaaggagaaaagtggaggtagaaatgtaccatgggggacgttgccccattgcctttcttcccctgactactgggcttcctctatcagcttttaacgcctggaagtagctgagtctccagtcactggtggccttccccaagtgagctcagcagcatgtgctaataggtgccaatactgtgctggctccagtgggattcctctctgcaaagctgctggcttagcttgactgtttccctattcctctccttagaactttcatagccagtcaagcatagaattgcatccattcttctgaaataggtactgtgcctaatttttcattggcttggccaagattctgttacctgtaattatgtcatatgggctgactggtgtaggtttggtaggcctcactgctctccagaggctagtgttcctatcccaggatggctgttgggattaggagtggaatgaggaatagtttaggaccacaagagatttggcctccttggaacatgtaggaaggcctcaaggatgtaattctagcccagggaagaaaatccttttcagcagacgcttcccttcccttcccctagggaatgtgtccctactatagtaaactcttccttaagagagttttatgttttctctgtcagatcaatttgtttttcttaatgttgttcctatcaaaaaaaaaaaaaaggaagaaatacagtcctcagacctgacagtttcatttttccccccaagtagaagcaatagaaaccttagcagttccaagactcctggcactcacttttcctctccatctttaggtctaacccagctcagcccagagtaaagacataaaagcctcacatgtgatttcctcttgcattttttctgctagaagggtccacagtacttactttatgcctcatctcaattgaagctggatgatgaggatagtgggcagtgattgcaattggggaatgcatgtactggatcacataaggtcatgaaagtccttgaaacagagccttgccaagcagaacccttgccactcatggtattcgatacagtctacccatctgacatgaaatgatattcttaatgagccattcctatggaagatagctattgccaggcacattcagtctcctggtctccctctcatagctatgtagggcctatgacctagaataaatggaaaaatgttatcaggaggaagagactgctggactcccctgagaggtagggtttgtgctaggagagctgggtgccatttatttcattttgatatatcaggtgctcctagtaacaattcctagtttctcttacctctgtaatcatcctgaatagtcactgcttcttgagctttggtgagtgttctct

SEQ ID NO: 1637 - DNA, 1984 bp, Homo sapiens
ctctaagatggcggcagtggcaacctgcggtagtgttgccgcgagtactgggtctgcagtggcgacagccagcaagagcaacgtcaccagtttccagaggaggggtcctagagccagcgtgaccaacgacagcggccctcgactggtgtccattgcgggcacgcgaccgtcggtgcggaatggacagctgctggtatcaaccgggctcccagccctagaccagctcttaggtggaggtttagccgttggaacagttcttctaattgaggaggataaatataatatttactcacctttgctcttcaagtatttcctggcagaaggaattgtcaatgggcatactttgttggttgcatctgctaaagaggatcctgccaacattttacaggaacttccagcaccattacttgatgataaatgtaaaaaggaatttgatgaagatgtatacaatcataaaacaccagaatctaatattaagatgaaaatagcttggcgttaccagttattacccaagatggagattggaccagtatcatcttcaagatttggtcactattatgatgcatcaaaaagaatgccacaagaactaattgaggcttcaaattggcatggattttttcttccagagaaaatatcttcaactctcaaagtagaaccctgttctttgacccctggctacacaaagctgcttcagtttatccagaacatcatttatgaggaaggatttgatggatccaatcctcagaaaaaacagagaaacattttaagaataggaattcagaatcttggctcacctttatggggagacgatatttgctgtgcagaaaatggtggcaacagtcacagccttaccaagttcctctatgttctccgtggtcttctgagaacctctctttcagcctgcatcatcacaatgccaacacatctgatccagaataaagccattattgcccgtgtcacaaccttgtcagatgtagtagttggtctggaatcatttattggttctgagagagaaactaacccattgtataaggattatcatggattgattcatatacggcagattcctcggcttaataacttgatctgtgatgaatcagatgtcaaagacttagcttttaaattaaaaaggaagctattcaccattgaggctggagtgcagtggcacgatctcggctcacggcggcctcgcctcctgggttcaggcggttctcccgcctcggcctccctggtagctgggattacaggcgcccaccaccacgcccagctaatttttgtatttttagtagagatggggttccaccatgttggccaggctggtctcgaactcctgacctcaggtgattcatccgcctcagcctcccaaagtgctggaattgcaggcatgagctaccgcgcccggcctagggctttgtatttcaaagagaacaagtctaaagtgggtgcaagacaactacttgagacaagagaggaacatttatcctccaggcttctcatacttactcaagcagaaagactctgcatggggagaaggttctttacagcattccacatttttaatgagcttccttgcaaaggcgactgcatttgcctccagacttgtcagacacagtgagccgctcaagcaaaatggatctggcagaatccgccaagcggctgggcccaggctgtggcatgatggccggaggcaagaagcacctggacttctagggattcctccttagtcgctgcatgcagaattctatgacactctaattatgattgctaatagcttatgtaaatatttttcttaacaatttgaccctccactccttgaaaaacacaggattataaaatggtgccgccatttctcattttttaactttttacagaactagcacagcagaaatacttttaaatttttccttcatgctctagagaaaataattttatttttaaataaacgccaaaaaatgtcaaaaaaaaaaaaaaaaaaaaaaaaaaa

SEQ ID NO: 1638 - DNA, 2495 bp, Homo sapiens
gtagtgacggggattgttgtgttgcagaaatccggcaatcgacctgaggacttgcgagccgctcagctcccgggacgtttggagctgctgctaaataatttctgctcagccatgtcgccggctccagatgcagccccggctcctgcgtcgatctccctgtttgacctcagcgcggatgctccggtctttcagggcctgagcctggtgagccacgcgcctggggaggctctggcccgggctccgcgtacttcctgttcaggctcaggggagagagaaagcccagaaagaaagctactccagggtcctatggatatttcagagaagttattttgttcaacttgtgaccagaccttccagaaccaccaagaacagagggaacattataagcttgactggcatcggtttaacctaaagcaacgtctcaaggacaagcctctcctgtctgccctggactttgaaaagcagagctccacaggagatctttccagcatctcgggatcagaagactcagactcagccagtgaggaggacttgcagacactggatcgggagagggctacatttgagaagttgagccgacccccaggcttttaccctcatcgagttcttttccagaatgcccagggccagtttctttatgcctaccgctgtgtcctaggccctcatcaggatcccccagaagaggcagaactgctgctacagaacctgcaaagtagaggtcccagagactgcgtggtgctcatggctgcagctgggcactttgctggtgctatatttcaaggaagagaagtggtgacacacaaaacttttcaccgctatacggttcgggccaagcggggcacagcccaggggcttcgggatgcccgaggtgggccatcacactctgctggagccaacctgaggcgctacaatgaagccacactatataaggatgttcgtgacctgctggcagggccaagctgggctaaggcgctggaggaggctggtacaatactgttgcgtgctccccgctctggccggtctttgttctttggaggcaagggagcacccctgcaaagggggatccccgactttgggatatccccctcgccacccgcagacccaccttccaagagctacagcgtgtgctccataagctgaccactttgcatgtctatgaagaagaccctcgggaagcagtcagactgcactcacctcagacacactggaaaacagtaagagaggagagaaagaagcctactgaggaagaaataagaaagatctgcagggatgaaaaggaagcgctggggcagaatgaggaatctcccaaacagggttcagggtcggagggagaagatggctttcaggtagagttggagctagtggagttgactgtggggactctggatctttgtgagtctgaagtattgcccaagcggaggaggagaaaaaggaataagaaggagaaaagccgagaccaggaggctggggcacatcggactcttctccagcaaactcaagaagaggagccttccacacagtcatcccaggcagttgctgcccccttgggccctttgctggatgaggccaaagcccctggtcagccagagctctggaatgcactgcttgctgcttgccgagctggagatgttggagtgctaaagctgcagctagctcccagccctgcagaccctagagttctgtctctgctcagtgcccccttgggctccggtggctttactctcctgcatgcagcagctgcagctggaagaggctcagtggttcgtctgctgctggaagcaggtgctgaccccactgtgcaggactctcgggcccggccaccttatactgttgcggctgacaaatcaacacgtaatgagttccgaaggttcatggagaagaatccagatgcctacgattacaacaaggctcaggtgccaggaccattgacaccagaaatggaggcacggcaggctacacggaaaagggagcagaaggcagcccggcggcaacgggaggaacagcagcagaggcagcaggagcaggaggagcgtgaacgagaagagcagcggcgatttgccgccctcagtgaccgagagaagagagctctggctgcagagcgccgactcgctgcccagttgggagcccctacctctccaatccctgactctgcaatcgtcaatactcgacgctgctggagttgtggggcatccctccaaggcctgactccctttcactacctcgacttctctttctgctccacacgttgcctccaggatcatcgccgtcaggcagggaggccctcttcctgatctcttacagctctacctggggccaactcagggacctgagagggcacattcacagcagccctaggttttttcttccccgtgaaaccagagatgatttggaagatgggggtgaaggacactcgggaactagggcaaagacagggctagaggtatgtggagctggtactgtctctggaattttaatcacaataaagtttggcaagg

SEQ ID NO: 1639 - DNA, 2048 bp, Homo sapiens
cgtcaacatgagttgggcctggggcagatgaggctggctggcggggcgggcagcatggttcactccagcatgggggctccagaaataagaatgtctaagcccctggaggccgagaagcaaggtctggactccccatcagagcacacagacaccgaaagaaatggaccagacactaatcatcagaacccccaaaataagacctccccattctccgtgtccccaactggccccagtacaaagatcaaggctgaagaccccagtggcgattcagccccagcagcacccctgccccctcagccggcccagcctcatctgccccaggcccaactcatgttgacgggcagccagctagctggggacatacagcagctcctccagctccagcagctggtgcttgtgccaggccaccacctccagccacctgctcagttcctgctaccgcaggcccagcagagccagccaggcctgctaccgacaccaaatctattccagctacctcagcaaacccagggagctcttctgacctcccagccccgggccgggcttcccacacagccccccaaatgcttggagccaccatcccaccccgaggagcccagtgatctggaggagctggagcaattcgcccgcaccttcaagcaacgccgcatcaagctgggcttcacgcagggtgatgtgggcctggccatgggcaagctctacggcaacgacttcagccagacgaccatttcccgcttcgaggccctcaacctgagcttcaagaacatgtgcaaactcaagcccctcctggagaagtggctcaacgatgcagagactatgtctgtggactcaagcctgcccagccccaaccagctgagcagccccagcctgggtttcgacggcctgcccggccggagacgcaagaagaggaccagcatcgagacaaacgtccgcttcgccttagagaagagttttctagcgaaccagaagcctacctcagaggagatcctgctgatcgccgagcagctgcacatggagaaggaagtgatccgcgtctggttctgcaaccggcgccagaaggagaaacgcatcaacccctgcagtgcggcccccatgctgcccagcccagggaagccggccagctacagcccccatatggtcacaccccaagggggcgcggggaccttaccgttgtcccaagcttccagcagtctgagcacaacagttactaccttatcctcagctgtggggacgctccaccccagccggacagctggagggggtgggggcgggggcggggctgcgccccccctcaattccatcccctctgtcactcccccacccccggccaccaccaacagcacaaaccccagccctcaaggcagccactcggctatcggcttgtcaggcctgaaccccagcacgggccctggcctctggtggaaccctgccccttaccagccttgatggcagcgggaatctggtgctgggggcagccggtgcagccccggggagccctggcctggtgacctcgccgctcttcttgaatcatgctgggctgcccctgctcagcaccccgcctggtgtgggcctggtctcagcagcggctgcggctgtggcagcctccatctccagcaagtctcctggcctctcctcctcatcctcttcatcctcatcctcctcctcctccacttgcagcgagacggcagcacagacccctggaggtccaggggggcccgaggcagggtccaaacctgagtgagggccagccatgcctcccctcccattcctctggtccctgccttggtcccttgcctgggaagaggggcaggaggccagtggtggggacgcagagggtcctcagagcaggagtgacaagggaggaaagaccaaaaaaacaaccaaccaaaaaaaaaaaaaaaaaaggaaagaaactaaccaacaaaagagaaaaccaaaaataatcacaacagaaaccagctgccccaaaggaaccagaggtgaaaaacaaacaaaaaaaaccaaaaacaaaccaaaaaaaaaaaaaaacctctaccccctctagagcc

SEQ ID NO: 1640 - DNA, 2210 bp, Homo sapiens
cgcgcccctccctcctcgcggacctggcggtgccggcgcccggagtggccctttaaaaggcagcttattgtccggagggggcgggcggggggcgccgaccgcggcctgaggcccggcccctcccctctccctccctctgtccccgcgtcgctcgctggctagctcgctggctcgctcgcccgtccggcgcacgctccgcctccgtcagttggctccgctgtcgggtgcgcggcgtggagcggcagccggtctggacgcgcggccggggctgggggctgggagcgcggcgcgcaagatctccccgcgcgagagcggcccctgccaccgggcgaggcctgcgccgcgatggcagagatgggcagtaaaggggtgacggcgggaaagatcgccagcaacgtgcagaagaagctcacccgcgcgcaggagaaggttctccagaagctggggaaggcagatgagaccaaggatgagcagtttgagcagtgcgtccagaatttcaacaagcagctgacggagggcacccggctgcagaaggatctccggacctacctggcctccgtcaaagccatgcacgaggcttccaagaagctgaatgagtgtctgcaggaggtgtatgagcccgattggcccggcagggatgaggcaaacaagatcgcagagaacaacgacctgctgtggatggattaccaccagaagctggtggaccaggcgctgctgaccatggacacgtacctgggccagttccccgacatcaagtcacgcattgccaagcgggggcgcaagctggtggactacgacagtgcccggcaccactacgagtcccttcaaactgccaaaaagaaggatgaagccaaaattgccaaggccgaggaggagctcatcaaagcccagaaggtgtttgaggagatgaatgtggatctgcaggaggagctgccgtccctgtggaacagccgcgtaggtttctacgtcaacacgttccagagcatcgcgggcctggaggaaaacttccacaaggagatgagcaagctcaaccagaacctcaatgatgtgctggtcggcctggagaagcaacacgggagcaacaccttcacggtcaaggcccagcccagaaagaaaagtaaactgttttcgcggctgcgcagaaagaagaacagtgacaacgcgcctgcaaaagggaacaagagcccttcgcctccagatggctcccctgccgccacccccgagatcagagtcaaccacgagccagagccggccggcggggccacgcccggggccaccctccccaagtccccatctcagccagcagaggcctcggaggtggcgggtgggacccaacctgcggctggagcccaggagccaggggagacggcggcaagtgaagcagcctccagctctcttcctgctgtcgtggtggagaccttcccagcaactgtgaatggcaccgtggagggcggcagtggggccgggcgcttggacctgcccccaggtttcatgttcaaggtacaggcccagcacgactacacggccactgacacagacgagctgcagctcaaggctggtgatgtggtgctggtgatccccttccagaaccctgaagagcaggatgaaggctggctcatgggcgtgaaggagagcgactggaaccagcacaaggagctggagaagtgccgtggcgtcttccccgagaacttcactgagagggtcccatgacggcggggcccaggcagcctccgggcgtgtgaagaacacctcctcccgaaaaatgtgtggttcttttttttgttttgttttcgtttttcatcttttgaagagcaaagggaaatcaagaggagacccccaggcagaggggcgttctcccaaagattaggtcgttttccaaagagccgcgtcccggcaagtccggcggaattcaccagtgttcctgaagctgctgtgtcctctagttgagtttctggcgcccctgcctgtgcccgcatgtgtgcctggccgcagggcggggctgggggctgccgagccaccatgcttgcctgaagcttcggccgcgccacccgggcaagggtcctcttttcctggcagctgctgtgggtggggcccagacaccagcctagcctggctctgccccgcagacggtctgtgtgctgtttgaaaataaatcttagtgttcaaaacaaaatgaaacaaaaaaaaaatgataaaaactctcaaaaaaa

SEQ ID NO: 1641 - DNA, 2637 bp, Homo sapiens
cgcgcccctccctcctcgcggacctggcggtgccggcgcccggagtggccctttaaaaggcagcttattgtccggagggggcgggcggggggcgccgaccgcggcctgaggcccggcccctcccctctccctccctctgtccccgcgtcgctcgctggctagctcgctggctcgctcgcccgtccggcgcacgctccgcctccgtcagttggctccgctgtcgggtgcgcggcgtggagcggcagccggtctggacgcgcggccggggctgggggctgggagcgcggcgcgcaagatctccccgcgcgagagcggcccctgccaccgggcgaggcctgcgccgcgatggcagagatgggcagtaaaggggtgacggcgggaaagatcgccagcaacgtgcagaagaagctcacccgcgcgcaggagaaggttctccagaagctggggaaggcagatgagaccaaggatgagcagtttgagcagtgcgtccagaatttcaacaagcagctgacggagggcacccggctgcagaaggatctccggacctacctggcctccgtcaaagccatgcacgaggcttccaagaagctgaatgagtgtctgcaggaggtgtatgagcccgattggcccggcagggatgaggcaaacaagatcgcagagaacaacgacctgctgtggatggattaccaccagaagctggtggaccaggcgctgctgaccatggacacgtacctgggccagttccccgacatcaagtcacgcattgccaagcgggggcgcaagctggtggactacgacagtgcccggcaccactacgagtcccttcaaactgccaaaaagaaggatgaagccaaaattgccaagcctgtctcgctgcttgagaaagccgccccccagtggtgccaaggcaaactgcaggctcatctcgtagctcaaactaacctgctccgaaatcaggccgaggaggagctcatcaaagcccagaaggtgtttgaggagatgaatgtggatctgcaggaggagctgccgtccctgtggaacagccgcgtaggtttctacgtcaacacgttccagagcatcgcgggcctggaggaaaacttccacaaggagatgagcaagctcaaccagaacctcaatgatgtgctggtcggcctggagaagcaacacgggagcaacaccttcacggtcaaggcccagcccagtgacaacgcgcctgcaaaagggaacaagagcccttcgcctccagatggctcccctgccgccacccccgagatcagagtcaaccacgagccagagccggccggcggggccacgcccggggccaccctccccaagtccccatctcagctccggaaaggcccaccagtccctccgcctcccaaacacaccccgtccaaggaagtcaagcaggagcagatcctcagcctgtttgaggacacgtttgtccctgagatcagcgtgaccaccccctcccagtttgaggccccggggcctttctcggagcaggccagtctgctggacctggactttgaccccctcccgcccgtgacgagccctgtgaaggcacccacgccctctggtcagtcaattccatgggacctctgggagcccacagagagtccagccggcagcctgccttccggggagcccagcgctgccgagggcacctttgctgtgtcctggcccagccagacggccgagccggggcctgcccaaccagcagaggcctcggaggtggcgggtgggacccaacctgcggctggagcccaggagccaggggagacggcggcaagtgaagcagcctccagctctcttcctgctgtcgtggtggagaccttcccagcaactgtgaatggcaccgtggagggcggcagtggggccgggcgcttggacctgcccccaggtttcatgttcaaggtacaggcccagcacgactacacggccactgacacagacgagctgcagctcaaggctggtgatgtggtgctggtgatccccttccagaaccctgaagagcaggatgaaggctggctcatgggcgtgaaggagagcgactggaaccagcacaaggagctggagaagtgccgtggcgtcttccccgagaacttcactgagagggtcccatgacggcggggcccaggcagcctccgggcgtgtgaagaacacctcctcccgaaaaatgtgtggttcttttttttgttttgttttcgtttttcatcttttgaagagcaaagggaaatcaagaggagacccccaggcagaggggcgttctcccaaagattaggtcgttttccaaagagccgcgtcccggcaagtccggcggaattcaccagtgttcctgaagctgctgtgtcctctagttgagtttctggcgcccctgcctgtgcccgcatgtgtgcctggccgcagggcggggctgggggctgccgagccaccatgcttgcctgaagcttcggccgcgccacccgggcaagggtcctcttttcctggcagctgctgtgggtggggcccagacaccagcctagcctggctctgccccgcagacggtctgtgtgctgtttgaaaataaatcttagtgttcaaaacaaaatgaaacaaaaaaaaaatgataaaaactctcaaaaaaaaaaaaaaaaa

SEQ ID NO: 1642 - DNA, 2508 bp, Homo sapiens
cgcgcccctccctcctcgcggacctggcggtgccggcgcccggagtggccctttaaaaggcagcttattgtccggagggggcgggcggggggcgccgaccgcggcctgaggcccggcccctcccctctccctccctctgtccccgcgtcgctcgctggctagctcgctggctcgctcgcccgtccggcgcacgctccgcctccgtcagttggctccgctgtcgggtgcgcggcgtggagcggcagccggtctggacgcgcggccggggctgggggctgggagcgcggcgcgcaagatctccccgcgcgagagcggcccctgccaccgggcgaggcctgcgccgcgatggcagagatgggcagtaaaggggtgacggcgggaaagatcgccagcaacgtgcagaagaagctcacccgcgcgcaggagaaggttctccagaagctggggaaggcagatgagaccaaggatgagcagtttgagcagtgcgtccagaatttcaacaagcagctgacggagggcacccggctgcagaaggatctccggacctacctggcctccgtcaaagccatgcacgaggcttccaagaagctgaatgagtgtctgcaggaggtgtatgagcccgattggcccggcagggatgaggcaaacaagatcgcagagaacaacgacctgctgtggatggattaccaccagaagctggtggaccaggcgctgctgaccatggacacgtacctgggccagttccccgacatcaagtcacgcattgccaagcgggggcgcaagctggtggactacgacagtgcccggcaccactacgagtcccttcaaactgccaaaaagaaggatgaagccaaaattgccaagcctgtctcgctgcttgagaaagccgccccccagtggtgccaaggcaaactgcaggctcatctcgtagctcaaactaacctgctccgaaatcaggccgaggaggagctcatcaaagcccagaaggtgtttgaggagatgaatgtggatctgcaggaggagctgccgtccctgtggaacagccgcgtaggtttctacgtcaacacgttccagagcatcgcgggcctggaggaaaacttccacaaggagatgagcaagctcaaccagaacctcaatgatgtgctggtcggcctggagaagcaacacgggagcaacaccttcacggtcaaggcccagcccagtgacaacgcgcctgcaaaagggaacaagagcccttcgcctccagatggctcccctgccgccacccccgagatcagagtcaaccacgagccagagccggccggcggggccacgcccggggccaccctccccaagtccccatctcagtttgaggccccggggcctttctcggagcaggccagtctgctggacctggactttgaccccctcccgcccgtgacgagccctgtgaaggcacccacgccctctggtcagtcaattccatgggacctctgggagcccacagagagtccagccggcagcctgccttccggggagcccagcgctgccgagggcacctttgctgtgtcctggcccagccagacggccgagccggggcctgcccaaccagcagaggcctcggaggtggcgggtgggacccaacctgcggctggagcccaggagccaggggagacggcggcaagtgaagcagcctccagctctcttcctgctgtcgtggtggagaccttcccagcaactgtgaatggcaccgtggagggcggcagtggggccgggcgcttggacctgcccccaggtttcatgttcaaggtacaggcccagcacgactacacggccactgacacagacgagctgcagctcaaggctggtgatgtggtgctggtgatccccttccagaaccctgaagagcaggatgaaggctggctcatgggcgtgaaggagagcgactggaaccagcacaaggagctggagaagtgccgtggcgtcttccccgagaacttcactgagagggtcccatgacggcggggcccaggcagcctccgggcgtgtgaagaacacctcctcccgaaaaatgtgtggttcttttttttgttttgttttcgtttttcatcttttgaagagcaaagggaaatcaagaggagacccccaggcagaggggcgttctcccaaagattaggtcgttttccaaagagccgcgtcccggcaagtccggcggaattcaccagtgttcctgaagctgctgtgtcctctagttgagtttctggcgcccctgcctgtgcccgcatgtgtgcctggccgcagggcggggctgggggctgccgagccaccatgcttgcctgaagcttcggccgcgccacccgggcaagggtcctcttttcctggcagctgctgtgggtggggcccagacaccagcctagcctggctctgccccgcagacggtctgtgtgctgtttgaaaataaatcttagtgttcaaaacaaaatgaaacaaaaaaaaaatgataaaaactctcaaaaaaaaaaaaaaaaa

SEQ ID NO: 1643 - DNA, 2376 bp, Homo sapiens
cgcgcccctccctcctcgcggacctggcggtgccggcgcccggagtggccctttaaaaggcagcttattgtccggagggggcgggcggggggcgccgaccgcggcctgaggcccggcccctcccctctccctccctctgtccccgcgtcgctcgctggctagctcgctggctcgctcgcccgtccggcgcacgctccgcctccgtcagttggctccgctgtcgggtgcgcggcgtggagcggcagccggtctggacgcgcggccggggctgggggctgggagcgcggcgcgcaagatctccccgcgcgagagcggcccctgccaccgggcgaggcctgcgccgcgatggcagagatgggcagtaaaggggtgacggcgggaaagatcgccagcaacgtgcagaagaagctcacccgcgcgcaggagaaggttctccagaagctggggaaggcagatgagaccaaggatgagcagtttgagcagtgcgtccagaatttcaacaagcagctgacggagggcacccggctgcagaaggatctccggacctacctggcctccgtcaaagccatgcacgaggcttccaagaagctgaatgagtgtctgcaggaggtgtatgagcccgattggcccggcagggatgaggcaaacaagatcgcagagaacaacgacctgctgtggatggattaccaccagaagctggtggaccaggcgctgctgaccatggacacgtacctgggccagttccccgacatcaagtcacgcattgccaagcgggggcgcaagctggtggactacgacagtgcccggcaccactacgagtcccttcaaactgccaaaaagaaggatgaagccaaaattgccaagcctgtctcgctgcttgagaaagccgccccccagtggtgccaaggcaaactgcaggctcatctcgtagctcaaactaacctgctccgaaatcaggccgaggaggagctcatcaaagcccagaaggtgtttgaggagatgaatgtggatctgcaggaggagctgccgtccctgtggaacagccgcgtaggtttctacgtcaacacgttccagagcatcgcgggcctggaggaaaacttccacaaggagatgagcaagctcaaccagaacctcaatgatgtgctggtcggcctggagaagcaacacgggagcaacaccttcacggtcaaggcccagcccagtgacaacgcgcctgcaaaagggaacaagagcccttcgcctccagatggctcccctgccgccacccccgagatcagagtcaaccacgagccagagccggccggcggggccacgcccggggccaccctccccaagtccccatctcagcccacagagagtccagccggcagcctgccttccggggagcccagcgctgccgagggcacctttgctgtgtcctggcccagccagacggccgagccggggcctgcccaaccagcagaggcctcggaggtggcgggtgggacccaacctgcggctggagcccaggagccaggggagacggcggcaagtgaagcagcctccagctctcttcctgctgtcgtggtggagaccttcccagcaactgtgaatggcaccgtggagggcggcagtggggccgggcgcttggacctgcccccaggtttcatgttcaaggtacaggcccagcacgactacacggccactgacacagacgagctgcagctcaaggctggtgatgtggtgctggtgatccccttccagaaccctgaagagcaggatgaaggctggctcatgggcgtgaaggagagcgactggaaccagcacaaggagctggagaagtgccgtggcgtcttccccgagaacttcactgagagggtcccatgacggcggggcccaggcagcctccgggcgtgtgaagaacacctcctcccgaaaaatgtgtggttcttttttttgttttgttttcgtttttcatcttttgaagagcaaagggaaatcaagaggagacccccaggcagaggggcgttctcccaaagattaggtcgttttccaaagagccgcgtcccggcaagtccggcggaattcaccagtgttcctgaagctgctgtgtcctctagttgagtttctggcgcccctgcctgtgcccgcatgtgtgcctggccgcagggcggggctgggggctgccgagccaccatgcttgcctgaagcttcggccgcgccacccgggcaagggtcctcttttcctggcagctgctgtgggtggggcccagacaccagcctagcctggctctgccccgcagacggtctgtgtgctgtttgaaaataaatcttagtgttcaaaacaaaatgaaacaaaaaaaaaatgataaaaactctcaaaaaaaaaaaaaaaaa

SEQ ID NO: 1644 - DNA, 2333 bp, Homo sapiens
cgcgcccctccctcctcgcggacctggcggtgccggcgcccggagtggccctttaaaaggcagcttattgtccggagggggcgggcggggggcgccgaccgcggcctgaggcccggcccctcccctctccctccctctgtccccgcgtcgctcgctggctagctcgctggctcgctcgcccgtccggcgcacgctccgcctccgtcagttggctccgctgtcgggtgcgcggcgtggagcggcagccggtctggacgcgcggccggggctgggggctgggagcgcggcgcgcaagatctccccgcgcgagagcggcccctgccaccgggcgaggcctgcgccgcgatggcagagatgggcagtaaaggggtgacggcgggaaagatcgccagcaacgtgcagaagaagctcacccgcgcgcaggagaaggttctccagaagctggggaaggcagatgagaccaaggatgagcagtttgagcagtgcgtccagaatttcaacaagcagctgacggagggcacccggctgcagaaggatctccggacctacctggcctccgtcaaagccatgcacgaggcttccaagaagctgaatgagtgtctgcaggaggtgtatgagcccgattggcccggcagggatgaggcaaacaagatcgcagagaacaacgacctgctgtggatggattaccaccagaagctggtggaccaggcgctgctgaccatggacacgtacctgggccagttccccgacatcaagtcacgcattgccaagcgggggcgcaagctggtggactacgacagtgcccggcaccactacgagtcccttcaaactgccaaaaagaaggatgaagccaaaattgccaaggccgaggaggagctcatcaaagcccagaaggtgtttgaggagatgaatgtggatctgcaggaggagctgccgtccctgtggaacagccgcgtaggtttctacgtcaacacgttccagagcatcgcgggcctggaggaaaacttccacaaggagatgagcaagctcaaccagaacctcaatgatgtgctggtcggcctggagaagcaacacgggagcaacaccttcacggtcaaggcccagcccagaaagaaaagtaaactgttttcgcggctgcgcagaaagaagaacagtgacaacgcgcctgcaaaagggaacaagagcccttcgcctccagatggctcccctgccgccacccccgagatcagagtcaaccacgagccagagccggccggcggggccacgcccggggccaccctccccaagtccccatctcagctccggaaaggcccaccagtccctccgcctcccaaacacaccccgtccaaggaagtcaagcaggagcagatcctcagcctgtttgaggacacgtttgtccctgagatcagcgtgaccaccccctcccagccagcagaggcctcggaggtggcgggtgggacccaacctgcggctggagcccaggagccaggggagacggcggcaagtgaagcagcctccagctctcttcctgctgtcgtggtggagaccttcccagcaactgtgaatggcaccgtggagggcggcagtggggccgggcgcttggacctgcccccaggtttcatgttcaaggtacaggcccagcacgactacacggccactgacacagacgagctgcagctcaaggctggtgatgtggtgctggtgatccccttccagaaccctgaagagcaggatgaaggctggctcatgggcgtgaaggagagcgactggaaccagcacaaggagctggagaagtgccgtggcgtcttccccgagaacttcactgagagggtcccatgacggcggggcccaggcagcctccgggcgtgtgaagaacacctcctcccgaaaaatgtgtggttcttttttttgttttgttttcgtttttcatcttttgaagagcaaagggaaatcaagaggagacccccaggcagaggggcgttctcccaaagattaggtcgttttccaaagagccgcgtcccggcaagtccggcggaattcaccagtgttcctgaagctgctgtgtcctctagttgagtttctggcgcccctgcctgtgcccgcatgtgtgcctggccgcagggcggggctgggggctgccgagccaccatgcttgcctgaagcttcggccgcgccacccgggcaagggtcctcttttcctggcagctgctgtgggtggggcccagacaccagcctagcctggctctgccccgcagacggtctgtgtgctgtttgaaaataaatcttagtgttcaaaacaaaatgaaacaaaaaaaaaatgataaaaactctca

SEQ ID NO: 1645 - DNA, 2412 bp, Homo sapiens
cgcgcccctccctcctcgcggacctggcggtgccggcgcccggagtggccctttaaaaggcagcttattgtccggagggggcgggcggggggcgccgaccgcggcctgaggcccggcccctcccctctccctccctctgtccccgcgtcgctcgctggctagctcgctggctcgctcgcccgtccggcgcacgctccgcctccgtcagttggctccgctgtcgggtgcgcggcgtggagcggcagccggtctggacgcgcggccggggctgggggctgggagcgcggcgcgcaagatctccccgcgcgagagcggcccctgccaccgggcgaggcctgcgccgcgatggcagagatgggcagtaaaggggtgacggcgggaaagatcgccagcaacgtgcagaagaagctcacccgcgcgcaggagaaggttctccagaagctggggaaggcagatgagaccaaggatgagcagtttgagcagtgcgtccagaatttcaacaagcagctgacggagggcacccggctgcagaaggatctccggacctacctggcctccgtcaaagccatgcacgaggcttccaagaagctgaatgagtgtctgcaggaggtgtatgagcccgattggcccggcagggatgaggcaaacaagatcgcagagaacaacgacctgctgtggatggattaccaccagaagctggtggaccaggcgctgctgaccatggacacgtacctgggccagttccccgacatcaagtcacgcattgccaagcgggggcgcaagctggtggactacgacagtgcccggcaccactacgagtcccttcaaactgccaaaaagaaggatgaagccaaaattgccaaggccgaggaggagctcatcaaagcccagaaggtgtttgaggagatgaatgtggatctgcaggaggagctgccgtccctgtggaacagccgcgtaggtttctacgtcaacacgttccagagcatcgcgggcctggaggaaaacttccacaaggagatgagcaagctcaaccagaacctcaatgatgtgctggtcggcctggagaagcaacacgggagcaacaccttcacggtcaaggcccagcccagtgacaacgcgcctgcaaaagggaacaagagcccttcgcctccagatggctcccctgccgccacccccgagatcagagtcaaccacgagccagagccggccggcggggccacgcccggggccaccctccccaagtccccatctcagctccggaaaggcccaccagtccctccgcctcccaaacacaccccgtccaaggaagtcaagcaggagcagatcctcagcctgtttgaggacacgtttgtccctgagatcagcgtgaccaccccctcccagcccacagagagtccagccggcagcctgccttccggggagcccagcgctgccgagggcacctttgctgtgtcctggcccagccagacggccgagccggggcctgcccaaccagcagaggcctcggaggtggcgggtgggacccaacctgcggctggagcccaggagccaggggagacggcggcaagtgaagcagcctccagctctcttcctgctgtcgtggtggagaccttcccagcaactgtgaatggcaccgtggagggcggcagtggggccgggcgcttggacctgcccccaggtttcatgttcaaggtacaggcccagcacgactacacggccactgacacagacgagctgcagctcaaggctggtgatgtggtgctggtgatccccttccagaaccctgaagagcaggatgaaggctggctcatgggcgtgaaggagagcgactggaaccagcacaaggagctggagaagtgccgtggcgtcttccccgagaacttcactgagagggtcccatgacggcggggcccaggcagcctccgggcgtgtgaagaacacctcctcccgaaaaatgtgtggttcttttttttgttttgttttcgtttttcatcttttgaagagcaaagggaaatcaagaggagacccccaggcagaggggcgttctcccaaagattaggtcgttttccaaagagccgcgtcccggcaagtccggcggaattcaccagtgttcctgaagctgctgtgtcctctagttgagtttctggcgcccctgcctgtgcccgcatgtgtgcctggccgcagggcggggctgggggctgccgagccaccatgcttgcctgaagcttcggccgcgccacccgggcaagggtcctcttttcctggcagctgctgtgggtggggcccagacaccagcctagcctggctctgccccgcagacggtctgtgtgctgtttgaaaataaatcttagtgttcaaaacaaaatgaaacaaaaaaaaaatgataaaaactctcaaaaaaaaaaaaaaaaa

SEQ ID NO: 1646 - DNA, 2289 bp, Homo sapiens
cgcgcccctccctcctcgcggacctggcggtgccggcgcccggagtggccctttaaaaggcagcttattgtccggagggggcgggcggggggcgccgaccgcggcctgaggcccggcccctcccctctccctccctctgtccccgcgtcgctcgctggctagctcgctggctcgctcgcccgtccggcgcacgctccgcctccgtcagttggctccgctgtcgggtgcgcggcgtggagcggcagccggtctggacgcgcggccggggctgggggctgggagcgcggcgcgcaagatctccccgcgcgagagcggcccctgccaccgggcgaggcctgcgccgcgatggcagagatgggcagtaaaggggtgacggcgggaaagatcgccagcaacgtgcagaagaagctcacccgcgcgcaggagaaggttctccagaagctggggaaggcagatgagaccaaggatgagcagtttgagcagtgcgtccagaatttcaacaagcagctgacggagggcacccggctgcagaaggatctccggacctacctggcctccgtcaaagccatgcacgaggcttccaagaagctgaatgagtgtctgcaggaggtgtatgagcccgattggcccggcagggatgaggcaaacaagatcgcagagaacaacgacctgctgtggatggattaccaccagaagctggtggaccaggcgctgctgaccatggacacgtacctgggccagttccccgacatcaagtcacgcattgccaagcgggggcgcaagctggtggactacgacagtgcccggcaccactacgagtcccttcaaactgccaaaaagaaggatgaagccaaaattgccaaggccgaggaggagctcatcaaagcccagaaggtgtttgaggagatgaatgtggatctgcaggaggagctgccgtccctgtggaacagccgcgtaggtttctacgtcaacacgttccagagcatcgcgggcctggaggaaaacttccacaaggagatgagcaagctcaaccagaacctcaatgatgtgctggtcggcctggagaagcaacacgggagcaacaccttcacggtcaaggcccagcccagtgacaacgcgcctgcaaaagggaacaagagcccttcgcctccagatggctcccctgccgccacccccgagatcagagtcaaccacgagccagagccggccggcggggccacgcccggggccaccctccccaagtccccatctcagctccggaaaggcccaccagtccctccgcctcccaaacacaccccgtccaaggaagtcaagcaggagcagatcctcagcctgtttgaggacacgtttgtccctgagatcagcgtgaccaccccctcccagccagcagaggcctcggaggtggcgggtgggacccaacctgcggctggagcccaggagccaggggagacggcggcaagtgaagcagcctccagctctcttcctgctgtcgtggtggagaccttcccagcaactgtgaatggcaccgtggagggcggcagtggggccgggcgcttggacctgcccccaggtttcatgttcaaggtacaggcccagcacgactacacggccactgacacagacgagctgcagctcaaggctggtgatgtggtgctggtgatccccttccagaaccctgaagagcaggatgaaggctggctcatgggcgtgaaggagagcgactggaaccagcacaaggagctggagaagtgccgtggcgtcttccccgagaacttcactgagagggtcccatgacggcggggcccaggcagcctccgggcgtgtgaagaacacctcctcccgaaaaatgtgtggttcttttttttgttttgttttcgtttttcatcttttgaagagcaaagggaaatcaagaggagacccccaggcagaggggcgttctcccaaagattaggtcgttttccaaagagccgcgtcccggcaagtccggcggaattcaccagtgttcctgaagctgctgtgtcctctagttgagtttctggcgcccctgcctgtgcccgcatgtgtgcctggccgcagggcggggctgggggctgccgagccaccatgcttgcctgaagcttcggccgcgccacccgggcaagggtcctcttttcctggcagctgctgtgggtggggcccagacaccagcctagcctggctctgccccgcagacggtctgtgtgctgtttgaaaataaatcttagtgttcaaaacaaaatgaaacaaaaaaaaaatgataaaaactctcag

SEQ ID NO: 1647 - DNA, 2283 bp, Homo sapiens
cgcgcccctccctcctcgcggacctggcggtgccggcgcccggagtggccctttaaaaggcagcttattgtccggagggggcgggcggggggcgccgaccgcggcctgaggcccggcccctcccctctccctccctctgtccccgcgtcgctcgctggctagctcgctggctcgctcgcccgtccggcgcacgctccgcctccgtcagttggctccgctgtcgggtgcgcggcgtggagcggcagccggtctggacgcgcggccggggctgggggctgggagcgcggcgcgcaagatctccccgcgcgagagcggcccctgccaccgggcgaggcctgcgccgcgatggcagagatgggcagtaaaggggtgacggcgggaaagatcgccagcaacgtgcagaagaagctcacccgcgcgcaggagaaggttctccagaagctggggaaggcagatgagaccaaggatgagcagtttgagcagtgcgtccagaatttcaacaagcagctgacggagggcacccggctgcagaaggatctccggacctacctggcctccgtcaaagccatgcacgaggcttccaagaagctgaatgagtgtctgcaggaggtgtatgagcccgattggcccggcagggatgaggcaaacaagatcgcagagaacaacgacctgctgtggatggattaccaccagaagctggtggaccaggcgctgctgaccatggacacgtacctgggccagttccccgacatcaagtcacgcattgccaagcgggggcgcaagctggtggactacgacagtgcccggcaccactacgagtcccttcaaactgccaaaaagaaggatgaagccaaaattgccaaggccgaggaggagctcatcaaagcccagaaggtgtttgaggagatgaatgtggatctgcaggaggagctgccgtccctgtggaacagccgcgtaggtttctacgtcaacacgttccagagcatcgcgggcctggaggaaaacttccacaaggagatgagcaagctcaaccagaacctcaatgatgtgctggtcggcctggagaagcaacacgggagcaacaccttcacggtcaaggcccagcccagtgacaacgcgcctgcaaaagggaacaagagcccttcgcctccagatggctcccctgccgccacccccgagatcagagtcaaccacgagccagagccggccggcggggccacgcccggggccaccctccccaagtccccatctcagcccacagagagtccagccggcagcctgccttccggggagcccagcgctgccgagggcacctttgctgtgtcctggcccagccagacggccgagccggggcctgcccaaccagcagaggcctcggaggtggcgggtgggacccaacctgcggctggagcccaggagccaggggagacggcggcaagtgaagcagcctccagctctcttcctgctgtcgtggtggagaccttcccagcaactgtgaatggcaccgtggagggcggcagtggggccgggcgcttggacctgcccccaggtttcatgttcaaggtacaggcccagcacgactacacggccactgacacagacgagctgcagctcaaggctggtgatgtggtgctggtgatccccttccagaaccctgaagagcaggatgaaggctggctcatgggcgtgaaggagagcgactggaaccagcacaaggagctggagaagtgccgtggcgtcttccccgagaacttcactgagagggtcccatgacggcggggcccaggcagcctccgggcgtgtgaagaacacctcctcccgaaaaatgtgtggttcttttttttgttttgttttcgtttttcatcttttgaagagcaaagggaaatcaagaggagacccccaggcagaggggcgttctcccaaagattaggtcgttttccaaagagccgcgtcccggcaagtccggcggaattcaccagtgttcctgaagctgctgtgtcctctagttgagtttctggcgcccctgcctgtgcccgcatgtgtgcctggccgcagggcggggctgggggctgccgagccaccatgcttgcctgaagcttcggccgcgccacccgggcaagggtcctcttttcctggcagctgctgtgggtggggcccagacaccagcctagcctggctctgccccgcagacggtctgtgtgctgtttgaaaataaatcttagtgttcaaaacaaaatgaaacaaaaaaaaaatgataaaaactctcaaaaaaaaaaaaaaaaa

SEQ ID NO: 1648 - DNA, 2165 bp, Homo sapiens
cgcgcccctccctcctcgcggacctggcggtgccggcgcccggagtggccctttaaaaggcagcttattgtccggagggggcgggcggggggcgccgaccgcggcctgaggcccggcccctcccctctccctccctctgtccccgcgtcgctcgctggctagctcgctggctcgctcgcccgtccggcgcacgctccgcctccgtcagttggctccgctgtcgggtgcgcggcgtggagcggcagccggtctggacgcgcggccggggctgggggctgggagcgcggcgcgcaagatctccccgcgcgagagcggcccctgccaccgggcgaggcctgcgccgcgatggcagagatgggcagtaaaggggtgacggcgggaaagatcgccagcaacgtgcagaagaagctcacccgcgcgcaggagaaggttctccagaagctggggaaggcagatgagaccaaggatgagcagtttgagcagtgcgtccagaatttcaacaagcagctgacggagggcacccggctgcagaaggatctccggacctacctggcctccgtcaaagccatgcacgaggcttccaagaagctgaatgagtgtctgcaggaggtgtatgagcccgattggcccggcagggatgaggcaaacaagatcgcagagaacaacgacctgctgtggatggattaccaccagaagctggtggaccaggcgctgctgaccatggacacgtacctgggccagttccccgacatcaagtcacgcattgccaagcgggggcgcaagctggtggactacgacagtgcccggcaccactacgagtcccttcaaactgccaaaaagaaggatgaagccaaaattgccaaggccgaggaggagctcatcaaagcccagaaggtgtttgaggagatgaatgtggatctgcaggaggagctgccgtccctgtggaacagccgcgtaggtttctacgtcaacacgttccagagcatcgcgggcctggaggaaaacttccacaaggagatgagcaagctcaaccagaacctcaatgatgtgctggtcggcctggagaagcaacacgggagcaacaccttcacggtcaaggcccagcccagtgacaacgcgcctgcaaaagggaacaagagcccttcgcctccagatggctcccctgccgccacccccgagatcagagtcaaccacgagccagagccggccggcggggccacgcccggggccaccctccccaagtccccatctcagccagcagaggcctcggaggtggcgggtgggacccaacctgcggctggagcccaggagccaggggagacggcggcaagtgaagcagcctccagctctcttcctgctgtcgtggtggagaccttcccagcaactgtgaatggcaccgtggagggcggcagtggggccgggcgcttggacctgcccccaggtttcatgttcaaggtacaggcccagcacgactacacggccactgacacagacgagctgcagctcaaggctggtgatgtggtgctggtgatccccttccagaaccctgaagagcaggatgaaggctggctcatgggcgtgaaggagagcgactggaaccagcacaaggagctggagaagtgccgtggcgtcttccccgagaacttcactgagagggtcccatgacggcggggcccaggcagcctccgggcgtgtgaagaacacctcctcccgaaaaatgtgtggttcttttttttgttttgttttcgtttttcatcttttgaagagcaaagggaaatcaagaggagacccccaggcagaggggcgttctcccaaagattaggtcgttttccaaagagccgcgtcccggcaagtccggcggaattcaccagtgttcctgaagctgctgtgtcctctagttgagtttctggcgcccctgcctgtgcccgcatgtgtgcctggccgcagggcggggctgggggctgccgagccaccatgcttgcctgaagcttcggccgcgccacccgggcaagggtcctcttttcctggcagctgctgtgggtggggcccagacaccagcctagcctggctctgccccgcagacggtctgtgtgctgtttgaaaataaatcttagtgttcaaaacaaaatgaaacaaaaaaaaaatgataaaaactctcaaaaaaa

SEQ ID NO: 1649 - DNA, 2075 bp, Homo sapiens
cgcgcccctccctcctcgcggacctggcggtgccggcgcccggagtggccctttaaaaggcagcttattgtccggagggggcgggcggggggcgccgaccgcggcctgaggcccggcccctcccctctccctccctctgtccccgcgtcgctcgctggctagctcgctggctcgctcgcccgtccggcgcacgctccgcctccgtcagttggctccgctgtcgggtgcgcggcgtggagcggcagccggtctggacgcgcggccggggctgggggctgggagcgcggcgcgcaagatctccccgcgcgagagcggcccctgccaccgggcgaggcctgcgccgcgatggcagagatgggcagtaaaggggtgacggcgggaaagatcgccagcaacgtgcagaagaagctcacccgcgcgcaggagaaggttctccagaagctggggaaggcagatgagaccaaggatgagcagtttgagcagtgcgtccagaatttcaacaagcagctgacggagggcacccggctgcagaaggatctccggacctacctggcctccgtcaaagccatgcacgaggcttccaagaagctgaatgagtgtctgcaggaggtgtatgagcccgattggcccggcagggatgaggcaaacaagatcgcagagaacaacgacctgctgtggatggattaccaccagaagctggtggaccaggcgctgctgaccatggacacgtacctgggccagttccccgacatcaagtcacgcattgccaagcgggggcgcaagctggtggactacgacagtgcccggcaccactacgagtcccttcaaactgccaaaaagaaggatgaagccaaaattgccaaggccgaggaggagctcatcaaagcccagaaggtgtttgaggagatgaatgtggatctgcaggaggagctgccgtccctgtggaacagccgcgtaggtttctacgtcaacacgttccagagcatcgcgggcctggaggaaaacttccacaaggagatgagcaagctcaaccagaacctcaatgatgtgctggtcggcctggagaagcaacacgggagcaacaccttcacggtcaaggcccagcccagtgacaacgcgcctgcaaaagggaacaagagcccttcgcctccagatggctcccctgccgccacccccgagatcagagtcaaccacgagccagagccggccggcggggccacgcccggggccaccctccccaagtccccatctcagagctctcttcctgctgtcgtggtggagaccttcccagcaactgtgaatggcaccgtggagggcggcagtggggccgggcgcttggacctgcccccaggtttcatgttcaaggtacaggcccagcacgactacacggccactgacacagacgagctgcagctcaaggctggtgatgtggtgctggtgatccccttccagaaccctgaagagcaggatgaaggctggctcatgggcgtgaaggagagcgactggaaccagcacaaggagctggagaagtgccgtggcgtcttccccgagaacttcactgagagggtcccatgacggcggggcccaggcagcctccgggcgtgtgaagaacacctcctcccgaaaaatgtgtggttcttttttttgttttgttttcgtttttcatcttttgaagagcaaagggaaatcaagaggagacccccaggcagaggggcgttctcccaaagattaggtcgttttccaaagagccgcgtcccggcaagtccggcggaattcaccagtgttcctgaagctgctgtgtcctctagttgagtttctggcgcccctgcctgtgcccgcatgtgtgcctggccgcagggcggggctgggggctgccgagccaccatgcttgcctgaagcttcggccgcgccacccgggcaagggtcctcttttcctggcagctgctgtgggtggggcccagacaccagcctagcctggctctgccccgcagacggtctgtgtgctgtttgaaaataaatcttagtgttcaaaacaaaatgaaacaaaaaaaaaatgataaaaactctcaaaaaaa

SEQ ID NO: 1650 - DNA, 1364 bp, Homo sapiens
ctgtattgtggttcctggaacactttagaggcttgtgattctactgcttcttattcacactataatacatgtctcaccaatagatgattcaagaacatcatttaaatacacaatttttcattctctatttttgctaaatttcttcatactcaactttcagattctttaatctccagctcagcttcaacaattcaacgctgttctttctgaaaaagtacacatcgtgccttctctacttcgctcttggaacataatttctcatggcagtgtttaagaccactctgtggaggttaatttctgggaccttagggataatatgcctttcgttgatggctacgttgggaattttgttgaaaaattcttttactaaactgagtattgagccagcatttactccaggacccaacatagaactccagaaagactctgactgctgttcttgccaagaaaaatgggttgggtaccggtgcaactgttacttcatttccagtgaacagaaaacttggaacgaaagtcggcatctctgtgcttctcagaaatccagcctgcttcagcttcaaaacacagatgaactggattttatgagctccagtcaacaattttactggattggactctcttacagtgaggagcacaccgcctggttgtgggagaatggctctgcactctcccagtatctatttccatcatttgaaacttttaatacaaagaactgcatagcgtataatccaaatggaaatgctttagatgaatcctgtgaagataaaaatcgttatatctgtaagcaacagctcatttaaatgtttcttggggcagagaaggtggagagtaaagacccaacattactaacaatgatacagttgcatgttatattattactaattgtctacttctggagtctataaaatgtttttaaacagtgtcatatacaattgtcatgtatgtgaaacaatgtgttttaaaattgatgaaattcgttcacctacatttgagaattataaaattaacataaagaattttgtattttcatttaatgtatataatgttaaattcaatgtagttttattacacatttatgtaattttatttacattcttgctaattctcagcagaaatttaaataagatttaattcacatcaaataaaatttagaaaataaaatttaactcacactgcccaggctggagcatagtggcaagatcatagctcattgcaagctcaagtgatcctcctgactcagcctcccaagtagctaggactgcaggcaccatgtcactatgcccgactaatttttaatttttaattttttgtcaagacaaggtcttgctatgttgcccaggctggtcttgaactcctggcctcaa

SEQ ID NO: 1651 - DNA, 1271 bp, Homo sapiens
ctgtattgtggttcctggaacactttagaggcttgtgattctactgcttcttattcacactataatacatgtctcaccaatagatgattcaagaacatcatttaaatacacaatttttcattctctatttttgctaaatttcttcatactcaactttcagattctttaatctccagctcagcttcaacaattcaacgctgttctttctgaaaaagtacacatcgtgccttctctacttcgctcttggaacataatttctcatggcagcttttactaaactgagtattgagccagcatttactccaggacccaacatagaactccagaaagactctgactgctgttcttgccaagaaaaatgggttgggtaccggtgcaactgttacttcatttccagtgaacagaaaacttggaacgaaagtcggcatctctgtgcttctcagaaatccagcctgcttcagcttcaaaacacagatgaactggattttatgagctccagtcaacaattttactggattggactctcttacagtgaggagcacaccgcctggttgtgggagaatggctctgcactctcccagtatctatttccatcatttgaaacttttaatacaaagaactgcatagcgtataatccaaatggaaatgctttagatgaatcctgtgaagataaaaatcgttatatctgtaagcaacagctcatttaaatgtttcttggggcagagaaggtggagagtaaagacccaacattactaacaatgatacagttgcatgttatattattactaattgtctacttctggagtctataaaatgtttttaaacagtgtcatatacaattgtcatgtatgtgaaacaatgtgttttaaaattgatgaaattcgttcacctacatttgagaattataaaattaacataaagaattttgtattttcatttaatgtatataatgttaaattcaatgtagttttattacacatttatgtaattttatttacattcttgctaattctcagcagaaatttaaataagatttaattcacatcaaataaaatttagaaaataaaatttaactcacactgcccaggctggagcatagtggcaagatcatagctcattgcaagctcaagtgatcctcctgactcagcctcccaagtagctaggactgcaggcaccatgtcactatgcccgactaatttttaatttttaattttttgtcaagacaaggtcttgctatgttgcccaggctggtcttgaactcctggcctcaa

SEQ ID NO: 1652 - DNA, 2450 bp, Homo sapiens
aataggttagtttcagacaagcctgcttgccggagctcagcagacaccaggccttccgggcaggcctggcccaccgtgggcctcagagctgctgctggggcattcagaaccggctctccattggcattgggaccagagaccccgcaagtggcctgtttgcctggacatccacctgtacgtccccaggtttcgggaggcccaggggcgatgccagaccccgcggcgcacctgcccttcttctacggcagcatctcgcgtgccgaggccgaggagcacctgaagctggcgggcatggcggacgggctcttcctgctgcgccagtgcctgcgctcgctgggcggctatgtgctgtcgctcgtgcacgatgtgcgcttccaccactttcccatcgagcgccagctcaacggcacctacgccattgccggcggcaaagcgcactgtggaccggcagagctctgcgagttctactcgcgcgaccccgacgggctgccctgcaacctgcgcaagccgtgcaaccggccgtcgggcctcgagccgcagccgggggtcttcgactgcctgcgagacgccatggtgcgtgactacgtgcgccagacgtggaagctggagggcgaggccctggagcaggccatcatcagccaggccccgcaggtggagaagctcattgctacgacggcccacgagcggatgccctggtaccacagcagcctgacgcgtgaggaggccgagcgcaaactttactctggggcgcagaccgacggcaagttcctgctgaggccgcggaaggagcagggcacatacgccctgtccctcatctatgggaagacggtgtaccactacctcatcagccaagacaaggcgggcaagtactgcattcccgagggcaccaagtttgacacgctctggcagctggtggagtatctgaagctgaaggcggacgggctcatctactgcctgaaggaggcctgccccaacagcagtgccagcaacgcctcaggggctgctgctcccacactcccagcccacccatccacgttgactcatcctcagagacgaatcgacaccctcaactcagatggatacacccctgagccagcacgcataacgtccccagacaaaccgcggccgatgcccatggacacgagcgtgtatgagagcccctacagcgacccagaggagctcaaggacaagaagctcttcctgaagcgcgataacctcctcatagctgacattgaacttggctgcggcaactttggctcagtgcgccagggcgtgtaccgcatgcgcaagaagcagatcgacgtggccatcaaggtgctgaagcagggcacggagaaggcagacacggaagagatgatgcgcgaggcgcagatcatgcaccagctggacaacccctacatcgtgcggctcattggcgtctgccaggccgaggccctcatgctggtcatggagatggctgggggcgggccgctgcacaagttcctggtcggcaagagggaggagatccctgtgagcaatgtggccgagctgctgcaccaggtgtccatggggatgaagtacctggaggagaagaactttgtgcaccgtgacctggcggcccgcaacgtcctgctggttaaccggcactacgccaagatcagcgactttggcctctccaaagcactgggtgccgacgacagctactacactgcccgctcagcagggaagtggccgctcaagtggtacgcacccgaatgcatcaacttccgcaagttctccagccgcagcgatgtctggagctatggggtcaccatgtgggaggccttgtcctacggccagaagccctacaagaagatgaaagggccggaggtcatggccttcatcgagcagggcaagcggatggagtgcccaccagagtgtccacccgaactgtacgcactcatgagtgactgctggatctacaagtgggaggatcgccccgacttcctgaccgtggagcagcgcatgcgagcctgttactacagcctggccagcaaggtggaagggcccccaggcagcacacagaaggctgaggctgcctgtgcctgagctcccgctgcccaggggagccctccacgccggctcttccccaccctcagccccaccccaggtcctgcagtctggctgagccctgcttggttgtctccacacacagctgggctgtggtagggggtgtctcaggccacaccggccttgcattgcctgcctggccccctgtcctctctggctggggagcagggaggtccgggagggtgcggctgtgcagcctgtcctgggctggtggctcccggagggccctgagctgagggcattgcttacacggatgccttcccctgggccctgacattggagcctgggcatcctcaggtggtcaggcgtagatcaccagaataaacccagcttccctcttgaaaaaaaaaaaaaaaaaaaaa

SEQ ID NO: 1653 - DNA, 1468 bp, Homo sapiens
tgcatgctccagggacggcacccttgtctggggcaggtgcttgtgggggctgaggctgccttgctccccacacccctgcccctgacctgggagtgtaccgctgtgtgtgcccagcacgcataacgtccccagacaaaccgcggccgatgcccatggacacgagcgtgtatgagagcccctacagcgacccagaggagctcaaggacaagaagctcttcctgaagcgcgataacctcctcatagctgacattgaacttggctgcggcaactttggctcagtgcgccagggcgtgtaccgcatgcgcaagaagcagatcgacgtggccatcaaggtgctgaagcagggcacggagaaggcagacacggaagagatgatgcgcgaggcgcagatcatgcaccagctggacaacccctacatcgtgcggctcattggcgtctgccaggccgaggccctcatgctggtcatggagatggctgggggcgggccgctgcacaagttcctggtcggcaagagggaggagatccctgtgagcaatgtggccgagctgctgcaccaggtgtccatggggatgaagtacctggaggagaagaactttgtgcaccgtgacctggcggcccgcaacgtcctgctggttaaccggcactacgccaagatcagcgactttggcctctccaaagcactgggtgccgacgacagctactacactgcccgctcagcagggaagtggccgctcaagtggtacgcacccgaatgcatcaacttccgcaagttctccagccgcagcgatgtctggagctatggggtcaccatgtgggaggccttgtcctacggccagaagccctacaagaagatgaaagggccggaggtcatggccttcatcgagcagggcaagcggatggagtgcccaccagagtgtccacccgaactgtacgcactcatgagtgactgctggatctacaagtgggaggatcgccccgacttcctgaccgtggagcagcgcatgcgagcctgttactacagcctggccagcaaggtggaagggcccccaggcagcacacagaaggctgaggctgcctgtgcctgagctcccgctgcccaggggagccctccacgccggctcttccccaccctcagccccaccccaggtcctgcagtctggctgagccctgcttggttgtctccacacacagctgggctgtggtagggggtgtctcaggccacaccggccttgcattgcctgcctggccccctgtcctctctggctggggagcagggaggtccgggagggtgcggctgtgcagcctgtcctgggctggtggctcccggagggccctgagctgagggcattgcttacacggatgccttcccctgggccctgacattggagcctgggcatcctcaggtggtcaggcgtagatcaccagaataaacccagcttccctcttgaaaaaaaaaaaaaaaaaaaaa

SEQ ID NO: 1654 - DNA, 2794 bp, Homo sapiens
gaccagccgtgcaaatctctagaagatgacggtgttctttaaaacgcttcgaaatcactggaagaaaactacagctgggctctgcctgctgacctggggaggccattggctctatggaaaacactgtgataacctcctaaggagagcagcctgtcaagaagctcaggtgtttggcaatcaactcattcctcccaatgcacaagtgaagaaggccactgtttttctcaatcctgcagcttgcaaaggaaaagctaggactctatttgaaaaaaatgctgccccgattttacatttatctggcatggatgtgactattgttaagacagattatgagggacaagccaagaaactcctggaactgatggaaaacacggatgtgatcattgttgcaggaggagatgggacactgcaggaggttgttactggtgttcttcgacgaacagatgaggctaccttcagtaagattcccattggatttatcccactgggagagaccagtagtttgagtcataccctctttgccgaaagtggaaacaaagtccaacatattactgatgccacacttgccattgtgaaaggagagacagttccacttgatgtcttgcagatcaagggtgaaaaggaacagcctgtatttgcaatgaccggccttcgatggggatctttcagagatgctggcgtcaaagttagcaagtactggtatcttgggcctctaaaaatcaaagcagcccactttttcagcactcttaaggagtggcctcagactcatcaagcctctatctcatacacgggacctacagagagacctcccaatgaaccagaggagacccctgtacaaaggccttctttgtacaggagaatattacgaaggcttgcgtcctactgggcacaaccacaggatgccctttcccaagaggtgagcccggaggtctggaaagatgtgcagctgtccaccattgaactgtccatcacaacacggaataatcagcttgacccgacaagcaaagaagattttctgaatatctgcattgaacctgacaccatcagcaaaggagactttataactataggaagtcgaaaggtgagaaaccccaagctgcacgtggagggcacggagtgtctccaagccagccagtgcactttgcttatcccggagggagcagggggctcttttagcattgacagtgaggagtatgaagcgatgcctgtggaggtgaaactgctccccaggaagctgcagttcttctgtgatcctaggaagagagaacagatgctcacaagccccacccagtgagcagcagaagacaagcactctgagaccacactttaggccaccggtgggaccaaaagggaacaggtgcctcagccatcccaacagtgtcgtcagagggtccccagggcattttcatggcaagtacccctctgcccccactccagcagtgcttcccaaagtgtgctctgtcacctgctttgcaatcggcttccattagcgcatgttttattttggtgtgacggttggccctcctaaacacggactttcctcaggctggttcaagacggaaaaggactttcttctgttttcttccaaagtgcaaccacagtggagagcccacggtgggcttagcctgcctaggcccttccatttctcttctttgaccgtgctaggaattccaggaaagtgcattcctgccctggtgaccttttcctatgtctaggctcctccacaggtgctgctattttgtgagctccggctcctgtttagcttttatttcagttctaacctcagtccagaaacatatgtgaggttgtttccctcttcagccacggctacaataccggaaaatgctagtttttatttatttttttaagtagtgcttcctaaatggtttgcatgagagccacctggggtacatgttgaaaacttatttggggtctaccccaaacctaataacccaaatttggggatggggcccaggaatatgcatttttaaaaagtcatctgcccttcccaggtgattctgtaagttgtccctcaactgtacttggagaaatcgtgttttaaagcagtagtccacaaagtattctgctcatgtgcccccaaaagtattttgaaaaatcatgtataccctcacccatctaagttgatatctaaaattttatctaagttggtatctaaaatttttcatgggaagttaaatagttgacaaagtatgtatttgctggtgtcgtgtaaatattggtattttaaaataaaaactgttacatcactattttaaacatatccagtacaatttaaatatcacaacaatttgacacccttcattcatttataaaaataaatgagctagttctttagtagttaaacatttcaaattggcttttctccttctgtatttccataccacttttcagccaagaatcctatcataatgtaatctattatgcccgacatcttttaatcattcaccccattacttcttgtcaacaaaaaatataaatggaaattttttttttagctcttgctttaagtgtttgtttgttatctcagtccagaaccaatattatcgtaattaattattggtatataatgaaaacggtattaattcttggatgattaaaagtttttttattagaatgttctttatcctaattagttcatttatccaagaatacatgaatgtgatttacagctgagatggggttcaacctcagctgtattccttgtttctgtatagatgtaagcacataaattcgatggaatagaattacgttaacaatgaaaaaaaaaaaaaaa

SEQ ID NO: 1655 - DNA, 1434 bp, Homo sapiens
ggggaagtcgaggcgggagtgactctgcttccgtttctggttttgctctagtgtttgggtttcttcgcggctgctcaagatgaaccgactcttcgggaaagcgaaacccaaggctccgccgcccagcctgactggctgcattggcacggtggacagtagagcagaatccattgacaagaagatttctcgattggatgctgagctagtgaagtataaggatcagatcaagaagatgagagagggtcctgcaaagaatatggtcaagcagaaagccttgcgagttttaaagcaaaagaggatgtatgagcagcagcgggacaatcttgcccaacagtcattcaacatggaacaagccaattataccatccagtctttgaaggacaccaagaccacggttgatgctatgaaactgggagtaaaggaaatgaagaaggcatacaagcaagtgaagatcgaccagattgaggatttacaagaccagctagaggatatgatggaagatgcaaatgaaatccaagaagcactgagtcgcagttatggcaccccagaactggatgaagatgatttagaagcagagttggatgcactaggtgatgagcttctggctgatgaagacagttcttatttggatgaggcagcatctgcacctgcaattccagaaggtgttcccactgatacaaaaaacaaggatggagttctggtggatgaatttggattgccacagatccctgcttcatagatttgcatcattcaagcatatcttgtaaaacaaacacatattatgggactaggaaatatttatctttccaaatttgccataacagatttaggtttctttcctttctttgaaggaaagtttaattacattgctcttttattttttccattaagagactcattgcttgggaaatgctttcttcgtactaaaatttgattcctttttttcttatgaaaaacgaactcagtttaaaagtatttttagctcgtatgacttgttttcattcattaataataatttgaaataaaactaaggaaatggaatcttaaaagtctatgacagtgtaactctacagtctcaaaatgacctgataaattgataagacaaagatgagattattggggctgttcatattatgattcagaatcattttctattgtggtattataggttggttaaagtgatggcctttttgatgggttttgttgtgtcttgtgaacaagtcgttactgtgtccattattggaatggaattatcactactgtatcatgagtgggtattttgattctatggttccctcagtattacatcttgacttgtaatcaattatgaatatttcttgatatttaatgtataggacatttatttatactcaataaatatttttcaaaaggaaaaaaaaaaaaatcaaaaaaaaaaaaaaaaaaaaaaaaaaa

SEQ ID NO: 1656 - DNA, 4834 bp, Homo sapiens
gagccccgcatcccgccgcagctgccgcctcgccgcggccgggccggagagcacggcggcgggagcgcggccttaggaggcggccggagcggtgggcacagctcggcgcggagcgtcctgtcaggcggcggccgagggcgtcgcggactctccccgcgatgatgccgatgatattaactgttttcttgagcaacaatgaacagattttaacagaagttcctataacaccggaaacaacctgtcgagatgttgtagaattttgcaaggaacctggagaaggcagctgccatttagctgaagtgtggaggggaaatgaacgtcccataccctttgatcatatgatgtacgaacatcttcagatatggggtccacggagggaagaagtgaaatttttccttcgacacgaggactccccaactgagaacagtgaacaaggtggccgtcagacccaagagcaacgaactcagagaaatgtaataaatgtacctggagataaacgtactgaatatggggttgggaatccacgtgttgaacttaccctctcagagctccaagatatggcagctaggcaacagcagcagattgaaaatcagcagcagatgttggttgccaaggaacagcgtttacattttctaaagcaacaggagcgccgtcagcagcagtctatttctgaaaatgaaaagcttcagaaattgaaagaacgagttgaagcccaggagaacaagctgaagaaaattcgtgcaatgagaggacaagtcgactacagcaaaatcatgaacggcaatctgtctgctgaaatagaaaggttcagtgccatgttccaggaaaagaagcaggaagtacagactgcaattttaagggttgatcagcttagtcagcaattggaagatttaaagaaaggaaaactgaatgggttccagtcttacaatggcaaattgacgggaccagcggcggtggagttaaaaagactgtaccaagaactacagattcgtaaccaacttaaccaggaacaaaattcaaaacttcagcagcagaaggaactcttaaataagcgcaacatggaggtggccatgatggacaagcgaatcagtgaactgcgtgaacgtctctatgggaaaaaaattcagctgaaccgtgtgaatggcacgtcatcaccacagtcccctctgagcacatcgggcagggtcgctgctgtggggccttatatccaggttcccagtgccggaagctttcctgtgctgggggaccctataaagccccagtctctcagtattgcctcaaatgctgctcatggaagatccaaatccgctaatgatggaaactggccaacattaaaacagaattctagctcttccgtgaaaccagtgcaggtggccggtgcagactggaaggatccgagcgtggaggggtctgtcaagcagggcactgtctccagccagcctgtgcccttctcagcactgggacccacggagaagccgggcatcgagattggtaaagtgccacctcccatcccgggtgtaggcaagcagctgcctccaagctatgggacatacccaagtcctacacctctgggtcctgggtcgacaagctccctggaaaggaggaaggaaggcagcttgcccaggcccagtgcaggcctgccaagtcgacagaggcccaccctgctgcccgccacaggcagcaccccccagccaggctcctcacaacagattcagcagaggatttccgtaccgccaagtcccacgtacccgccagcgggaccacctgcatttccagctggggacagcaagcctgaactcccactgacagtggccattaggcctttcctggctgataaagggtcaaggccacagtctcccaggaaaggaccccagacagtgaattcaagttccatatactccatgtacctccagcaagccacaccacctaagaattaccagccggcagcacacagcgccttaaataagtcagttaaagcagtgtatggtaagcccgttttaccttcgggttcaacctctccatcgccgctgccgtttcttcacgggtcactgtccacgggcacaccacagcctcagccaccttcagaaagtactgagaaagagcctgagcaggatggccccgccgcccccgcagatggcagcaccgtggagagcctgccacggccactcagccccaccaagctcacgcccatcgtgcattcgccactgcgctaccagagtgatgcagacctggaggccctccgcaggaagctggccaacgcgccccggcccctgaaaaagcgcagctccatcacagagcccgagggccccggcgggcccaacatccagaagctgctgtaccagcgcttcaacaccctggccggtggcatggagggcacccctttctaccagcccagcccctcccaggacttcatgggcaccttggccgatgtggacaatggaaacaccaatgccaatggaaacctggaagagctcccccctgcccagcccacagccccactccccgctgagcctgccccgtcatcagatgccaatgataatgagttaccttcccccgaaccagaggagctcatctgtccccaaaccacccaccaaactgccgagccggcagaggacaataacaacaacgtggccacggtccccaccacggagcagatcccgagtcctgtggctgaggccccatctccaggggaagagcaggtccctccagcacctcttccccctgccagccaccctcctgccacctccacgaacaagcggaccaacttgaagaagcccaactcggagcggacggggcacgggctgagagtccggtttaaccccctggcactgctcctagacgcgtctctggaaggagagttcgatctggtgcagaggatcatctatgaggtggaagatcccagcaagcccaacgatgaagggatcaccccactgcacaacgccgtctgcgccggccaccatcacatcgtgaagttcctgctggattttggtgtcaacgtgaatgctgctgatagtgatggatggacgccgctgcactgcgctgcctcttgtaacagcgttcacctctgcaaacagctggtggagagtggtgccgccatttttgcctcaaccataagcgacattgaaactgctgcagacaagtgtgaggagatggaggaaggctacatccagtgctcccagtttctatatggggtgcaggaaaagctgggtgtgatgaacaaaggtgtggcgtatgctctgtgggactacgaggcccagaacagtgacgagctgtccttccacgaaggggacgccctcaccatcctgaggcgcaaggacgaaagcgagactgagtggtggtgggctcgccttggagaccgggagggctatgtgcccaaaaacctgctggggctgtatccacggatcaaaccccgacagcgaacactcgcctgaacttccttttggagcaccgcatggtcttgccagctaccaggagccacttaagagattattgtgctgttttccaggaaagctgcagctagaaaatggtcttaatggtgctcactttagcagacagcgtccacaatgtgaatcctacagtttccaggtgaggccctttctccagtttgcccattaactgggagaggtactttcgcctccaaggactgaattttgccaattactataaatccaaataaatacccactttcaaaacacccacccctcttgccattaagaagtcccataacccccggttggttgccagtgaagacagaagctcttactgacttggccccgaggccatcaccccctccagcagtgaacactgtccgccgctgtgaggcctgctcccctgcgaccgccctgccccccgtcaccgaatcggacactcatcctttctcacacttcccacacatgatccttcttcccttcatcaccaaaggagcctctgtatggaaacatgtccagtgttgctgcccagtgtgtatgcctcccagtacccactctgctcggccgccttgggggttccgcttcctgttccagttcacctaaaggctgattgtgcaggcccagcactgtggctggactgccgcgccacgggcaccaggacccctaagaccaagtgacaactgggagagcctcagcatatactcttctcctccgatctcacagcctgtcatgctgctcagtgtggttctcacccctgcaagctcaaattcagttccctgaatggagtcaggtgctggaggccgtggcagcggagggtggttggggttggggctgggggtggactggtgtgagggcagaccagggccaggtagacggggctgtttggtgcctgaaggatggcagacgcctggtgtcaggaggggccgccaccaaggagcagcagctggggcagaggagctggggtcaggggccacccctctctgccgatctccctgcctgggctggctgtgaggccacctttgtcccaggcccagcctcaaggcaaggagggcgcttcactgaggtgtgaattgtacgtacaggctttttatataccaaaagtattttttgactagaccattcaaagctacccgaactatgttggaaatttttttttttctcattaaaatacaggcccttaggctctatttttcatgtatgagtcgtgtgtaatttatgtaaaaatgtgtgtacagactcactgatgcagcactgtagcccatcaccttggagcactgactgtacatagtgtggtgaagaaaagtgaacgcccttgtagagcagcccgaccacaggagcatggccgctgccagcccagacgctgctgacgctgtgtaaatgtgcacaataaacccgtctcaccccgg

SEQ ID NO: 1657 - DNA, 6127 bp, Homo sapiens
agagagaggagagggagaaggagagaggggcagaggggaagggagagagggagagcacgcgagacggaaaggagcgcctcagagtctctgaagcacgcaagagataaccgattaggaatttttcgggcaactgtcacccggatagctgtcagagaatcatcatcaccgcaactctgacgtttcctacaagaagttagagacttaagcagtattggcatcggatggaaatggtatgcatgctgctgtggaaaatatccctgagctgaagaagtgcaactatgtgttgtgtgtgctaaatgcccagaagaacccagacccagtgggtaagagagacgaaatgtggagagaatgactaacgacaaatccgtgaatttgttctctggagttgctaatttgccagcccgaagcaacacattttacaaggaggaaacattttgctgcttctgatttctccccaaactggtgctaccagatgcatggctttctatgtgttggaacaaatcattcctaactgcagcatactgggaaaggggaaaggttgaggcaactaaccggctgtctccaaataagtgatgagatataatgcatcctccagtccatgcacgcttcctcttgcaatttgtgcatcattcctcagtggaaacctttaaaccctaaaatccaggaaaagaaaataaatacattatcatggacctgagggatttttacctgttggctgctctgattgcctgtttaaggctggattccgcaatagctcaagaacttatttacactattagagaggaattgcctgaaaatgtgcccataggaaacataccaaaggatctgaacatttctcacatcaatgctgccacagggaccagcgccagccttgtctacagactggtttctaaagctggggatgcccctttggtgaaagtatccagcagcactggggaaattttcacaacctccaacagaatagacagagaaaaactctgtgctggcgcctcatatgctgaggagaatgagtgtttctttgaacttgaggtggtgatcctccccaatgatttcttcaggctgatcaaaataaaaataattgtcaaggataccaatgataatgcccccatgtttccatctcctgtcatcaatatttccattccagaaaacactttgatcaacagccgctttccaattccatcagcaacagatcctgacacaggcttcaatggtgtacagcattatgaattgttaaatgggcagagtgtttttggactggatatcgtggaaactccagagggagagaagtggccacaactgattgttcagcaaaacttggatagagaacagaaagatacctatgtgatgaaaatcaaagtagaggatggaggcactccacagaaatccagtacggccatactgcaggtcacagtaagtgatgtaaatgacaacaggccagtgtttaaagagggtcaagtggaggtgcatattccagagaatgctcccgtaggtacctctgtaattcagctccatgccactgatgcagatataggcagtaatgctgaaatccggtacatttttggtgcccaggtcgcccctgcaaccaaaagactctttgctttaaataatactactgggctgattacagttcagaggtccttagatagagaggagacagccattcacaaagtgacagtgctggctagtgacggcagctccactcctgctcgagcaacggttaccatcaatgtcaccgatgtaaatgataaccctcctaatatagacctcaggtacattataagtcccatcaatggcaccgtgtatttatctgagaaagatcctgtcaatacaaagattgccctaattacagtttcagataaggacacagatgtgaatggcaaagtgatctgttttattgaaagagaggtcccatttcatttgaaggcggtatatgacaaccaatatttgttagagacctcttctttgttggactatgagggcaccaaagaattcagctttaaaattgttgcctctgattctgggaagcccagtttaaatcagactgccctggtaagggttaagcttgaggatgaaaatgacaacccaccaattttcaaccagcctgtaattgagctgtcagtttctgaaaacaaccgacgtgggttatacttaacaactattagtgccacagatgaagacagtgggaaaaatgcagacattgtttatcagcttggaccgaatgcctccttctttgatctggaccgaaaaacaggagttttgacagcctccagagtatttgacagagaagaacaagaacgattcatttttacagtaactgccagggacaatgggacccctcccctccaaagccaagcggctgtgattgttactgttctggatgagaatgacaatagccccaagtttactcataatcattttcaattttttgtgtctgagaatctgccaaagtatagtactgtgggggtaatcacagtgacagatgcagatgctggagagaataaagctgtgactctttccattctaaatgacaatgataattttgtgttggatccctattctggagtcataaagtcaaatgtctcatttgatagagagcagcagagttcctacacttttgatgtcaaagccactgatggaggacaaccacctcgttcctctactgcaaaagtaactatcaacgtcatggatgtcaatgacaacagcccagttgtcatttctccaccgtctaatacttcctttaagttggtgcccctctcagccattcctggctccgtggtagcagaagtttttgcagtggatgttgacactggaatgaacgctgaactaaagtatactatagtgagtggaaacaataaaggcttattccggattgatccagtaacaggtaacattactctggaagaaaaaccagcacctactgatgtgggattgcatcgtttggtggtcaacataagtgacctggggtaccctaagtctttgcacacgcttgtgcttgtattcctttatgttaacgacactgctggaaatgcctcctatatctatgacttgatccgcaggactatggagaccccgttggacaggaacataggggatagtagccaaccctatcaaaatgaggactatctaaccatcatgattgccatcatcgccggtgccatggtggtcattgttgtgatcttcgtcaccgttctggtgcgctgtcgccatgcatcaaggttcaaagcagctcagaggagcaagcaaggtgccgaatggatgtccccaaaccaggagaacaagcaaaacaagaaaaagaaaagaaagaaaaggaagtctcccaaaagctctcttttgaactttgttactatcgaagagtccaaacccgatgatgcagttcatgaacctatcaatgggacaataagcctgccggctgaactggaggagcaaagtataggaagatttgactggggcccggcacctccaacaacattcaagcctaacagtcctgacctggccaagcactacaaatctgcttctccacagcctgcttttcatctcaaaccagacactccagtttccgtgaaaaagcaccacgtgattcaggaactccctttggacaacacctttgttgggggttgtgacaccctttctaaacgctcttccactagttcagatcacttcagtgcctcagagtgcagttcccaaggaggcttcaagacaaagggccccttacacaccagacagtcgcagcgccgtgttacgtttcatctccctgatggctcccaggaaagctgcagtgacagtggtctaggagaccatgagccggtgggtagtggaaccctgatctcacaccctcttcctctggttcagccacaggacgaattctatgaccaggcctctccggacaagaggactgaagcagatggcaactctgatcccaactctgatgggcctttgggtccccgaggattagctgaagctacagagatgtgcactcaagagtgcttggttttgggtcactctgataattgctggatgcctcctggcttgggtccatatcaacaccccaaatctcctctctcaacctttgcaccccagaaagaatgggtgaagaaggacaagcttgtgaatgggcacaccctgaccagagcctggaaagaagacagcaacaggaaccagttcaatgaccgtaagcagtatggctccaatgaaggccatttcaacaatggcagccacatgacagacattcctctggcaaatctgaagtcttataagcaagcaggaggtgctactgagagtcctaaggagcaccaactctaagaaaaggctatatgggacctaataactttaaatagacatgctaataccgtgtgcgtcagagctttatgtattcaatagatctctacaactatgccccttctagcagggatacctataactttgtgttagcaccatggagaatacaatgtttttgcaacatatgagagaagatagttctagccatgcaattttgtttactagaattgattacactctccagagatctctccattgtgcaaattttttttattattgcattttattttgaccctggactgctgctatgaacaatagaatatgcatttggaaagtaagaaagtttcatggattagagtgactgaaaaacatatccagttagaaaattgtgcttttttttttttttttttttttttttgtcattgatttgtgctgggactgctatacttgacattatactgcaaacaaaacttaaagagataagcattaaacctattgtgctgttaacaacgttagtggacacttgtaagtcaatcagtgttaaagtatttgtaaatagaagcaagctattattaacaacttttgtgtacttataatgttcacctaaaaatgttgtagcataattctgtgttttatggttgcttctgtccttctttttatttacctctttgttgttatttttgttgtttctttcagtgaggtgtttctgtgttagtagtctgtcttgacacacattgttcaaacaatctcaagcacttgtgtttaaaaaaggttctgaaatcttgcttctcatatgatagcttatgatgccggaattctgtaaacaataaagatgaaagaaaaaatgaaaactttatacaaaaaaggacttctgcaaaagcttggaaattcagaacctattttttatcatcttattttcaaagtaggcaaaagcaaaatcacttaattagtaccattaagtgagagagtaatggaaaactgttatccatcaaaagtgatataatatcctgtacttgtcactcatgtaaaactaatgtatcaaaattagcatatatggaagaaaaatcactattcaaaaatagtttcaattgggcaaatgtgtgtctacaactttgttgaaatggcagagtctgtgttgatcctcatatacaataatgttgttgtaacacaagtgttattagaccatagccacaaaatatttaatgtgttgtgccttcatgatgtaacagaacattctccaggtagggtagttgggggaaataaagggataaatctctaattattgctgtttaactgtttgttatcatagttggtcaatgcctggcaggtaccagcatattgtcacttaggtcaaaccaataaagtgacaactaatgttaataagatctcagttgcacgtgcaaacaaatccaaattcgaacattcttaggaggtttttgttaaggcatgacagatgatttaaacaaataaatagcatgcaacaaaatgtctttattgaaagaagtggaagttatcttaatgccacggttcaccatcaatttaaaagtaaaaaaaacaaaaaaaaaacaaaaaatttaaaaaaaaggtttgctaatctgatagttaatttgttcttaccaaaaaataaaattactttgtaaatagcagttcacatttttccacagtataatggaaaataatgggtaggggtgcattgcttattgaagtacatttttgtcggtttgtgaggggtgtttgatgactttgacagaataaatatctaaacaattatccttgttactgctttgccagttctacgttatttacaattattcagctcttgcaataaatgttctgaattcctgaaaaaaaa

SEQ ID NO: 1658 - DNA, 6229 bp, Homo sapiens
agagagaggagagggagaaggagagaggggcagaggggaagggagagagggagagcacgcgagacggaaaggagcgcctcagagtctctgaagcacgcaagagataaccgattaggaatttttcgggcaactgtcacccggatagctgtcagagaatcatcatcaccgcaactctgacgtttcctacaagaagttagagacttaagcagtattggcatcggatggaaatggtatgcatgctgctgtggaaaatatccctgagctgaagaagtgcaactatgtgttgtgtgtgctaaatgcccagaagaacccagacccagtgggtaagagagacgaaatgtggagagaatgactaacgacaaatccgtgaatttgttctctggagttgctaatttgccagcccgaagcaacacattttacaaggaggaaacattttgctgcttctgatttctccccaaactggtgctaccagatgcatggctttctatgtgttggaacaaatcattcctaactgcagcatactgggaaaggggaaaggttgaggcaactaaccggctgtctccaaataagtgatgagatataatgcatcctccagtccatgcacgcttcctcttgcaatttgtgcatcattcctcagtggaaacctttaaaccctaaaatccaggaaaagaaaataaatacattatcatggacctgagggatttttacctgttggctgctctgattgcctgtttaaggctggattccgcaatagctcaagaacttatttacactattagagaggaattgcctgaaaatgtgcccataggaaacataccaaaggatctgaacatttctcacatcaatgctgccacagggaccagcgccagccttgtctacagactggtttctaaagctggggatgcccctttggtgaaagtatccagcagcactggggaaattttcacaacctccaacagaatagacagagaaaaactctgtgctggcgcctcatatgctgaggagaatgagtgtttctttgaacttgaggtggtgatcctccccaatgatttcttcaggctgatcaaaataaaaataattgtcaaggataccaatgataatgcccccatgtttccatctcctgtcatcaatatttccattccagaaaacactttgatcaacagccgctttccaattccatcagcaacagatcctgacacaggcttcaatggtgtacagcattatgaattgttaaatgggcagagtgtttttggactggatatcgtggaaactccagagggagagaagtggccacaactgattgttcagcaaaacttggatagagaacagaaagatacctatgtgatgaaaatcaaagtagaggatggaggcactccacagaaatccagtacggccatactgcaggtcacagtaagtgatgtaaatgacaacaggccagtgtttaaagagggtcaagtggaggtgcatattccagagaatgctcccgtaggtacctctgtaattcagctccatgccactgatgcagatataggcagtaatgctgaaatccggtacatttttggtgcccaggtcgcccctgcaaccaaaagactctttgctttaaataatactactgggctgattacagttcagaggtccttagatagagaggagacagccattcacaaagtgacagtgctggctagtgacggcagctccactcctgctcgagcaacggttaccatcaatgtcaccgatgtaaatgataaccctcctaatatagacctcaggtacattataagtcccatcaatggcaccgtgtatttatctgagaaagatcctgtcaatacaaagattgccctaattacagtttcagataaggacacagatgtgaatggcaaagtgatctgttttattgaaagagaggtcccatttcatttgaaggcggtatatgacaaccaatatttgttagagacctcttctttgttggactatgagggcaccaaagaattcagctttaaaattgttgcctctgattctgggaagcccagtttaaatcagactgccctggtaagggttaagcttgaggatgaaaatgacaacccaccaattttcaaccagcctgtaattgagctgtcagtttctgaaaacaaccgacgtgggttatacttaacaactattagtgccacagatgaagacagtgggaaaaatgcagacattgtttatcagcttggaccgaatgcctccttctttgatctggaccgaaaaacaggagttttgacagcctccagagtatttgacagagaagaacaagaacgattcatttttacagtaactgccagggacaatgggacccctcccctccaaagccaagcggctgtgattgttactgttctggatgagaatgacaatagccccaagtttactcataatcattttcaattttttgtgtctgagaatctgccaaagtatagtactgtgggggtaatcacagtgacagatgcagatgctggagagaataaagctgtgactctttccattctaaatgacaatgataattttgtgttggatccctattctggagtcataaagtcaaatgtctcatttgatagagagcagcagagttcctacacttttgatgtcaaagccactgatggaggacaaccacctcgttcctctactgcaaaagtaactatcaacgtcatggatgtcaatgacaacagcccagttgtcatttctccaccgtctaatacttcctttaagttggtgcccctctcagccattcctggctccgtggtagcagaagtttttgcagtggatgttgacactggaatgaacgctgaactaaagtatactatagtgagtggaaacaataaaggcttattccggattgatccagtaacaggtaacattactctggaagaaaaaccagcacctactgatgtgggattgcatcgtttggtggtcaacataagtgacctggggtaccctaagtctttgcacacgcttgtgcttgtattcctttatgttaacgacactgctggaaatgcctcctatatctatgacttgatccgcaggactatggagaccccgttggacaggaacataggggatagtagccaaccctatcaaaatgaggactatctaaccatcatgattgccatcatcgccggtgccatggtggtcattgttgtgatcttcgtcaccgttctggtgcgctgtcgccatgcatcaaggttcaaagcagctcagaggagcaagcaaggtgccgaatggatgtccccaaaccaggagaacaagcaaaacaagaaaaagaaaagaaagaaaaggaagtctcccaaaagctctcttttgaactttgttactatcgaagagtccaaacccgatgatgcagttcatgaacctatcaatgggacaataagcctgccggctgaactggaggagcaaagtataggaagatttgactggggcccggcacctccaacaacattcaagcctaacagtcctgacctggccaagcactacaaatctgcttctccacagcctgcttttcatctcaaaccagacactccagtttccgtgaaaaagcaccacgtgattcaggaactccctttggacaacacctttgttgggggttgtgacaccctttctaaacgctcttccactagttcagatcacttcagtgcctcagagtgcagttcccaaggaggcttcaagacaaagggccccttacacaccagacagtgtaactcacacagcaaaagtgacaatattcctgtcactcctcagaaatgtcccagctccacgggtttccacattcaggagaatgaagaaagccattacgagtcgcagcgccgtgttacgtttcatctccctgatggctcccaggaaagctgcagtgacagtggtctaggagaccatgagccggtgggtagtggaaccctgatctcacaccctcttcctctggttcagccacaggacgaattctatgaccaggcctctccggacaagaggactgaagcagatggcaactctgatcccaactctgatgggcctttgggtccccgaggattagctgaagctacagagatgtgcactcaagagtgcttggttttgggtcactctgataattgctggatgcctcctggcttgggtccatatcaacaccccaaatctcctctctcaacctttgcaccccagaaagaatgggtgaagaaggacaagcttgtgaatgggcacaccctgaccagagcctggaaagaagacagcaacaggaaccagttcaatgaccgtaagcagtatggctccaatgaaggccatttcaacaatggcagccacatgacagacattcctctggcaaatctgaagtcttataagcaagcaggaggtgctactgagagtcctaaggagcaccaactctaagaaaaggctatatgggacctaataactttaaatagacatgctaataccgtgtgcgtcagagctttatgtattcaatagatctctacaactatgccccttctagcagggatacctataactttgtgttagcaccatggagaatacaatgtttttgcaacatatgagagaagatagttctagccatgcaattttgtttactagaattgattacactctccagagatctctccattgtgcaaattttttttattattgcattttattttgaccctggactgctgctatgaacaatagaatatgcatttggaaagtaagaaagtttcatggattagagtgactgaaaaacatatccagttagaaaattgtgcttttttttttttttttttttttttttgtcattgatttgtgctgggactgctatacttgacattatactgcaaacaaaacttaaagagataagcattaaacctattgtgctgttaacaacgttagtggacacttgtaagtcaatcagtgttaaagtatttgtaaatagaagcaagctattattaacaacttttgtgtacttataatgttcacctaaaaatgttgtagcataattctgtgttttatggttgcttctgtccttctttttatttacctctttgttgttatttttgttgtttctttcagtgaggtgtttctgtgttagtagtctgtcttgacacacattgttcaaacaatctcaagcacttgtgtttaaaaaaggttctgaaatcttgcttctcatatgatagcttatgatgccggaattctgtaaacaataaagatgaaagaaaaaatgaaaactttatacaaaaaaggacttctgcaaaagcttggaaattcagaacctattttttatcatcttattttcaaagtaggcaaaagcaaaatcacttaattagtaccattaagtgagagagtaatggaaaactgttatccatcaaaagtgatataatatcctgtacttgtcactcatgtaaaactaatgtatcaaaattagcatatatggaagaaaaatcactattcaaaaatagtttcaattgggcaaatgtgtgtctacaactttgttgaaatggcagagtctgtgttgatcctcatatacaataatgttgttgtaacacaagtgttattagaccatagccacaaaatatttaatgtgttgtgccttcatgatgtaacagaacattctccaggtagggtagttgggggaaataaagggataaatctctaattattgctgtttaactgtttgttatcatagttggtcaatgcctggcaggtaccagcatattgtcacttaggtcaaaccaataaagtgacaactaatgttaataagatctcagttgcacgtgcaaacaaatccaaattcgaacattcttaggaggtttttgttaaggcatgacagatgatttaaacaaataaatagcatgcaacaaaatgtctttattgaaagaagtggaagttatcttaatgccacggttcaccatcaatttaaaagtaaaaaaaacaaaaaaaaaacaaaaaatttaaaaaaaaggtttgctaatctgatagttaatttgttcttaccaaaaaataaaattactttgtaaatagcagttcacatttttccacagtataatggaaaataatgggtaggggtgcattgcttattgaagtacatttttgtcggtttgtgaggggtgtttgatgactttgacagaataaatatctaaacaattatccttgttactgctttgccagttctacgttatttacaattattcagctcttgcaataaatgttctgaattcctgaaaaaaaa

SEQ ID NO: 1659 - DNA, 2811 bp, Homo sapiens
acacaggaagctgagccggcttggggcccagcatacacaggcccccaggacccctggggagagggccccgctgggctggccctgcagggaccatggaatccagagctgaagggggctcccctgctgtgtttgattggttcttcgaagcggcctgccctgcctccctgcaggaggatccccccatcctgcggcagttccctccagacttcagggaccaggaagctatgcagatggtgcctaaattctgcttcccttttgatgtggaaagggagccccccagccccgccgtgcagcatttcaccttcgccctcacagaccttgccggcaaccgcagatttggtttctgccgcctgcgggcgggtacccagagctgtctctgcatcctcagccacctgccttggttcgaggtgttttacaagctattgaacacagtgggagacctcctagcccaggaccaagtcaccgaggcagaggaacttcttcaaaatctgtttcagcagtccctgtctgggccccaggcctcagtggggcttgagctgggcagcggagtgacggtctccagcgggcagggtatccccccccctacccgggggaatagcaagccgctttcctgcttcgtggccccggactccggccgcctgccatccatccctgagaacaggaacctaacggagctggtggtggccgtgactgacgagaacatcgtggggctgttcgcggcgctcctggccgagagaagagtcctgctcaccgccagcaaactcagcaccctgacctcgtgcgtccacgcgtcctgcgcgctcctgtaccccatgcgctgggagcacgtgctgatccccacgctgcccccacacctgctggactactgctgcgcgcccatgccctacctcattggagtgcacgccagtctcgccgagagagtacgagaaaaagccctggaggacgtcgtggtgctgaacgtggacgccaataccttggagacgacctttaacgacgtgcaggcgctgcctccagacgtggtgtccctgctgaggctccggctcaggaaggtcgccctggcccccggggaaggggtgtcccgtctcttcctcaaagcccaggccctgctcttcggggggtaccgcgacgcactcgtctgcagcccgggccagccagtgaccttcagtgaggaagtcttcttggcccagaagcctggggcacctctgcaggccttccaccggcgggctgtgcacctgcagctgttcaaacagttcatcgaagcccggctggagaagctcaacaagggggagggcttctcagatcaattcgagcaggagatcactggctgcggggcctccccaggggcccttcgatcctatcagctctgggccgacaatctaaagaaaggtggtggcgccctcctgcactcagtcaaggccaagacccaaccagccgtcaagaacatgtaccgctcggccaagagtggcttgaagggggtgcagagccttctaatgtataaggatggggactctgtcctgcagagggggggctctctgagggccccagccctccccagccgctcagaccgcctgcagcaacgcctcccaatcactcagcactttggaaagaaccggccccttcgccccagcaggagacgccagctggaagagggaacttccgagcccccaggggcggggacacccccactgagccctgaggatgaggggtgcccgtgggcagaagaagctctggacagcagcttcttggggtctggagaagaactggatttgttgagcgagattctggacagtcttagcatgggagccaagagcgcaggcagcctgagaccgagccagagtttagactgctgtcacagaggagacctggacagctgcttcagcctgcccaacatactaagatggcaaccagacgataagaaactaccagagccggagccccagcccctttccctgccatccctgcaaaatgcctcgtctttggatgccaccagctcttcaaaggactccaggtcccagctgataccctcagagtccgaccaagaagtcacgtctccatcccagtcctcaacagcttctgcagacccaagcatctggggggaccccaaaccctctcctctcacagagcccctaattcttcatctcaccccttcccacaaggcagctgaagattttacagcccaggaaaaccccactccctggctctccactgcacccactgagcccagccctccagaaagcccccaaattctggcccccacaaagcccaactttgatatagcctggacgtcccagccccttgatccttcctcagaccccagttctctggaggaccccagagcccggcctcccaaagccctgctggcagagcgcgctcacctccagccacgggaggaaccaggagccctgaattcccctgctacacccaccagcaactgtcaaaagtcccagcccagcaagccggcccagagtcgctgatcttaagaagtgctttgagggttaagaatcaggggtccaagagagaccccagtccctcaataaagccacaagagcccaaaaaagctggtttttttcctggtgaatttctctggtgccctcactctgctcggaaatccatcccacccacctctgtccctccaagggcagcctctctaactggctcctagcagggaattccaggaagcctcctggtcttctagaatcctggcaaccttacaattcctctcggcatttgtcacttccatctcagctaatgcacccaccagctcaaacacaccaataaagcttttgttactctcaaaaaaaaaaaaaaaaa

SEQ ID NO: 1660 - DNA, 598 bp, Homo sapiens
gagcccggaaggtccggcgcccagagctaacgggagtcccaggttaaacactttaagatgagaaaaattgatctctgtctgagctctgaagggtccgaagtgattttagctacatcaagtgatgaaaaacacccacctgaaaatatcattgatgggaatccagaaacgttttggaccaccacaggaatgtttccccaggaattcattatttgtttccacaaacatgtaaggattgaaaggcttgtaatccaaagttactttgtacagaccttgaagattgaaaaaacacgtctaaagagccagttgattttgagcaatggattgaaaaagatttggtacacacagaggggcagcttcaaaatgaagaaattgtggcacatgatggctccgctacttacttgagattcattattgtatcagcctttgatcattttgcatctgtgcatagcgtttctgcagaaggaacagtagtctcaaatctttcctcataatgataacaaaatgctcttgcatgattttttaacaatatatttaaacaggaagttgtcactgatatactttattaaaaggatttttatcaaaaaaaaaaaaaaaaaaa

SEQ ID NO: 1661 - DNA, 1908 bp, Homo sapiens
ctctgtctcattccctcgcgctctctcgggcaacatggcgggtgtggaggaggtagcggcctccgggagccacctgaatggcgacctggatccagacgacagggaagaaggagctgcctctacggctgaggaagcagccaagaaaaaaagacgaaagaagaagaagagcaaagggccttctgcagcaggggaacaggaacctgataaagaatcaggagcctcagtggatgaagtagcaagacagttggaaagatcagcattggaagataaagaaagagatgaagatgatgaagatggagatggcgatggagatggagcaactggaaagaagaagaaaaagaagaagaagaagagaggaccaaaagttcaaacagaccctccctcagttccaatatgtgacctgtatcctaatggtgtatttcccaaaggacaagaatgcgaatacccacccacacaagatgggcgaacagctgcttggagaactacaagtgaagaaaagaaagcattagatcaggcaagtgaagagatttggaatgattttcgagaagctgcagaagcacatcgacaagttagaaaatacgtaatgagctggatcaagcctgggatgacaatgatagaaatctgtgaaaagttggaagactgttcacgcaagttaataaaagagaatggattaaatgcaggcctggcatttcctactggatgttctctcaataattgtgctgcccattatactcccaatgccggtgacacaacagtattacagtatgatgacatctgtaaaatagactttggaacacatataagtggtaggattattgactgtgcttttactgtcacttttaatcccaaatatgatacgttattaaaagctgtaaaagatgctactaacactggaataaagtgtgctggaattgatgttcgtctgtgtgatgttggtgaggccatccaagaagttatggagtcctatgaagttgaaatagatgggaagacatatcaagtgaaaccaatccgtaatctaaatggacattcaattgggcaatatagaatacatgctggaaaaacagtgccgattgtgaaaggaggggaggcaacaagaatggaggaaggagaagtatatgcaattgaaacctttggtagtacaggaaaaggtgttgttcatgatgatatggaatgttcacattacatgaaaaattttgatgttggacatgtgccaataaggcttccaagaacaaaacacttgttaaatgtcatcaatgaaaactttggaacccttgccttctgccgcagatggctggatcgcttgggagaaagtaaatacttgatggctctgaagaatctgtgtgacttgggcattgtagatccatatccaccattatgtgacattaaaggatcatatacagcgcaatttgaacataccatcctgttgcgtccaacatgtaaagaagttgtcagcagaggagatgactattaaacttagtccaaagccacctcaacacctttattttctgagctttgttggaaaacatgataccagaattaatttgccacatgttgtctgttttaacagtggacccatgtaatacttttatccatgtttaaaaagaaggaatttggacaaaggcaaaccgtctaatgtaattaaccaacgaaaaagctttccggacttttaaatgctaactgtttttccccttcctgtctaggaaaatgctataaagctcaaattagttaggaatgacttatacgttttgttttgaatacctaagagatactttttggatatttatattgccatattcttacttgaatgctttgaatgactacatccagttctgcacctataccctctggtgttgctttttaaccttcctggaatccatttctaaaaaataaagacattttcagatctga

SEQ ID NO: 1662 - DNA, 1285 bp, Homo sapiens
tcccccatcccagcccgccccctcggccgctccgcgtccctggcgtgactcggcactgagagtcccgggagaagactcggcggtcgcacctcttctgtccaggcctcggccttcctgagcatctctccttcctctcccagatcgtcttctccttcagtttcaaagccagtggcgtcgcggccaccctgccgggctctctgtgaggatggtgggggtgaagcccgtcgggagcgacccggatttccagccagagctgagcggcgcgggctccagactcgccgtggtcaagttcaccatgagagggtgtgggccatgtttgaggattgccccagcattcagttctatgagtaataaatatccacaggctgttttcttggaagtcgatgtacatcagtgtcagggaacagctgccaccaacaatatatcagcaacacctacatttttgttttttcgaaacaaagtgagaattgatcaatatcaaggagcagatgctgtgggattagaagaaaaaatcaagcagcacttagaaaatgaccctggaagcaatgaggacacagatattccaaaaggctatatggatttaatgccttttattaacaaagctggttgtgaatgtcttaatgaaagtgatgagcatggatttgacaactgtttacgaaaagacacaaccttcttggaatctgactgtgatgaacagctgcttattactgtggcattcaatcaacctgttaagctttattccatgaaatttcaagggccagataatggtcagggccctaaatatgtaaaaatttttatcaacctaccccgatctatggattttgaagaggcagaaagaagtgaaccaactcaagctctggaactgacagaggatgatattaaagaagatggcattgttccacttcgttatgttaagtttcagaatgttaacagtgtaactatatttgttcagtcgaatcaaggtgaagaggaaacaacaagaatttcatattttacttttattggtactccagtccaggcaacaaatatgaatgacttcaaacgagtagttggcaaaaaaggagaaagccactaaggtacaaaagacactggacaaccatattgcaatcagatctacagctcctggataattgcttgattctcgccagagactgtcaatgtttcattcattgccattaccaataaatcattgcttttgttcagatggtatcactagtgtttccattgtaatcttgacacatgcaattgtaaataaaagtcaccacttttgccaagcttaaaaaaa

SEQ ID NO: 1663 - DNA, 2937 bp, Homo sapiens
gctggaagcaacagatggggactgcagaggaggtggtggtattgggatagtgctgcagccaagaacttaacgactgaaagtaactgggatatcttcataattatctgaaggtcacagtgggagaacaaaattaaaagaactgagaagacttacaagagaacctcctaagagtcacccaaacaatcggctgagaatgagaagaggttcaagtgattcttgtgcctcaggctcccaagtagctgggactacagtagctgggccagcacacccagaaagcctcacattgtgcagtggagaagctgagagaagaggaaaagaggagtggccagactcccaccactacccaggaccaactcctgctcctgaatcttctgatgggccccacaaggtgacagtgctggctacaatgctatccagccggtggtggccaagttcctgggggatcctagggctgggcccccgaagccctcctcggggatcccagctctgtgccctctatgcctttacttatactggggcagatggccagcaggtgtctctggctgaaggggataggttcctactgcttcgaaagaccaactccgactggtggttggcaagacgcctagaagctccctccacctctcgacccatcttcgtcccagcagcctatatgatagaggaatccatcccttcccagagtccaactaccgtcatccccggccaattgctctggactcctgggccgaagttgtttcatggttccctggaggagttgtctcaggccctcccaagcagggctcaggctagctcggagcagcctcctccacttccccgcaaaatgtgtaggagcgtcagcactgacaatctgagccccagctttctgaagcctttccaggaaggaccaagcggaagatccctctcccaggaagacttgccgtcagaagccagtgccagcacagcaggcccccagcccctcatgtcagagccccctgtgtactgtaacctggtggaccttcgccgctgtcctcggtccccacccccaggccctgcatgccccctgctgcagaggctggatgcctgggagcagcacctggaccccaactctggacgctgcttctacataaattcactgactggctgcaagtcctggaagcccccgcgccgcagtcgcagcgagacgaaccctggctccatggaggggacacagaccctgaagaggaacaatgatgtcctgcaacctcaggcaaagggcttcagatctgacacagggaccccagaaccgcttgacccacagggttcactcagcctcagccaacgcacctcgcagcttgaccctccagccttgcaggcccctcgacctctgccgcagctcctggacgacccccatgaggtggaaaagtcgggtctgctcaacatgaccaagattgcccaaggggggcgcaagctcaggaagaactggggcccgtcttgggtggtgttaacgggtaacagcctggtgttctaccgagagccaccgccgacagcgccctcctcaggctggggaccagcgggtagccggcccgaaagtagcgtggacctgcgcggggcggccctggcgcacggccgccacctgtccagccgccgcaacgtcctgcacatccgcacgatccctggccacgagttcctgctgcagtcggaccacgagacagagctgcgagcctggcaccgcgcgctgcggactgtcatcgagcggctggttagatgggtggaggcccggagggaggctccgaccggccgggaccaagggagtggggatcgggagaaccccctggagctgcgtctgtcgggctctggacccgcggagctgagcgccggggaggacgaagaagaggagtcggagctggtgtccaagccgctgctgcgcctcagcagccgccggagctccattcgggggcccgaaggcaccgagcagaaccgcgtgcgcaacaaactaaagcggctcatcgcgaagagaccgcccttacaaagcctgcaggagcggggtctgctccgagaccaggtgttcggctgccagttggaatcactctgccagcgggaaggagacacggtgcccagctttttgcggctctgcattgctgctgtggataaaagaggtctagatgtggatggcatttatcgggtgagcgggaacttggcagtggtccagaagcttcgctttctggtggacagagagcgtgcggtcacctccgatgggaggtatgtgttcccagaacagccaggacaagaaggtcggttagatttggacagtactgagtgggatgacattcatgtggtcaccggagccctgaagctttttctccgggagctgccccagcctctggtgccaccactgctgctgccccatttccgtgctgcccttgcactctccgaatcagagcagtgcctctctcagatacaagaattaataggctcaatgccaaagcccaaccatgacactctacggtacctcctggagcatttatgcagggtgatagcacactcagataagaatcgcatgacaccccacaacctgggaattgtgtttggaccaaccctgtttcggccagagcaggagacatctgacccagcagcccatgctctctacccagggcagctggtccagctgatgctcaccaacttcaccagcctcttcccctgatgcagggaaggaagaagagaaaacatatttccggtcatctctggtggtgagaggctggtgttctgttttgaggatatccctttaaatctcccaaatgactgtctctatcttcatgagtgtgacttgaggtgttgggatgggtgagggagcttctctaaagaggaaagtgagtggattaacccctgcttctcttcttgttccctgttatcattcctccccaacataataatacataaagtggcatggtatttttaaaaaaaaaaaaaaaaaaaaaaaaa

SEQ ID NO: 1664 - DNA, 2994 bp, Homo sapiens
ggagctttcgctgttcggggcccggcctgctccgggccctcccagcgtcgccgctagctgacttagggctcccgcccacactgcgcacggccttgctgagggccggctcgtagtgggaggcttcgcgttcacctgaacatttccgcctcctctggatgggggatgagaggcggggctgatgcatcgcagcagtcctggaccctgacttcggacttggagaagaaacgccgaggaggaacgggagttagggggttagcagcttggcgcgctgggagccggccacccctggtctccggacttcacttcccaggaggcctcgcgcgcgactggaagtgctgcgagcctataagaaggcgaggcggcacccgccgctctgctctggggcggcattgccagccggctgtaggcattcagggcagtgtcttctgcatctcctaggaacctcgggagcggcagctccggcgcctggtagcgagaggcgggttccggagatcccggcctcacttcgtcccactgtggttaggggtgagtcctgcaaatgttaagtgatttgctcaaggtgcccatttcgcaggaattggagcccaggccagttctctgagcctatcattagggctaaaggagtgcgtgatcagaatggtgtctggacggttctacttgtcctgcctgctgctggggtccctgggctctatgtgcatcctcttcactatctactggatgcagtactggcgtggtggctttgcctggaatggcagcatctacatgttcaactggcacccagtgcttatggttgctggcatggtggtattctatggaggtgcgtcactggtgtaccgcctgccccagtcgtgggtggggcccaaactgccctggaaactcctccatgcagcgctgcacctgatggccttcgtcctcactgttgtggggctggttgctgtctttacgtttcacaaccatggaaggactgccaacctctactcccttcacagctggctgggcaccaccactgtcttcctcttcgcctgccagtggttcctgggctttgctgtcttcctcctgccctgggcgtccatgtggctgcgcagcctcctaaaacctatccacgtcttttttggagccgccatcctctctctgtccatcgcatccgtcatttcgggcattaatgagaagcttttcttcagtttgaaaaacaccaccaggccataccacagcctgcccagtgaggcggtctttgccaacagcaccgggatgctggtggtggcctttgggctgctggtgctctacatccttctggcttcatcttggaagcgcccagagccggggatcctgaccgacagacagcccctgctgcatgatggggagtgaagcagcaggaaggggctcccaagagctcctggtggtgcagcctgtgctcccctcagaagctctgctcttcccagggctcccggctggtttcagcaggcgactttcttccaatgctgggcccagacttcttgcctgggtgctggcctgccctctccggccgcttgctgcctgtctgctttccttggtggctttgcctgggtgctgggcctgccctctccggccgcttgctgcctgtctgctttccttggtggctttgcctgggtgctgggcctgccttctctggctgcttgctgcctgtctgctttccttggtggctttggcttctgcactccttggcgtcagcctctcaggtcctccattcacacgaggtcctcctcgctctggccgctcttgctgctcctgtctgaagaaatcagactgatttcctcttaagactcctagggatgtggtgaagagctgggactcaagtgcagtccacggtgtgaaacatgagggaggtgaggtgtccgtccacttcccccataaaggtgtgcatttcagttaggctgccccgccacagagcaggcttcatctgctctgccatccagccccatctggatgtgaggtggggtggagacatcatggggtgattgcagaaagggggagtggcggcccacgcagcttctgctgaggagctgaccgctctgagctgttctgtttcgtattgctgctctgtgtctgcatgtattgtgaccgtgcggctccacctcttccagctgctgctacagctgaggcctggatcccggcctttccctgtgacttacgtgtctgtcaccggcaggcagccctacaaatcctggtgacctgctctcccaagaacagagcctgtccccagatgtcccagtagcgatgagtaacagaggtggctgtggacttcctctacttctccttgctggatcagggccttcctgcctcccgctgggcaggtctggccttgctctcttggcagggccccagcccctctgaccactctgcagctcaccatgcagctgatgccaaagttgtggtgtccagtgtgcagcagccctgggagccactgccaccttcagaggggttccttgctgagacccacattgcttcacctggccccaccatggctgcttgcctggcccaacctagcgttctgtgccatgctagagcttgagctgttgctcttcttcaggggaggaaatagggtggagagcgggaagggtcttgctcctaagtgttgctgctgtggcttttttgccttctccaaagacgcactgccaggtcccaagcttcagactgctgtgcttagtaagcaagtgagaagcctggggtttggagcccacctactctctggcagcatcagcatcctactcctggcaacatcaggccaacgtccaccccagcctcacattgccagatgttggcagaagggctaatattgaccgtcttgactggctggagccttcaaagccactgggatgtcctccaggcacctgggtcccatgaccagctccccgtctccataggggtaggcatttcactggtttatgaagctcgagtttcattaaatatgttaagaatcaaaaaaaaaaaaaaaaaaaaaaaaaaaaaaaaaaaaaa

SEQ ID NO: 1665 - DNA, 2457 bp, Homo sapiens
ggagcgcgtgaggctccggcgcgcaagcccggagcagcccgctggggcgcacagggtcgcgcgggcgcggggatggaggacggcgtggccggtccccagctcggggccgcggcggaggcggcggaggcggccgaggcgcgagcgcggcccggggtgacgctgcggcccttcgcgcccctctcgggggcggccgaggcggacgagggcggcggcgactggagcttcattgactgcgagatggaggaggtggacctgcaggacctgcccagcgccaccatcgcctgtcacctggacccgcgcgtgttcgtggacggcctgtgccgggccaaatttgagtccctctttaggacgtatgacaaggacatcacctttcagtattttaagagcttcaaacgagtcagaataaacttcagcaaccccttctccgcagcagatgccaggctccagctgcataagactgagtttctgggaaaggaaatgaagttatattttgctcagaccttacacataggaagctcacacctggctccgccaaatccagacaagcagtttctgatctcccctcccgcctctccgccagtgggatggaaacaagtggaagatgcgaccccagtcataaactatgatctcttatatgccatctccaagctggggccaggggaaaagtatgaattgcacgcagcgactgacaccactcccagcgtggtggtccatgtatgtgagagtgatcaagagaaggaggaagaagaggaaatggaaagaatgaggagacctaagccaaaaattatccagaccaggaggccggagtacacgccgatccacctcagctgaactggcacgcgacgaggacgcattccaaatcatactcacgggaggaatcttttactgtggaggtggctggtcacgacttcttcggaggtggcagccgagatcggggtggcagaaatcccagttcatgttgctcagaagagaatcaaggccgtgtccccttgttctaatgctgcacaccagttactgttcatggcacccgggaatgacttgggccaatcactgagtttgtggtgatcgcacaaggacatttgggactgtcttgagaaaacagataatgatagtgttttgtacttgttcttttctggtaggttctgtctgtgccaagggcaggttgatcagtgagctcaggagagagcttcctgtttctaagtggcctgcaggggccactctctactggtaggaagaggtaccacaggaagccgcctagtgcagagaggttgtgaaaacagcagcaatgcaatgtggaaattgtagcgtttcctttcttccctcatgttctcatgtttgtgcatgtatattactgatttacaagactaacctttgttcgtatataaagttacaccgttgttgttttacatcttttgggaagccaggaaagcgtttggaaaacgtatcacctttcccagattctcggattctcgactctttgcaacagcacttgcttgcggaactcttcctggaatgcattcactcagcatccccaaccgtgcaacgtgtaacttgtgcttttgcaaaagaagttgatctgaaattcctctgtagaatttagcttatacaattcagagaatagcagtttcactgccaacttttagtgggtgagaaattttagtttaggtgtttgggatcggacctcagtttctgttgtttcttttatgtggtggtttctatacatgaatcatagccaaaaacttttttggaaactgttggttgagatagttggttcttttaccccacgaagacatcaagatacacttgtaaataaagctgatagcatatattcatacctgttgtacacttgggtgaaaagtatggcagtgggagactaagatgtattaacctacctgtgaatcatatgttgtaggaaaagctgttcccatgtctaacaggacttgaattcaaagcatgtcaagtggatagtagatctgtggcgatatgagagggatgcagtgcctttccccattcattcctgatggaattgttatactaggttaacatttgtaatttttttctagttgtaatgtgtatgtctggtaaataggtattatattttggccttacaataccgtaacaatgtttgtcattttgaaatacttaatgccaagtaacaatgcatgctttggaaatttggaagatggttttattctttgagaagcaaatatgtttgcattaaatgctttgattgttcatatcaagaaattgattgaacgttctcaaaccctgtttacggtacttggtaagagggagccggtttgggagagaccattgcatcgctgtccaagtgtttcttgttaagtgcttttaaactggagaggctaacctcaaaatattttttttaactgcattctataataaatgggcacagtatgctccttacagaaaaaaaaaaaaaaaaaaaaaaaaaaaaaa

SEQ ID NO: 1666 - DNA, 2302 bp, Homo sapiens
ccccctgcgctctcgccatcgccccgcatttactcgctggaggagggggtcacctcattcctagggaggaggaaacagacattgagcggcgacgtgactcagtgttcataaataggacgacgtccctgcattcccaatctgcactattggaagaaaagccaatgtttgggccaaatttgagtccctctttaggacgtatgacaaggacatcacctttcagtattttaagagcttcaaacgagtcagaataaacttcagcaaccccttctccgcagcagatgccaggctccagctgcataagactgagtttctgggaaaggaaatgaagttatattttgctcagaccttacacataggaagctcacacctggctccgccaaatccagacaagcagtttctgatctcccctcccgcctctccgccagtgggatggaaacaagtggaagatgcgaccccagtcataaactatgatctcttatatgccatctccaagctggggccaggggaaaagtatgaattgcacgcagcgactgacaccactcccagcgtggtggtccatgtatgtgagagtgatcaagagaaggaggaagaagaggaaatggaaagaatgaggagacctaagccaaaaattatccagaccaggaggccggagtacacgccgatccacctcagctgaactggcacgcgacgaggacgcattccaaatcatactcacgggaggaatcttttactgtggaggtggctggtcacgacttcttcggaggtggcagccgagatcggggtggcagaaatcccagttcatgttgctcagaagagaatcaaggccgtgtccccttgttctaatgctgcacaccagttactgttcatggcacccgggaatgacttgggccaatcactgagtttgtggtgatcgcacaaggacatttgggactgtcttgagaaaacagataatgatagtgttttgtacttgttcttttctggtaggttctgtctgtgccaagggcaggttgatcagtgagctcaggagagagcttcctgtttctaagtggcctgcaggggccactctctactggtaggaagaggtaccacaggaagccgcctagtgcagagaggttgtgaaaacagcagcaatgcaatgtggaaattgtagcgtttcctttcttccctcatgttctcatgtttgtgcatgtatattactgatttacaagactaacctttgttcgtatataaagttacaccgttgttgttttacatcttttgggaagccaggaaagcgtttggaaaacgtatcacctttcccagattctcggattctcgactctttgcaacagcacttgcttgcggaactcttcctggaatgcattcactcagcatccccaaccgtgcaacgtgtaacttgtgcttttgcaaaagaagttgatctgaaattcctctgtagaatttagcttatacaattcagagaatagcagtttcactgccaacttttagtgggtgagaaattttagtttaggtgtttgggatcggacctcagtttctgttgtttcttttatgtggtggtttctatacatgaatcatagccaaaaacttttttggaaactgttggttgagatagttggttcttttaccccacgaagacatcaagatacacttgtaaataaagctgatagcatatattcatacctgttgtacacttgggtgaaaagtatggcagtgggagactaagatgtattaacctacctgtgaatcatatgttgtaggaaaagctgttcccatgtctaacaggacttgaattcaaagcatgtcaagtggatagtagatctgtggcgatatgagagggatgcagtgcctttccccattcattcctgatggaattgttatactaggttaacatttgtaatttttttctagttgtaatgtgtatgtctggtaaataggtattatattttggccttacaataccgtaacaatgtttgtcattttgaaatacttaatgccaagtaacaatgcatgctttggaaatttggaagatggttttattctttgagaagcaaatatgtttgcattaaatgctttgattgttcatatcaagaaattgattgaacgttctcaaaccctgtttacggtacttggtaagagggagccggtttgggagagaccattgcatcgctgtccaagtgtttcttgttaagtgcttttaaactggagaggctaacctcaaaatattttttttaactgcattctataataaatgggcacagtatgctccttacagaaaaaaaaaaaaaaaaaaaaaaaaaaaaaa

SEQ ID NO: 1667 - DNA, 2434 bp, Homo sapiens
tgtctgcctgcaagcatgcaggacttgactcaggaatttgctgtccaaacaggatgctgtggaagctgcactttttttttccccagggagtgggggctggcccttactgctttataagcaccagctcaagaaggaacctacagcctcttggaaaggaatctcactaggggcttgactgcgtgggtctgtagcgctttcactgtaagaaagcaagatgcattttagaaactttaactacagttttagctccctgattgcctgtgtggcaaacagtgatatcttcagcgaaagtgaaaccagggccaaatttgagtccctctttaggacgtatgacaaggacatcacctttcagtattttaagagcttcaaacgagtcagaataaacttcagcaaccccttctccgcagcagatgccaggctccagctgcataagactgagtttctgggaaaggaaatgaagttatattttgctcagaccttacacataggaagctcacacctggctccgccaaatccagacaagcagtttctgatctcccctcccgcctctccgccagtgggatggaaacaagtggaagatgcgaccccagtcataaactatgatctcttatatgccatctccaagctggggccaggggaaaagtatgaattgcacgcagcgactgacaccactcccagcgtggtggtccatgtatgtgagagtgatcaagagaaggaggaagaagaggaaatggaaagaatgaggagacctaagccaaaaattatccagaccaggaggccggagtacacgccgatccacctcagctgaactggcacgcgacgaggacgcattccaaatcatactcacgggaggaatcttttactgtggaggtggctggtcacgacttcttcggaggtggcagccgagatcggggtggcagaaatcccagttcatgttgctcagaagagaatcaaggccgtgtccccttgttctaatgctgcacaccagttactgttcatggcacccgggaatgacttgggccaatcactgagtttgtggtgatcgcacaaggacatttgggactgtcttgagaaaacagataatgatagtgttttgtacttgttcttttctggtaggttctgtctgtgccaagggcaggttgatcagtgagctcaggagagagcttcctgtttctaagtggcctgcaggggccactctctactggtaggaagaggtaccacaggaagccgcctagtgcagagaggttgtgaaaacagcagcaatgcaatgtggaaattgtagcgtttcctttcttccctcatgttctcatgtttgtgcatgtatattactgatttacaagactaacctttgttcgtatataaagttacaccgttgttgttttacatcttttgggaagccaggaaagcgtttggaaaacgtatcacctttcccagattctcggattctcgactctttgcaacagcacttgcttgcggaactcttcctggaatgcattcactcagcatccccaaccgtgcaacgtgtaacttgtgcttttgcaaaagaagttgatctgaaattcctctgtagaatttagcttatacaattcagagaatagcagtttcactgccaacttttagtgggtgagaaattttagtttaggtgtttgggatcggacctcagtttctgttgtttcttttatgtggtggtttctatacatgaatcatagccaaaaacttttttggaaactgttggttgagatagttggttcttttaccccacgaagacatcaagatacacttgtaaataaagctgatagcatatattcatacctgttgtacacttgggtgaaaagtatggcagtgggagactaagatgtattaacctacctgtgaatcatatgttgtaggaaaagctgttcccatgtctaacaggacttgaattcaaagcatgtcaagtggatagtagatctgtggcgatatgagagggatgcagtgcctttccccattcattcctgatggaattgttatactaggttaacatttgtaatttttttctagttgtaatgtgtatgtctggtaaataggtattatattttggccttacaataccgtaacaatgtttgtcattttgaaatacttaatgccaagtaacaatgcatgctttggaaatttggaagatggttttattctttgagaagcaaatatgtttgcattaaatgctttgattgttcatatcaagaaattgattgaacgttctcaaaccctgtttacggtacttggtaagagggagccggtttgggagagaccattgcatcgctgtccaagtgtttcttgttaagtgcttttaaactggagaggctaacctcaaaatattttttttaactgcattctataataaatgggcacagtatgctccttacagaaaaaaaaaaaaaaaaaaaaaaaaaaaaaa

SEQ ID NO: 1668 - DNA, 3882 bp, Homo sapiens
tgaagaccagcgctgccgccgcctccttttcctcatcctgcgaacgggactgagagggggcccgccacctctccgcctctgcctcggccgcccgcctcgccgcttcgggcgcagcctcttcctgcccgggcctcggactccgccgctcgtcgcctccccccggccaccaggcccggctggtttcccagccccgctccgccgcggcgcgaggtctatgtgaccggcgggcccggagcagccgccgccgcagcgcgaacatggacgccgtcaacgccttcaaccaggagctcttttcgcttatggatatgaaacctcccatctctagagccaagatgattctcatcactaaagctgctattaaagctattaagctttataagcatgtagttcaaatagtagaaaagttcatcaaaaagtgtaaaccagaatacaaggttccgggattatatgtaattgactcaattgtgcgacagtctcgtcatcagtttggaactgataaagatgtttttgggccaagattctctaaaaacataactgccacattccaatatttatatctttgtccatctgaagataagagtaaaatagttcgtgtgctgaacctttggcaaaaaaatggagtgttcaaaattgaaattattcaacctcttttggacatggcagcgggaaccagtaatgcagccccagtagcagaaaatgttaccaataatgaaggctcacctccacctccagtaaaagtttcttctgaacctcccacacaagccactccaaactccgtcccagctgtaccacagttgcccagctctgatgcttttgctgctgtggctcagctgtttcagacaactcaaggccaacagcttcagcagatccttcagacttttcaacagcctccaaaaccacagtctcctgcccttgacaatgctgtgatggctcaggttcaggctatcacagctcagttaaagacaactcctacacaaccatctgaacaaaaagctgctttccccccacctgaacagaaaactgcatttgacaagaagttgcttgatagatttgactatgatgatgagccagaagctgtggaagaatcaaagaaagaggataccactgccgtcaccacgacagcacctgctgccgcagtaccccctgcacccaccgccaccgtgcctgctgctgctgcacccgctgctgcctctcctcctcctccacaggcaccatttggctttcctggagatggcatgcagcagccagcatacacacagcatcaaaatatggatcagtttcagccacgaatgatgggaatacaacaggatccaatgcaccatcaggttccacttcctcctaatggacaaatgccaggatttggacttcttcctacacctccatttcctcccatggctcagcctgtgattcctccaactccaccagtgcagcagcctttccaagcttcttttcaggcacaaaatgaaccacttacacagaagccgcatcagcaggaaatggaagtagaacaaccttgtattcaagaggttaagcgacatatgtctgataacagaaagtcaagatctaggtcagcatccaggtcaccaaaaaggaggcgatctagatctggttctagatctcgaaggtctcggcatcgacgttctcgatctcggtccagggatagacgccgacattctccccgatctcgatctcaagaaagacgggatcgagaaaaagagagagaacgtcgacaaaaaggcctccctcaagtgaaaccggaaactgcaagtgtttgcagtactaccctctgggtggggcagctggacaaaagaactactcagcaggatgttgccagtctcttggaagagtttggtccaattgaatcaattaatatgattcctcccaggggttgtgcctatattgttatggttcataggcaagatgcctatcgtgccctgcagaaactgagccgaggaaactataaagtgaaccagaaatccataaagattgcctgggccttaaacaaaggaataaaggcagattataagcagtattgggatgtagaacttggtgttacttatattccatgggacaaagtcaagcctgaggaactggagagtttttgtgaaggaggaatgttggacagtgacacacttaacccagattggaaaggaattcctaagaagcctgaaaatgaagttgctcaaaatggaggtgctgaaacctcacacacagaaccagtatcacccatacctaaaccattacctgtgcctgtccctcctattcctgttcctgcacctataacagtgccacctccacaggtcccaccacatcaaccgggtccacctgtagttggtgctctccagccgcctgctttcacgcctcctctgggaataccgcctccaggctttggtcctggtgttcctcctccccctcctcctccaccatttttgcgcccaggattcaacccaatgcatttaccaccaggttttctgcctcctggacccccacctcctataactccaccagtatccattcctcctcctcacactccaccaataagcatcccaaactctactatcgctggtataaatgaagacactacaaaagacttatctattggaaatcccattccaacagtggtgtctggggctagaggaaacgccgagtctggtgacagcgtgaaaatgtatggctctgccgtgccacctgctgcacccacgaatctgcccacccctcctgtaacccagcctgtttcacttcttggcactcaaggagttgcccctggtcctgtaattggacttcaggcaccatctactggtcttcttggcgcccggcccggtctcatcccactccagcgccctccaggaatgcccccacctcacttacagcggttccctttgatgccgccccgtcccatgccaccgcacatgatgcacagaggcccaccgccaggaccagggggctttgcgatgcctccacctcatggaatgaaaggtcccttcccaccgcatggcccctttgttaggcctggtggaatgccagggctcgggggcccagggccaggcccagggggtcctgaagacagagacggaaggcaacagccgccgcagcagccacagcagcagccacagccgcaggcgccccagcaaccacagcagcagcagcagcagcagccaccaccatcacaacagcctccaccaacacagcagcagccacagcagtttagaaatgataacaggcagcagttcaattcaggtagagaccaagaaaggtttggaagaagatcttttggaaatagggtggaaaatgaccgggaacggtatgggaaccgtaatgatgatagagataatagtaaccgtgacaggagagagtggggaaggaggagccctgaccgggacaggcacagagacttggaagagagaaatagacgctctagtgggcatcgagacagagagagagattctagagatagagagtctcgtagagagaaggaagaagcccgaggaaaggaaaagcctgaggtgacagacagggcaggtggtaacaaaaccgttgaacctcccattagccaagtgggaaatgtagacactgcttcagaacttgagaagggggtgtctgaggctgcagtcctaaagccttctgaagagttacctgctgaggctacctcatccgttgaacccgaaaaggattctggctcagcagcagaggctcctcgttagagactggaatttgtgaaaatgtgacagtgacacttcctggagtgtagagcttgaggtgtacagatgctgtattatatccgctcccgctgtactgcagccccgcgccagctggtggggaactgtaagcaatttgattgcttcccttctatttaaaaatagccacaaaaaaaaaaaaaaaaaa

SEQ ID NO: 1669 - DNA, 2227 bp, Homo sapiens
gtgcgccggggtggggggcaacggtcagccgtcaccctgagacgggcggcggcgggatggcaacagcctccggggcctcggacttgtctggctccggagcgcccccgcccggtgtgggagctcaggcggcggcggccgctgaggaggaggagcgagaggtggtgcgggtccgagtcaagaaatgtgagagcttcttgccgccagagttccgctcttttgctgtagatccccagatcacctcgctcgacgtgttgcagcacatcctcatccgagcctttgatttgagtgggcccattgctagaagactgggacataatcagccccaaagatgtcattggctccgacgtgttgctggctgagaaacggtcatcactgacgactgccgccctgccctttacacagtccatcctcactcaggtgggccgtaccttgtctaaggtccaacaagtgctgagctggtcgtatggggaagatgtcaagcccttcaagccacccctgagcgatgctgagtttcacacgtacctgaaccacgagggccagctctcccgacccgaggagttgcgcctgcggatctatcatggcggtgtggagccctcgctgcgaaaggtggtgtggcggtacctgctgaacgtgtatccagatggactgacaggccgagagcggatggactacatgaaacgcaagagccgcgagtatgagcagctcaagagcgagtgggcccagcgagcgaaccctgaggacctggaattcatccgcagcacggtcctcaaggatgtactgcgcactgaccgggcccacccctactatgcggggcctgaggatggcccacatctacgggcgctgcacgacctgctcaccacctatgccgttacccacccacaggtgtcctactgccagggcatgagtgaccttgcctcacccatcctcgctgtcatggaccatgagggccatgcctttgtttgcttttgtggcatcatgaaacgcctggccgccaacttccaccctgacggccgcgccatggccaccaagtttgcacacttgaagctgttgctgcgacacgctgaccctgacttttatcaatacctgcaagaggcaggcgctgatgacctcttcttctgttaccgctggctgctgctggaactcaagcgtgagttcgccttcgacgatgccctccgcatgcttgaggtcacttggagttcgctgccccctgatcctcctgaacatgaggtagagctggttggaccccccagccaagtggcagacgctggttttggtggccacagggggtggcccgtgcgacagaggcacatgctgaggcctgctggtggaggaggtagtacctttgaagatgctgttgaccacctggccacagccagtcaggggcctggtggtggggggcgtctcctgagacaggccagcttggatggcctccagcaactcagggataacatgggctccaggagggaccctctggtccagctgccccacccagctgcccttatcagctccaagtccctctctgagcctttattgaactccccagacccactgctctcctccttttcccaccctgattccccatcttcctcatctccaccatccacccaggaggcctctcccactggtgatatggctgtaggatcccccttgatgcaagaggtaggctccccgaaagaccctggaaagtccctgccacctgtaccaccaatgggcctgcccccaccccaggagtttggccgggggaacccattcatgctgttcctctgcctggccatcctgctggagcaccgcgaccacatcatgcgcaatgggctggattataatgagctggccatgcactttgaccgccttgtgcgaaaacaccacctggggcgcgtcctgcgccgggctagggctctctttgctgattacctgcagtcagaggtgtgggactcagaggagggggctgaggccacagccgcatcttgatcaggctttctcaagccctccatcggccccaccagatctccattctttgccatgagggccaacacatgagaccccacctccctccctgcctgccagccctagacttgttggagcatagagcccttcctccccaggcctaagtatgtggagctctgctttggcactgccccgcagaggccacgcctatttattctgtttctgttgttttgtttttaacaactatactttgcacacatgaaggtcactgtggtttgtgtgt

SEQ ID NO: 1670 - DNA, 2359 bp, Homo sapiens
gtcagccgtcaccctgagacgggcggcggcgggatggcaacagcctccggggcctcggacttgtctggctccggagcgcccccgcccggtgtgggagctcaggcggcggcggccgctgaggaggaggagcgagaggtggtgcgggtccgagtcaagaaatgtgagagcttcttgccgccagagttccgctcttttgctgtagatccccagatcacctcgctcgacgtgttgcagcacatcctcatccgagcctttgatttgagtgggaagaagaactttggcatcagctacctgggccgggaccggctaggacaggaagtttacctctcacttctatctgactgggacctcagcacagcctttgccactgcctccaaaccttacctgcaattgcgtgtagatattcggccctcggaggacagcccattgctagaagactgggacataatcagccccaaagatgtcattggctccgacgtgttgctggctgagaaacggtcatcactgacgactgccgccctgccctttacacagtccatcctcactcaggtgggccgtaccttgtctaaggtccaacaagtgctgagctggtcgtatggggaagatgtcaagcccttcaagccacccctgagcgatgctgagtttcacacgtacctgaaccacgagggccagctctcccgacccgaggagttgcgcctgcggatctatcatggcggtgtggagccctcgctgcgaaaggtggtgtggcggtacctgctgaacgtgtatccagatggactgacaggccgagagcggatggactacatgaaacgcaagagccgcgagtatgagcagctcaagagcgagtgggcccagcgagcgaaccctgaggacctggaattcatccgcagcacggtcctcaaggatgtactgcgcactgaccgggcccacccctactatgcggggcctgaggatggcccacatctacgggcgctgcacgacctgctcaccacctatgccgttacccacccacaggtgtcctactgccagggcatgagtgaccttgcctcacccatcctcgctgtcatggaccatgagggccatgcctttgtttgcttttgtggcatcatgaaacgcctggccgccaacttccaccctgacggccgcgccatggccaccaagtttgcacacttgaagctgttgctgcgacacgctgaccctgacttttatcaatacctgcaagaggcaggcgctgatgacctcttcttctgttaccgctggctgctgctggaactcaagcgtgagttcgccttcgacgatgccctccgcatgcttgaggtcacttggagttcgctgccccctgatcctcctgaacatgaggtagagctggttggaccccccagccaagtggcagacgctggttttggtggccacagggggtggcccgtgcgacagaggcacatgctgaggcctgctggtggaggaggtagtacctttgaagatgctgttgaccacctggccacagccagtcaggggcctggtggtggggggcgtctcctgagacaggccagcttggatggcctccagcaactcagggataacatgggctccaggagggaccctctggtccagctgccccacccagctgcccttatcagctccaagtccctctctgagcctttattgaactccccagacccactgctctcctccttttcccaccctgattccccatcttcctcatctccaccatccacccaggaggcctctcccactggtgatatggctgtaggatcccccttgatgcaagaggtaggctccccgaaagaccctggaaagtccctgccacctgtaccaccaatgggcctgcccccaccccaggagtttggccgggggaacccattcatgctgttcctctgcctggccatcctgctggagcaccgcgaccacatcatgcgcaatgggctggattataatgagctggccatgcactttgaccgccttgtgcgaaaacaccacctggggcgcgtcctgcgccgggctagggctctctttgctgattacctgcagtcagaggtgtgggactcagaggagggggctgaggccacagccgcatcttgatcaggctttctcaagccctccatcggccccaccagatctccattctttgccatgagggccaacacatgagaccccacctccctccctgcctgccagccctagacttgttggagcatagagcccttcctccccaggcctaagtatgtggagctctgctttggcactgccccgcagaggccacgcctatttattctgtttctgttgttttgtttttaacaactatactttgcacacatgaaggtcactgtggtttgtgtgt

SEQ ID NO: 1671 - DNA, 3083 bp, Homo sapiens
atgttgtttttcctgtacctaagttcccgctgtaggtggtacctttgcagacggtgcgatgggggaagcagagaagtttcactacatctatagttgtgacctggatatcaacgtccagcttaagataggaagcttggaagggaagagagaacaaaagagttataaagctgtcctggaagacccaatgttgaagttctcaggactatatcaagagacatgctctgatctttatgttacttgtcaagtttttgcagaagggaagcctttggccttgccagtgagaacatcctacaaagcatttagtacaagatggaactggaatgaatggctgaaactaccagtaaaataccctgacctgcccaggaatgcccaagtggccctcaccatatgggatgtgtatggtcccggaaaagcagtgcctgtaggaggaacaacggtttcgctctttggaaaatacggcatgtttcgccaagggatgcatgacttgaaagtctggcctaatgtagaagcagatggatcagaacccacaaaaactcctggcagaacaagtagcactctctcagaagatcagatgagccgtcttgccaagctcaccaaagctcatcgacaaggacacatggtgaaagtagattggctggatagattgacatttagagaaatagaaatgataaatgagagtgaaaaacgaagttctaatttcatgtacctgatggttgaatttcgatgtgtcaagtgtgatgataaggaatatggtattgtttattatgaaaaggacggtgatgaatcatctccaattttaacaagttttgaattagtgaaagttcctgacccccagatgtctatggagaatttagttgagagcaaacaccacaagcttgcccggagtttaagaagtggaccttctgaccacgatctgaaacccaatgctgccacgagagatcagttaaatattattgtgagttatccaccaaccaagcaacttacatatgaagaacaagatcttgtttggaagtttagatattatcttacgaatcaagaaaaagccttgacaaaattcttgaaatgtgttaattgggatctacctcaagaggccaaacaggccttggaacttctgggaaaatggaagccgatggatgtagaggactccttggagctgttatcctctcattacaccaacccaactgtgaggcgttatgctgttgcccggttgcgacaggccgatgatgaggatttgttgatgtacctattacaattggtccaggctctcaaatatgaaaattttgatgatataaagaatggattggaacctaccaagaaggatagtcagagttcagtgtcagaaaatgtgtcaaattctggaataaattctgcagaaatagatagctcccaaattataaccagcccccttccttcagtctcttcacctcctcctgcatcaaaaacaaaagaagttccagatggcgaaaatctggaacaagatctctgtaccttcttgatatcgagagcctgcaaaaactcaacactggctaattatttatactggtatgtgatagtggaatgtgaagatcaagatactcagcagagagatccaaagacccatgagatgtacttgaacgtaatgagaagattcagccaagcattgttgaagggtgataagtctgtcagagttatgcgttctttgctggctgcacaacagacatttgtagatcggttggtgcatctaatgaaggcagtacaacgcgaaagtggaaatcgtaagaaaaagaatgagagactacaggcattgcttggagataatgaaaagatgaatttgtcagatgtggaacttatcccgttgcctttagaaccccaagtgaaaattagaggaataattccggaaacagctacactgtttaaaagtgcccttatgcctgcacagttgttttttaagacggaagatggaggcaaatatccagttatatttaagcatggagatgatttacgtcaagatcaacttattcttcaaatcatttcactcatggacaagctgttacggaaagaaaatctggacttgaaattgacaccttataaggtgttagccaccagtacaaaacatggcttcatgcagtttatccagtcagttcctgtggctgaagttcttgatacagagggaagcattcagaacttttttagaaaatatgcaccaagtgagaatgggccaaatgggattagtgctgaggtcatggacacttacgttaaaagctgtgctggatattgcgtgatcacctatatacttggagttggagacaggcacctggataaccttttgctaacaaaaacaggcaaactcttccacatagactttggatatattttgggtcgggatccaaagcctcttcctccaccaatgaagctgaataaagaaatggtagaaggaatggggggcacacagagtgagcagtaccaagagttccgtaaacagtgttacacggctttcctccacctgcgaaggtattctaatctgattttgaacttgttttccttgatggttgatgcaaacattccagatattgcacttgaaccagataaaactgtgaaaaaggttcaggataaattccgcttagacctgtcggatgaagaggctgtgcattacatgcagagtctgattgatgagagtgtccatgctctttttgctgcagtggtggaacagattcacaagtttgcccagtactggagaaaatgaaactgggattgacccatcaagatgcttggctcaataagaaaaccacgttaggagcaacctttgtatattggagacttcagagtaaccagcaaggaagagaaatcttaatcttcaagttaccatattttccaaatattacatggtacctgagttctgcttccttggatgtcattgcttaaatatagtcttgaagggcttgttttgaaatattgtatatattttttcaaatgtatacattgttaataaattaagaaatgagaaacattcttatttatgtacatgttatgagagttctggaggaagtaatatgttgaaatagtaaaacattttagtttttgagtttaaaaaaaaaaaaaaaaaa

SEQ ID NO: 1672 - DNA, 2954 bp, Homo sapiens
cgctgtttgtccagcttctcagagttgctgtgcagctcggatgtggcataggaaacagcagacacagggagagggcagcataaggcactgtagggagcagtggccacattttctgcagaggaagaaccgatgctggaacgtcgttgcaggggccccctggccatgggcctggcccagccccgactcctttctgggccctcccaggagtcaccccagaccctggggaaggagtcccgcgggctgaggcaacaaggcacgtcagtggcccagtctggtgcccaagccccaggcagggcccatcgctgtgcccactgtcgaaggcacttccctggctgggtggctctgtggcttcacacccgccggtgccaggcccggctgcccttgccctgccctgagtgtggccgtcgctttcgccatgcccccttcttagcactgcaccgccaggtccatgctgctgccaccccagacctgggctttgcctgccacctctgtgggcagagcttccgaggctgggtggccctggttctgcatctgctggcccattcagctgcaaagcaacccatcgcttgtcccaaatgcgagagacgcttctggcgacgaaagcagcttcgagctcatctgcggcggtgccaccctcccgccccggaggcccggcccttcatatgcggcaactgtggccggagctttgcccagtgggaccagctagttgcccacaagcgggtgcacgtagctgaggccctggaggaggccgcagccaaggctctggggccccggcccaggggccgccccgcggtgaccgccccccggcccggtggagatgccgtcgaccgccccttccagtgtgcctgttgtggcaagcgcttccggcacaagcccaacttgatcgctcaccgccgcgtgcacacgggcgagcggccccaccagtgccccgagtgcgggaagcgctttaccaataagccctatctgacttcgcaccggcgcatccacaccggcgagaagccctacccgtgcaaagagtgcggccgccgcttccggcacaaacccaacctgctgtctcacagcaagattcacaagcgatccgaggggtcggcccaggccgcccccggcccggggagcccccagctgccagccggcccccaggagtccgcggccgagcccaccccggcggtacctctgaaaccggcccaggagccgccgccaggggccccgccagagcacccgcaggacccgatcgaagcccccccctccctctacagctgcgacgactgcggcaggagcttccggctggagcgcttcctgcgggcccaccagcggcacgacaccggggagcggcccttcacctgcgccgagtgcgggaagaacttcggcaagaagacgcacctggtggcgcactcgccggtgcactccggcgagcggcccttcgcctgcgaggagtgcggccgccgcttctcccagggcagccatctggcggcgcatcggccggaccacgcccccgatcggcccttcgtgtgtcccgactgcggcaaggccttccgccacaaaccctacctggcgcggcaccggcgcatccacaccggcgagaagccctacgtctgccccgactgcggcaaagccttcagccagaagtccaacctggtgtcgcaccggcgcatccacacgggcgagcggccctacgcctgtcccgactgcgaccgcagcttcagccagaagtccaacctcatcacccaccgcaagagccacatccgggacggcgccttctgctgtgccatctgtggccagaccttcgacgacgaggagagactcctggcccaccagaagaagcacgatgtctgagacggtgggcggggccgtgttggctgagagagggctggggtccttcgtggtgggagtcgcagtgggctgggggtgcctgcctagtgctggagtaggggacaatgggaatcctagaggggatggaagatgcggggagtgagctgggtgggccctgctagcgagagaggtcaaccccggtggccagggaacccacttccaagcgcagggacgccggcctccagctggtgtgtgctaaggctccgtcctgactgccctgtgccctggaaaagcagcaatacatccgccccttacagccctctggctagaggagccaccagtggaaaggaagccctccatcctctggtattaacgccttaatgcccctgtcttttactgtaagttacttagatcatttttggaagcaggcgtggtagagtcctgtaaatgaatgctctgggctagatacagcttggagaacctgctggccttgttagacagaacttgggcctttgccagcagcaagaggtgaagcgaagccactcttacctctcccttcccctcccacctgccccctgcgtaggcacccagacttggagagacccgtctgctgttaatacttccatcctcttccttcccaaagagcagatcccaaggcatttactccttggtctgtctcgctttatctgtcgcccctcccagcgctgagagcctcccctggctgtcagcagcactgtgtccaggctcttgtctgaacaccgcagcccctccttcgctccttccacagctcagcatgtcacggcaaggactgccgcattggtgatggagggccagctgaggggaagttgctggtgagtttcctttctccatttctagcatatgacacctggcctctgcttgagcacttaggtgacaggaacttccgcacctcctgaggccctggatgattctaattgttagaaattctaattgttagaaatccttccttataatgaatgaattctgctttcctataatttctacctattgggccttgttctgttctctggaactaaacagaacaaccatttacccctccttttcaaactagagaataaacatttggttttagaaaaaaaaaaaaaaaaaaaaaaaaaaaaaaaaaa

SEQ ID NO: 1673 - DNA, 2878 bp, Homo sapiens
gggagaaacaggggcagagtgagttggtctctggagtgactgtgcttttccaccctcagcagaggaagaaccgatgctggaacgtcgttgcagggccccctggccatgggcccggcccagccccgactcctttctgggccctcccaggagtcaccccagaccctggggaaggagtcccgcgggctgaggcaacaaggcacgtcagtggcccagtctggtgcccaagccccaggcagggcccatcgctgtgcccactgtcgaaggcacttccctggctgggtggctctgtggcttcacacccgccggtgccaggcccggctgcccttgccctgccctgagtgtggccgtcgctttcgccatgcccccttcttagcactgcaccgccaggtccatgctgctgccaccccagacctgggctttgcctgccacctctgtgggcagagcttccgaggctgggtggccctggttctgcatctgcgggcccattcagctgcaaagcggcccatcgcttgtcccaaatgcgagagacgcttctggcgacgaaagcagcttcgagctcatctgcagcggtgccaccctcccgccccggcggcccggcccttcatatgcggaaactgtggccggagctttgcccagtgggaccagctagttgcccacaagcgggtgcacgtagctgaggccctggaggaggccgcagccaaggttctggggccccggtccagggggcgccccgcggtgaccgccccccggcccggtggagatgccgtcgaccgccccttccagtgtgcctgttgtggcaagcgcttccggcacaagcccaacttgatcgctcaccgccgcgtgcacacgggcgagcggccccaccagtgccccgagtgcgggaagcgctttaccaataagccctatctgacttcgcaccggcgcatccacaccggcgagaagccctacccgtgcaaagagtgcggccgccgcttccggcacaaacccaacctgctgtctcacagcaagattcacaagcgatccgaggggtcggcccaggccgcccccggcccggggagcccccagctgccagccggcccccaggagtccgcggccgagcccaccccggcggtacctctgaaaccggcccaggagccgccgccaggggccccgccagagcacccgcaggacccgatcgaagcccccccctccctctacagctgcgacgactgcggcaggagcttccggctggagcgcttcctgcgggcccaccagcggcagcacaccggggagcggcccttcacctgcgccgagtgcgggaagaacttcggcaagaagacgcacctggtggcgcactcgcgcgtgcactccggcgagcggcccttcgcctgcgaggagtgcggccgccgcttctcccagggcagccatctggcggcgcatcggcgcgaccacgcccccgatcggcccttcgtgtgtcccgactgcggcaaggccttccgccacaaaccctacctggcggcgcaccggcgcatccacaccggcgagaagccctacgtctgccccgactgcggcaaagccttcagacagaagtccaacctggtgtcgcaccggcgcatccacacgggcgagcggtcctacgcctgtcccgactgcgaccgcagcttcagccagaagtccaacctcatcacccaccgcaagagccacatccgggacggcgccttctgctgtgccatctgtggccagaccttcgacgacgaggagagactcctggcccaccagaagaagcacgatgtctgagacggtgggcggggccgtgttggctgagagagggctggggtccttcgtggtgggagtcgcagtgggctgggggtgcctgcctagtgctggagtaggggacaatgggaatcctagaggggatggaagacgcggggagtgagctgggtgggccctgctagcgagagaggtcaaccccggtggccagggaagccacttccaagcgcagggaccgccggcctccagctggtgtgtgctaaggctccgtcctgactgccctgtgccctggaaaagcagcaatagcatccgccccttagagccctctggctagaggagccaccagtggaaaggaagaccctccatcctctggtattaacgccttaatgcccctgtcttttactgtaagttacttaagatcatttttggaagcaggctggtagagtcctgtaaatgaatgctctgggctagatacagcttggagaacctgctggccttgttagacagcacttgggcctttgccagcagcaagaggtgaagcgaagccactcttacctctcccttcccctcccacctgccccctgcgtaggcacccagacttggagagacccgtctgctgttaatacttccatcctcttccttcccaaagagcagatcccaaggcatttactccttgggtctgtctcgctttatctgtcgcccctcccagcgctgagagcctcccctggctgtcagcagcactgtgttccaggctcttgtctgaacaccgcagcccctccttcgctccttccagagctcagcatgtcacagcaaggactgccgcattggtgatggagggccagctgaggggaagttgctggtgagtttccttttctccatttctagcatatggacacctggcctctgcttgagcacttaggtgacaggaacttccgcacctcctgaggccctggatgattctaattgttagaaattctaattgttagaaatccttccttataatgaatgaattctgctttcctataatttctacctattgggccttgttctgttctctggaactaaacagaacaaccatttacccctccttttcaaactagagaataaagatttgggttttagaaaaaaa

SEQ ID NO: 1674 - DNA, 4425 bp, Homo sapiens
gcaaagatgctctaacaggaagtgggttaaggagctgcactgcttcctgccccctaaagctgagcggggcgaggagggcgagtgccaggctgggccacgagacacaggacacaatttcttgccagggtcctggtagcttcctcttcaacagccacttccgtgtggccggggccccaggggcaggagctgctgcccgttgcccaggccaccctccacccccaattgggagccctgcccccctggggccgggccaagcccagcagctggctgggatcccatgggggactggtagggcacaggtcttgggggatagaggtgaccgggccagtgccctggggctctggccatgaagtctcggcagaaaggaaagaagaagggcagcgcaaaggagcgggtttttgggtgcgacttgcaggagcacctgcagcactcaggccaggaggtgccccaggtgctaaagagctgtgcagaatttgtggaggagtatggagtggtggatgggatctaccgcctctcaggggtctcctccaacatccagaagcttcggcaggaatttgagtcagagcggaagccagacctgcgtcgggatgtttacctccaagacattcactgcgtctcctccctgtgcaaggcctatttcagagaactgccggatcccctgctcacttaccggctctatgacaagtttgctgaggctgtaggagtgcaattggaacctgagcgcttggtcaagatcctagaggtgcttcgggaactccctgtcccaaactacaggaccctggagttcctcatgaggcacttggtacacatggcctcattcagtgcccagaccaacatgcatgctcgcaacctggccatcgtgtgggctcccaacctgctgaggtctaaggacatagaggcctcaggcttcaatgggacagcggccttcatggaggtgcgggtacaatccatcgtcgtggagttcatcctcacacacgtggaccagctctttgggggtgctgccctctctggtggtgaggtggagagtgggtggcgatcgcttccagggacccgggcatcaggcagccccgaggaccttatgcccaggccactgccttatcacctgcctagcatactgcaggctggcgatggacccccacagatgcggccctaccatactatcatcgagattgcagagcacaagaggaaggggtctttgaaggtcaggaagtggaggtctatcttcaatttaggtcgctctggccatgagactaagcgtaaacttccacggggggctgaggacagggaggataaatccaacaaggggacactgcggccagccaaaagcatggactcactgagtgctgcagctggggccagtgatgagccagaggggctggtggggcccagcagcccccggccaagcccattgctgcctgagagcttggagaacgattctatagaggcagcagagggtgaacaggagcctgaggcagaagcactgggtggcacaaactctgaaccaggcacaccacgagctgggcggtcagccatccgggctgggggcagcagccgtgcagaacgctgtgctggtgtccacatctcagacccctacaatgtcaacctcccgctacacatcacctctatcctcagtgtgcccccgaacatcatctctaacgtttccttggccaggctcacccgtggccttgagtgccctgctctacagcaccggccaagccctgcctctggccctggccctggccctggccttggccctggccccccagatgaaaagttggaagcaagtccagcctcaagtcccctggcagactcaggcccagacgacttggctcctgccctggaggactcgctgtcccaggaggtgcaggactccttctccttcctagaggactcaagcagctcagaacctgagtgggtgggggcagaggatggggaggtggcccaggcagaagcagcaggagcagccttctcccctggggaggacgaccctgggatgggctacctggaggagctcctgggagttgggcctcaggtggaggagttctctgtggagccacccctggatgacctgtctctggatgaggcacagtttgtcttggcccccagctgctgttccctggactccgctggccccaggcctgaagttgaggaggaaaatggggaggaagttttcctgagtgcctatgatgacctaagtccccttctgggacctaaacccccaatctggaagggttcagggagtctggagggagaggcagcaggatgtggaaggcaggctctgggacagggtggggaagagcaggcatgctgggaagttggggaggacaagcaggctgagcctggaggcaggctagacatcagggaagaggcagagggaagtccagagaccaaggtggaggctggaaaggccagtgaggatagaggggaggctgggggaagccaagagacaaaagtcagattgagagaagggagtagggaagagacagaggccaaggaagagaagtccaaaggtcagaagaaggctgacagtatggaggctaaaggtgtggaggaaccaggaggagatgagtatacagatgagaaggaaaaagaaattgagagagaagaggatgaacaaagagaggaagcccaggtagaagctggaagggacctagagcaaggggcccaggaagatcaagttgctgaggagaaatgggaagttgtacagaaacaagaggctgagggagtcagagaggatgaggacaaaggacagagggagaaggggtaccatgaagcaagaaaagaccaaggagatggtgaagacagcagaagcccagaagcagcaactgaaggaggagcaggggaggtcagcaaggaacgggagagtggggatggagaggctgagggagaccagagggctggagggtactatttagaagaggacaccctctctgaaggttcaggtgtagcgtccctggaggttgactgtgccaaagagggcaatcctcactcttctgagatggaagaggtagccccacagccacctcagccagaggagatggagcctgaggggcagcccagtccagacggctgtctatgcccctgttctcttggcctgggtggcgtgggcatgcgtctagcttccactctggttcaggtccaacaggtccgctctgtgcctgtggtgccccccaagccacagtttgccaagatgcccagtgcaatgtgtagcaagattcatgtggcacctgcaaatccatgcccgaggcctggccggcttgatgggactcctggagaaagggcttgggggtcccgagcttctcgatcctcttggaggaatgggggtagtctttcctttgatgctgctgtggccctagcccgggaccgccaaaggactgaggctcaaggagttcggcgaacccagacctgtactgagggtggggattactgcctcatccccagaacctccccttgtagcatgatctctgcccattctcctcggccccttagctgcctggagctcccatctgaaggtgcagaagggtctggatcccggagtcgtcttagtctgccccccagagaaccccaggttcctgaccccctgttgtcctctcagcgcaggtcatatgcatttgaaacacaggctaaccctgggaaaggtgaaggactgtgattaggaccacagccctgggcaaaggggaccagcaagttgtcttgaatctccagggttcctgactagctgtctcctctgcagcatgagcagctgtagtgcccaactctataggctttggccctccagcttctctctttgactgtgggaggcactgccttggttggtttacctgaacttgtctccgacacaaagcacttatctcttaggagattcccaagaaagtcaacaagatcttgttcccagggagtgggtcattggccaaagggaacataaggtaggcagaaaacttaaaagagtttgttaaagtgaagactggagaaattcctcccttcctctgagctgtgaatctctcttcatgaaagccaaaggtagagacagggaggacagggccaggttagggccttccacacacaaacacttctagagttgcccattcctgttatgttcttggaccctaagatacctcctgtcccttttaaatccagattaagagaaacgtccaggaagagctctttgaagccctcaatatttgttggagggactggactcctctccagctccccaccctctgcctccagtcaccatgtgcaagagaggtcctgtacagatctctctgggctctcctttctcctttggaataacttgttcctatttcaggaaagggaaatggtgtcactcaggccctgggactgcttctccagccaggctggggccacaggtcccactctagtgaaggtcaatgtctcagaataaaagctgtatttttacacata

SEQ ID NO: 1675 - DNA, 3888 bp, Homo sapiens
gcaaagatgctctaacaggaagtgggttaaggagctgcactgcttcctgccccctaaagctgagcggggcgaggagggcgagtgccaggctgggccacgagacacaggacacaatttcttgccagggtcctggtagcttcctcttcaacagccacttccgtgtggccggggccccaggggcaggagctgctgcccgttgcccaggccaccctccacccccaattgggagccctgcccccctggggccgggccaagcccagcagctggctgggatcccatgggggactggtagggcacaggtcttgggggatagaggtgaccgggccagtgccctggggctctggccatgaagtctcggcagaaaggaaagaagaagggcagcgcaaaggagcgggtttttgggtgcgacttgcaggagcacctgcagcactcaggccaggaggtgccccaggtgctaaagagctgtgcagaatttgtggaggagtatggagtggtggatgggatctaccgcctctcaggggtctcctccaacatccagaagcttcggcaggaatttgagtcagagcggaagccagacctgcgtcgggatgtttacctccaagacattcactgcgtctcctccctgtgcaaggcctatttcagagaactgccggatcccctgctcacttaccggctctatgacaagtttgctgaggctgtaggagtgcaattggaacctgagcgcttggtcaagatcctagaggtgcttcgggaactccctgtcccaaactacaggaccctggagttcctcatgaggcacttggtacacatggcctcattcagtgcccagaccaacatgcatgctcgcaacctggccatcgtgtgggctcccaacctgctgaggtctaaggacatagaggcctcaggcttcaatgggacagcggccttcatggaggtgcgggtacaatccatcgtcgtggagttcatcctcacacacgtggaccagctctttgggggtgctgccctctctggtggtgaggtggagagtgggtggcgatcgcttccagggacccgggcatcaggcagccccgaggaccttatgcccaggccactgccttatcacctgcctagcatactgcaggctggcgatggacccccacagatgcggccctaccatactatcatcgagattgcagagcacaagaggaaggggtctttgaaggtcaggaagtggaggtctatcttcaatttaggtcgctctggccatgagactaagcgtaaacttccacggggggctgaggacagggaggataaatccaacaaggggacactgcggccagccaaaagcatggactcactgagtgctgcagctggggccagtgatgagccagaggggctggtggggcccagcagcccccggccaagcccattgctgcctgagagcttggagaacgattctatagaggcagcagagggtgaacaggagcctgaggcagaagcactgggtggcacaaactctgaaccaggcacaccacgagctgggcggtcagccatccgggctgggggcagcagccgtgcagaacgctgtgctggtgtccacatctcagacccctacaatgtcaacctcccgctacacatcacctctatcctcagtgtgcccccgaacatcatctctaacgtttccttggccaggctcacccgtggccttgagtgccctgctctacagcaccggccaagccctgcctctggccctggccctggccctggccttggccctggccccccagatgaaaagttggaagcaagtccagcctcaagtcccctggcagactcaggcccagacgacttggctcctgccctggaggactcgctgtcccaggaggtgcaggactccttctccttcctagaggactcaagcagctcagaacctgagtgggtgggggcagaggatggggaggtggcccaggcagaagcagcaggagcagccttctcccctggggaggacgaccctgggatgggctacctggaggagctcctgggagttgggcctcaggtggaggagttctctgtggagccacccctggatgacctgtctctggatgaggcacagtttgtcttggcccccagctgctgttccctggactccgctggccccaggcctgaagttgaggaggaaaatggggaggaagttttcctgagtgcctatgatgacctaagtccccttctgggacctaaacccccaatctggaagggttcagggagtctggagggagaggcagcaggatgtggaaggcaggctctgggacagggtggggaagagcaggcatgctgggaagttggggaggacaagcaggctgagcctggaggcaggctagacatcagggaagaggcagagggaaccccacagccacctcagccagaggagatggagcctgaggggcagcccagtccagacggctgtctatgcccctgttctcttggcctgggtggcgtgggcatgcgtctagcttccactctggttcaggtccaacaggtccgctctgtgcctgtggtgccccccaagccacagtttgccaagatgcccagtgcaatgtgtagcaagattcatgtggcacctgcaaatccatgcccgaggcctggccggcttgatgggactcctggagaaagggcttgggggtcccgagcttctcgatcctcttggaggaatgggggtagtctttcctttgatgctgctgtggccctagcccgggaccgccaaaggactgaggctcaaggagttcggcgaacccagacctgtactgagggtggggattactgcctcatccccagaacctccccttgtagcatgatctctgcccattctcctcggccccttagctgcctggagctcccatctgaaggtgcagaagggtctggatcccggagtcgtcttagtctgccccccagagaaccccaggttcctgaccccctgttgtcctctcagcgcaggtcatatgcatttgaaacacaggctaaccctgggaaaggtgaaggactgtgattaggaccacagccctgggcaaaggggaccagcaagttgtcttgaatctccagggttcctgactagctgtctcctctgcagcatgagcagctgtagtgcccaactctataggctttggccctccagcttctctctttgactgtgggaggcactgccttggttggtttacctgaacttgtctccgacacaaagcacttatctcttaggagattcccaagaaagtcaacaagatcttgttcccagggagtgggtcattggccaaagggaacataaggtaggcagaaaacttaaaagagtttgttaaagtgaagactggagaaattcctcccttcctctgagctgtgaatctctcttcatgaaagccaaaggtagagacagggaggacagggccaggttagggccttccacacacaaacacttctagagttgcccattcctgttatgttcttggaccctaagatacctcctgtcccttttaaatccagattaagagaaacgtccaggaagagctctttgaagccctcaatatttgttggagggactggactcctctccagctccccaccctctgcctccagtcaccatgtgcaagagaggtcctgtacagatctctctgggctctcctttctcctttggaataacttgttcctatttcaggaaagggaaatggtgtcactcaggccctgggactgcttctccagccaggctggggccacaggtcccactctagtgaaggtcaatgtctcagaataaaagctgtatttttacacataaaaaaaaaaaaaaaaaaaaaaaaaaaaaaaaaaaaaaaaaaaaaaaaaaaaaaaaaaaaaaaaaaaaaaaaaaaaaaaaaaaaaaaaaaaaaaaaa

SEQ ID NO: 1676 - DNA, 2821 bp, Homo sapiens
aaaggttccccatctgaggcgtttgttgcagctacctgcacttctagattcatcttcttgtgagccctgggcttaggagtcaccatggcaactgaagagttcatcatccgcatccccccataccactatatccatgtgctggaccagaacagcaacgtgtcccgtgtggaggtcgggccaaagacctacatccggcaggacaatgagagggtactgtttgcccccatgcgcatggtgaccgtccccccacgtcactactgcacagtggccaaccctgtgtctcgggatgcccagggcttggtgctgtttgatgtcacagggcaagttcggcttcgccacgctgacctcgagatccggctggcccaggaccccttccccctgtacccaggggaggtgctggaaaaggacatcacacccctgcaggtggttctgcccaacactgccctccatctaaaggcgctgcttgattttgaggataaagatggagacaaggtggtggcaggagatgagtggcttttcgagggacctggcacgtacatcccccggaaggaagtggaggtcgtggagatcattcaggccaccatcatcaggcagaaccaggctctgcggctcagggcccgcaaggagtgctgggaccgggacggcaaggagagggtgacaggggaagaatggctggtcaccacagtaggggcgtacctcccagcggtgtttgaggaggttctggatttggtggacgccgtcatccttacggaaaagacagccctgcacctccgggctcggcggaacttccgggacttcaggggagtgtcccgccgcactggggaggagtggctggtaacagtgcaggacacagaggcccacgtgccagatgtccacgaggaggtgctgggggttgtgcccatcaccaccctgggcccccacaactactgcgtgattctcgaccctgtcggaccggatggcaagaatcagctggggcagaagcgcgtggtcaagggagagaagtcttttttcctccagccaggagagcagctggaacaaggcatccaggatgtgtatgtgctgtcggagcagcaggggctgctgctgagggccctgcagcccctggaggagggggaggatgaggagaaggtctcacaccaggctggggaccactggctcatccgcggacccctggagtatgtgccatctgccaaagtggaggtggtggaggagcgccaggccatccctctagacgagaacgagggcatctatgtgcaggatgtcaagaccggaaaggtgcgcgctgtgattggaagcacctacatgctgacccaggacgaagtcctgtgggagaaagagctgcctcccggggtggaggagctgctgaacaaggggcaggaccctctggcagacaggggtgagaaggacacagctaagagcctccagcccttggcgccccggaacaagacccgtgtggtcagctaccgcgtgccccacaacgctgcggtgcaggtgtacgactaccgagagaagcgagcccgcgtggtcttcgggcctgagctggtgtcgctgggtcctgaggagcagttcacagtgttgtccctctcagctgggcggcccaagcgtccccatgcccgccgtgcgctctgcctgctgctggggcctgacttcttcacagacgtcatcaccatcgaaacggcggatcatgccaggctgcaactgcagctggcctacaactggcactttgaggtgaatgaccggaaggacccccaagagacggccaagctcttttcagtgccagactttgtaggtgatgcctgcaaagccatcgcatcccgggtgcggggggccgtggcctctgtcactttcgatgacttccataagaactcagcccgcatcattcgcactgctgtctttggctttgagacctcggaagcgaagggccccgatggcatggccctgcccaggccccgggaccaggctgtcttcccccaaaacgggctggtggtcagcagtgtggacgtgcagtcagtggagcctgtggatcagaggacccgggacgccctgcaacgcagcgtccagctggccatcgagatcaccaccaactcccaggaagcggcggccaagcatgaggctcagagactggagcaggaagcccgcggccggcttgagcggcagaagatcctggaccagtcagaagccgagaaagctcgcaaggaacttttggagctggaggctctgagcatggccgtggagagcaccgggactgccaaggcggaggccgagtcccgtgcggaggcagcccggattgagggagaagggtccgtgctgcaggccaagctaaaagcacaggccttggccattgaaacggaggctgagctccagagggtccagaaggtccgagagctggaactggtctatgcccgggcccagctggagctggaggtgagcaaggctcagcagctggctgaggtggaggtgaagaagttcaagcagatgacagaggccataggccccagcaccatcagggaccttgctgtggctgggcctgagatgcaggtaaaactgctccagtccctgggcctgaaatcaaccctcatcaccgatggctccactcccatcaacctcttcaacacagcctttgggctgctggggatggggcccgagggtcagcccctgggcagaagggtggccagtgggcccagccctggggaggggatatccccccagtctgctcaggcccctcaagctcctggagacaaccacgtggtgcctgtactgcgctaactcctgattaatacaatggaagtttctgggcaaaaaaaaaaaaaaaaagtttcca

SEQ ID NO: 1677 - DNA, 2857 bp, Homo sapiens
ttccccatctgaggcgtttgttgcagctacctgcacttctagatgctccccaggttcatcctgtgtcgtctcccccacctaccagtcatcttcttgtgagccctgggcttaggagtcaccatggcaactgaagagttcatcatccgcatccccccataccactatatccatgtgctggaccagaacagcaacgtgtcccgtgtggaggtcgggccaaagacctacatccggcaggacaatgagagggtactgtttgcccccatgcgcatggtgaccgtccccccacgtcactactgcacagtggccaaccctgtgtctcgggatgcccagggcttggtgctgtttgatgtcacagggcaagttcggcttcgccacgctgacctcgagatccggctggcccaggaccccttccccctgtacccaggggaggtgctggaaaaggacatcacacccctgcaggtggttctgcccaacactgccctccatctaaaggcgctgcttgattttgaggataaagatggagacaaggtggtggcaggagatgagtggcttttcgagggacctggcacgtacatcccccggaaggaagtggaggtcgtggagatcattcaggccaccatcatcaggcagaaccaggctctgcggctcagggcccgcaaggagtgctgggaccgggacggcaaggagagggtgacaggggaagaatggctggtcaccacagtaggggcgtacctcccagcggtgtttgaggaggttctggatttggtggacgccgtcatccttacggaaaagacagccctgcacctccgggctcggcggaacttccgggacttcaggggagtgtcccgccgcactggggaggagtggctggtaacagtgcaggacacagaggcccacgtgccagatgtccacgaggaggtgctgggggttgtgcccatcaccaccctgggcccccacaactactgcgtgattctcgaccctgtcggaccggatggcaagaatcagctggggcagaagcgcgtggtcaagggagagaagtcttttttcctccagccaggagagcagctggaacaaggcatccaggatgtgtatgtgctgtcggagcagcaggggctgctgctgagggccctgcagcccctggaggagggggaggatgaggagaaggtctcacaccaggctggggaccactggctcatccgcggacccctggagtatgtgccatctgccaaagtggaggtggtggaggagcgccaggccatccctctagacgagaacgagggcatctatgtgcaggatgtcaagaccggaaaggtgcgcgctgtgattggaagcacctacatgctgacccaggacgaagtcctgtgggagaaagagctgcctcccggggtggaggagctgctgaacaaggggcaggaccctctggcagacaggggtgagaaggacacagctaagagcctccagcccttggcgccccggaacaagacccgtgtggtcagctaccgcgtgccccacaacgctgcggtgcaggtgtacgactaccgagagaagcgagcccgcgtggtcttcgggcctgagctggtgtcgctgggtcctgaggagcagttcacagtgttgtccctctcagctgggcggcccaagcgtccccatgcccgccgtgcgctctgcctgctgctggggcctgacttcttcacagacgtcatcaccatcgaaacggcggatcatgccaggctgcaactgcagctggcctacaactggcactttgaggtgaatgaccggaaggacccccaagagacggccaagctcttttcagtgccagactttgtaggtgatgcctgcaaagccatcgcatcccgggtgcggggggccgtggcctctgtcactttcgatgacttccataagaactcagcccgcatcattcgcactgctgtctttggctttgagacctcggaagcgaagggccccgatggcatggccctgcccaggccccgggaccaggctgtcttcccccaaaacgggctggtggtcagcagtgtggacgtgcagtcagtggagcctgtggatcagaggacccgggacgccctgcaacgcagcgtccagctggccatcgagatcaccaccaactcccaggaagcggcggccaagcatgaggctcagagactggagcaggaagcccgcggccggcttgagcggcagaagatcctggaccagtcagaagccgagaaagctcgcaaggaacttttggagctggaggctctgagcatggccgtggagagcaccgggactgccaaggcggaggccgagtcccgtgcggaggcagcccggattgagggagaagggtccgtgctgcaggccaagctaaaagcacaggccttggccattgaaacggaggctgagctccagagggtccagaaggtccgagagctggaactggtctatgcccgggcccagctggagctggaggtgagcaaggctcagcagctggctgaggtggaggtgaagaagttcaagcagatgacagaggccataggccccagcaccatcagggaccttgctgtggctgggcctgagatgcaggtaaaactgctccagtccctgggcctgaaatcaaccctcatcaccgatggctccactcccatcaacctcttcaacacagcctttgggctgctggggatggggcccgagggtcagcccctgggcagaagggtggccagtgggcccagccctggggaggggatatccccccagtctgctcaggcccctcaagctcctggagacaaccacgtggtgcctgtactgcgctaactcctgattaatacaatggaagtttctgggcaaaaaaaaaaaaaaaaagtttcca

SEQ ID NO: 1678 - DNA, 2627 bp, Homo sapiens
gtcgctcttcggacctcaaggttccccttaacacagagcgccccgcagtcttcgcggaaagcgttcggggtaggcgatggctgcgacgcgtgcagggccccgcgcccgcgagatcttcacctcgctggagtacggaccggtgccggagagccacgcatgcgcactggcctggctggacacccaggaccggtgcttgggccactatgtgaatgggaagtggttaaagcctgaacacagaaattcagtgccttgccaggatcccatcacaggagagaacttggccagttgcctgcaggcacaggccgaggatgtggctgcagccgtggaggcagccaggatggcatttaagggctggagtgcgcaccccggcgtcgtccgggcccagcacctgaccaggctggccgaggtgatccagaagcaccagcggctgctgtggaccctggaatccctggtgactgggcgggctgttcgagaggttcgagacggggacgtccagctggcccagcagctgctccactaccatgcaatccaggcatccacccaggaggaggcactggcaggctgggagcccatgggagtaattggcctcatcctgccacccacattctccttccttgagatgatgtggaggatttgccctgccctggctgtgggctgcaccgtggtggccctcgtgcccccggcctccccggcgcccctcctcctggcccagctggcgggggagctgggccccttcccgggaatcctgaatgtcgtcagtggccctgcgtccctggtgcccatcctggcctcccagcctggaatccggaaggtggccttctgcggagccccggaggaagggcgtgcccttcgacggagcctggcgggtgagtgtgcggagctgggcctggcgctggggacggagtcgctgctgctgctgacggacacggcggacgtagactcggccgtggagggtgtcgtggacgccgcctggtccgaccgcggcccgggtggcctcaggctcctcatccaggagtctgtgtgggatgaagccatgagacggctgcaggagcggatggggcggcttcggagtggccgagggctggatggggccgtggacatgggggcccggggggctgccgcatgtgacctggtccagcgctttgtgcgtgaggcccagagccagggtgcacaggtgttccaggctggtgatgtgccttcggaacgcccattctatcccccaaccttggtctccaacctgcccccagcctccccatgtgcccaggtggaggtgccgtggcctgtggtcgtggcctcccccttccgcacagccaaggaggcactgttggtggccaacgggacgccccgcgggggcagcgccagtgtgtggagcgagaggctggggcaggcgctggagctgggctatgggctccaagtgggcactgtctggatcaacgcccacggcctcagagacccttcggtgcccacaggcggctgcaaggagagtgggtgttcctggcacgggggcccagacgggctgtatgagtatctgcggccctcagggacccctgcccggctgtcctgcctctccaagaacctgaactatgacacctttggcctcgctgttccctcaaccctgccggctgggcctgaaatagggcccagcccagcacccccctatgggctcttcgttgggggccgtttccaggctcctggggcccgaagctccaggcccatccgggattcgtctggcaacctccatggctacgtggctgagggtggagccaaggacatccgaggtgctgtggaggccgctcaccaggctttccctggctgggcgggccagtccccaggagcccgggcagccctgctgtgggccctggcggctgcactggagcgccggaagtctaccctggcctcgaggctggagaggcagggagcggagctcaaggctgcggaggcggaggtggagctgagcgcaagacgacttcgggcgtggggggcccgggtgcaggcccaaggccacaccctgcaggtagccgggctgagaggccctgtgctgcgcctgcgggagccgctgggtgtgctggctgtggtgtgtccggacgagtggcccctgcttgccttcgtgtccctgctggctcccgccctggcctacggcaacactgtggtcatggtgcccagtgcggcctgtcctctgctggccctggaggtctgccaggacatggccaccgtgttcccagcaggcctggccaacgtggtgacaggagaccgggaccatctgacccgctgcctggccttgcaccaagacgtccaggccatgtggtatttcggatcagcccagggttcccagtttgtcgagtgggcctcggcaggaaacctcaaaccggtgtgggcgagcaggggctgcccgcgggcctgggaccaggaggccgagggggcaggcccagagctggggctgcgagtggcgcggaccaaggccctgtggctgcctatgggggactgatgcctgagcgccacctactgcattttggacacctcacaccaaggggagatgcaccccacggacacctgggactttccccttctggttcctgtgtctcccaataaactctctgaccaaccctaaaaaaaaaaaaaaaaaaaaa

SEQ ID NO: 1679 - DNA, 652 bp, Homo sapiens
ggacggaaggagcggcggcgacggaggaggaggatggaggcggtggtgttcgtcttctctctcctcgattgttgcgcgctcatcttcctctcggtctacttcataattacattgtctgatttagaatgtgattacattaatgctagatcatgttgctcaaaattaaacaagtgggtaattccagaattgattggccataccattgtcactgtattactgctcatgtcattgcactggttcatcttccttctcaacttacctgttgccacttggaatatatatcgatacattatggtgccgagtggtaacatgggagtgtttgatccaacagaaatacacaatcgagggcagctgaagtcacacatgaaagaagccatgatcaagcttggtttccacttgctctgcttcttcatgtatctttatagtatgatcttagctttgataaatgactgaagctggagaagccgtggttgaagtcagcctacactacagtgcacagttgaggagccagagacttcttaaatcatccttagaaccgtgaccatagcagtatatattttcctcttggaacaaaaaactatttttgctgtatttttaccatataaagtatttaaaaaacaggaaaaaaaaaaaaaaaaaaaaaaaaaaaaaa

SEQ ID NO: 1680 - DNA, 2006 bp, Homo sapiens
gttgatggtgacagcagcagtgaccgtagcagcctagaggtggccgaatgcttactctaatgggctggcccatccctgagtgtctagagttcccagcccgcttaaggaaggaaggaaaacacaggcagctctaagtgtacgacgagggaggtctcatcggcggtgaggaagcccaggcgggtccccttcccagctgaaaggggttcggaatttcactctgtcgccaggctggaatgcagtagggcaatctcggctcactgcaacctccacctcccgagttcaagtgatgctcctgcttcggcctcctgagtagctgggactacagggactatgtcaccggtggggcttgccccagcaaggccaccatccctgggaagacggtcatcgtgacgggcgccaacacaggcatcgggaagcagaccgccttggaacttggccaggagaggaggcaacatcatcctggcctgccgagacatggagaagtgtgaggcggcagcaaaggacatccgcggggagaccctcaatcaccatgtcaacgcccggcacctggacttggcttccctcaagtctatccgagagtttgcagcaaagatcattgaagaggaggagcgagtggacattctaatcaacaacgcgggtgtgatgcggtgcccccactggaccaccgaggacggcttcgagatgcagtttggcgttaaccacctgggtcactttctcttgacaaacttgctgctggacaagctgaaagcctcagccccttcgcggatcatcaacctctcgtccctggcccatgttgctgggcacatagactttgacgacttgaactggcagacgaggaagtataacaccaaagccgcctactgccagagcaagctcgccatcgtcctcttcaccaaggagctgagccggcggctgcaaggctctggtgtgactgtcaacgccctgcaccccggcgtggccaggacagagctgggcagacacacgggcatccatggctccaccttctccagcaccacactcgggcccatcttctggctgctggtcaagagccccgagctggccgcccagcccagcacatacctggccgtggcggaggaactggcggatgtttccggaaagtacttcgatggactcaaacagaaggccccggcccccgaggctgaggatgaggaggtggcccggaggctttgggctgaaagtgcccgcctggtgggcttagaggctccctctgtgagggagcagcccctccccagataacctctggagcagatttgaaagccaggatggcgcctccagaccgaggacagctgtccgccatgcccgcagcttcctggcactacctgagccgggagacccaggactggcggccgccatgcccgcagtaggttctagggggcggtgctggccgcagtggactggcctgcaggtgagcactgccctgggctctggctggttccgtctgctctgctgccagcaggggagaggggccatctgatgcttcccctgggaatctaaactgggaatggccgaggaggaaggggctccgtgcacttgcaggccacgtcaggagagccagcggtgcctgtcggggagggttccaaggtgctccgtgaagagcatgggcaagttgtctgacacttggtggattcttgggtccctgtgggaccttgtgcatgcatggtcctctctgagccttggtttcttcagcagtgagatgctcagaataactgctgtctcccatgatggtgtggtacagcgagctgttgtctggctatggcatggctgtgccgggggtgtttgctgagggcttcctgtgccagagcccagccagagagcaggtgcaggtgtcatcctgagttcaggctctgcacggcatggagtgggaaccccaccagctgctgctacaggacctgggattgcctgggactcccaccttcctatcaattctcatggtagtccaaactgcagactctcaaacttgctcatttaaaaaaaaaaaaaaaaaa

SEQ ID NO: 1681 - DNA, 1345 bp, Homo sapiens
aaaacagccggggctccagcgggagaacgataatgcaaagtgctatgttcttggctgttcaacacgactgcagacccatggacaagagcgcaggcagtggccacaagagcgaggagaagcgagaaaagatgaaacggacccttttaaaagattggaagacccgtttgagctacttcttacaaaattcctctactcctgggaagcccaaaaccggcaaaaaaagcaaacagcaagctttcatcaagccttctcctgaggaagcacagctgtggtcagaagcatttgacgagctgctagccagcaaatatggtcttgctgcattcagggcttttttaaagtcggaattctgtgaagaaaatattgaattctggctggcctgtgaagacttcaaaaaaaccaaatcaccccaaaagctgtcctcaaaagcaaggaaaatatatactgacttcatagaaaaggaagctccaaaagagataaacatagattttcaaaccaaaactctgattgcccagaatatacaagaagctacaagtggctgctttacaactgcccagaaaagggtatacagcttgatggagaacaactcttatcctcgtttcttggagtcagaattctaccaggacttgtgtaaaaagccacaaatcaccacagagcctcatgctacatgaaatgtaaaagggagcccagaaatggaggacatttcattctttttcctgaggggaaggactgtgacctgccataaagactgaccttgaattcagcctgggtgttcaggaaacatcactcagaactattgattcaaagttgggtagtgaatcaggaagccagtaactgactaggagaagctggtatcagaacagcttccctcactgtgtacagaacgcaagaagggaataggtggtctgaacgtggtgtctcactctgaaaagcaggaatgtaagatgatgaaagagacaatgtaatactgttggtccaaaagcatttaaaatcaatagatctgggattatgtggccttaggtagctggttgtacatctttccctaaatcgatccatgttaccacatagtagttttagtttaggattcagtaacagtgaagtgtttactatgtgcaagggtattgaagttcttatgaccacagatcatcagtactgttgtctcatgtaatgctaaaactgaaatggtccgtgtttgcattgttaaaaatgatgtgtgaaatagaatgagtgctatggtgttgaaaactgcagtgtccgttatgagtgccaaaaatctgtcttgaaggcagctacactttgaagtggtctttgaatacttttaataaatttattttgataaataatattg

SEQ ID NO: 1682 - DNA, 1177 bp, Homo sapiens
aagtgctgcaatctcagtgctttccaagagccctgcattgttagaaacttcccagcacgcagcaaaggctgctgcaatactcgctctgcctgcctttgccctgcgcttcctacttaccctccttttgtttctcccaaacatctgtccctgactatgctcatctcatgtttgtcctcagctgctgaaagggccacgtttgttttcattacaaataagaccaccgagtgggctcctggcgtgggggcgggaccagccgcgcgcagtcttcagaggcagccccccaggctgtctctggagggtgtgtctctgcttccctttccccgtgtttattttcagacgaagccaagtggcccggggggaccctccggactcccagccttcagagaggagggcagctcgggctttcgccgcagtgcttcctgcccgtcacgtgtgtgctcctagccggggtcgggggagctggtatcttggcccttctgggaggacgcgcacagcccgaggaggcagagccccagacgggaatgggcttttcagaggtggggtgcgggcgaggggacgatgcattatttttaatatttgatttatttttccaactggacttcttcccggggctctttctgggcccagctgcctttgtgatcccgcgccccggtcctcggcctctcacctccagcgccggggcgccccctgctgtcggaagcggctgtgaccgggcagaggtgctatctgggactctgggttctcagcccggggacagcgaaccgaggggcagatgatccatcagaaaagagccggcactgcccagccccgcgcccctgcccctgcctttttccgggagcgcgccgcgccgcacccgctacggccgcttgaccccatctttgagcccggccccaagctctgggaccgtcgtgcccctcatcaaggaagagccaaggaccccaaggagaagagaaaggagttcatgaaggcagaaatgcctggggcccacgaacatcccagtgtggccctggacgggacatcatgctgggcaacacagctaaaatgcgggtgaagaccagatttcttgcacatggcggtgacgggatgctccctagagagcttcaagtggattctttgctttttattttctctcttaataaaaatgtatgatgtttacattgtcagagaacaaacagaa

SEQ ID NO: 1683 - DNA, 817 bp, Homo sapiens
agcccaggcgcagcgggaatccaatcaacttcgagagcgtaggccccacctatcgtgggtcgagttgcttggcggtcgtggttccggagttcctcgggatgtcggtggccttcgtaccggactggctgaggggcaaggcggaagtcaatcaagagactatccagcggctccttgaggagaatgaccagctgatccgctgtattgtggagtatcagaacaagggccgcgggaacgagtgcgtgcagtaccagcatgtgttacatagaaatctcatttatttggctaccattgcagatgccagtccaaccagcacttcaaaagcaatggaataatctttcaaaagcaatagaataatcttccatttggctgtcgtgaggagtaattgaatgtaatccatctcttacaaaatggagacagggtctttaccaactcaactggttaaaacatgaatgaaacctctgtggctctttcaaaacgtgaaaatgtgaagaaagctactaacttagctgtattctcatgtaaatattttttaaataattaagcaaatccctcaataagttgagcccaggtgtcctctttcctgaacttggagcatgtttggataacaaagacatcactgggatgttcaagtctactttttagtttcaacctgaagaggaaactcagtaggtgttgggcaggaattggtgagattcctgacttgataccttgctaaatggacatgtaactgtgtgctccttcctatcagtttgtaaatgtggtccccctgactgctgttttcagattgctttgaaataaagcttatttttctataaaa

SEQ ID NO: 1684 - DNA, 10839 bp, Homo sapiens
atgaccagtggagagaagtatactgtgtgccttaggccgagaaccgctggggaggtagcagccagaggtggtcctctccgacccactactctgtcgatcatcactggggaggtggaaagacaaggcaagatcctcattttgttgcctgctcaggcctgtgcgcacttactctccatggacacgacgtttttgggctctcgcaactacgtggaaacttggaataggtctgcggctgcacaccgcccggacgccggggttcctgcgtcccccgccccctctgatcgcggctgggtagccgagccgcaggcagctgggggcccccgaacgccgcctctgcatcgcgccgcccctgccccgggctccggtagctttcgggcttccgcactgcccgccgcgccctgcccacagggaagcgcttccccaggcggcggcggtcctggtgcggaccctccggccgcagccatgtgggacccgcgggcagctagggttcccccgagggacttggctgtgctgctgtgcaacaaatcaaatgcatttttcagccttgggaagtggaatgaggcatttgttgctgccaaggaatgtctccaatgggatccaacctacgtgaagggatactaccgagctggttattccttgctgaggttgcaccagccttacgaagccgctcgcatgttttttgagggtctgcgacttgtgcagagaagccaagaccaggcaccggttgctgatttccttgttggagtcttcaccactatgagcaccttttctgtcttctcccaccagtcatttctgcttctgtcagcaaaaaaagaccgattaccaagaaatattcatgtcccagagttatcactgaaaagtctctttgagaaatacgttttcattggactttatgagaagatggaacaagtgcccaagttagtccagtggctcatctccattggtgcaagtgttgagactataggaccgtatccccttcatgccctcatgcgactctgtatccaagccagagaaaaccatcttttccggtggttaatggatcacaagcccgagtggaaaggccgcattaaccagaaggatggggatggctgcactgtcctgcacgtcgtcgctgcccactccccaggatacctcgttaagcgacaaacagaggatgtgcagatgctcctgcgctttggggcagatcccactttgctggatcgacagtctcggtctgttgtggatgtcctgaagaggaataagaacttcaaagccatcgagaaaatcaacagtcacttagaaaagctagctacgtgttctaaggacctatcagttcttggccttttcgagtcagcttacatcaggcctctgaatccttatctttctggtcctccagtggggagccagctgctttctgctgtgctcagcaccaggacagtgcctgttttcagtatatgcaggcataggcaagtcatgaagctagtccagaatcaggggagggtggaggggaaagaggctccacttcttgatgagaggagcagcaagtcacactgcacagcatgtgagtatgtggagggattcagcaatggtgatggacccactagtgaaaacgacattttcaggaaggtcttggagcagctggtgaagtatatgaactcaggaaaccggttattgcataaaaactttctgaagcaggaagtagttcagaggttcttgcgtctcctttctactctgcaagaaattcctcctgacctggtctgtgatattaatcaagactgtgccaccaccgtcttcaaattcttattggaaaaacagagatggcctgaggtgcttctgctgctgacccgcaaagtaagtggagaaccaccgcttggggattgcctcatcaaagactgcaacttctcagacctcgacatctgtaccatcatcccccatctcagcacctgggaccagcggaagaaacagcttctgggctgcctgatagacagtggagccttgcctgatggtcttcaggagagccaggagaggccagttgtcacgtgcctgaaacatgaggacttcgagttggctttccttctcttgaccaagggcgcagacccccgtgctatttctctcacggaaggtgatactcctttgcatgcagcactccacatctttctagagattaaagctgacattggttttagcttcctcagccatctgttggatctgttttggtccaaccccactgaattcgactacctcaaccccaatgtccaggacagcaatgggaacacgctgatgcacatcctcttccagaagggcatgctaaagcgcgtgaagaagctgttagacctgctggtgaagtttgacatcaacttcaatctgaagaacaaagagggcaaagatgcacggcaccggattaagaagaacgactctctgctcttggcctggaacaaagctctgatggagaacaggaggaggagccggcaggactctgctgcccacctggggaagctctcaaagtccactgcccctggtcacacatctcagctcaagtcccagggttcattcaagtcagtgccatgtggtgccactgccagaacactgcctgaaggaagtgcagtccctgacagctgggagactctcccaggtacccaggtgaccaggaaggagcctggagctctcaggccctgctcgctgagagactgccttatgcaggacatcacagttttgattcagcaggttgaagtggatccgtctttcccagaggactgtcttcagagctctgagcctctggaggcaggagctggcaaagaaggaaagaaagatgacaagccgactctgggtgcaggggcccctgactgtagtgaggtgggggaaggacatgctcaggtgggccttggggccttgcagcttgtgcctgatgataacagggggaaggagggcaatgatgatcaggatgactggagcacgcaggagattgaggcctgcctccaggacttcgataacatgacctgggagatcgagtgcacttcagaaatgctgaagaagctgtctagtaaggtaatgaccaaggtcatcaagaagaaaatcatccttgccattcagcagctgggaaatggcgagtggacccagggcctgcagaagcgactgaagcacctgaaaggaagcatccagctcttcgaagctaagctggacaaaggagcccggatgctctgggagctcgccattgacttctcccctcgatgcagtgagaaccctgagaagatcattgccacggagcagaacacgtgtgcaatggagaaatcagggcggatctacacggaaatcatccggatttgggacatcgtcttagatcactgcaaactggctgattccatcaaggccatctgcaatgcctacaaccggggcttgtcctgtgtcctgcggaagaagctgaaaggtatcaataaaggccaagtgtcagctaacatgaaaattcaaaagcgtatacctcgctgctatgtggaggacacagaggccgagaagggcagggagcatgtcaatcctgagtactttcccccagccagtgcagtggagacagaatataacatcatgaagttccacagcttcagcaccaacatggcctttaacatcctcaatgacacgacagccacagtggagtaccccttccgggtgggtgagcttgagtacgcggtgatcgacctcaatcccaggccactggagcccatcatccttattgggcgaagtggcactgggaagacaacctgctgcttgtacagattgtggaagaaattccacgtttactgggaaaaagctgagcaggcaggaagcccattgctggccaaacaggtctggctgaagagaaggttggaagtggaacccggaaaagagagtccaggtggggaggaagaggaggaggaagaggacgaggaagaggaagattctattgaagtggaaacagtagaaagcatagatgagcaggagtatgaagcctgcgcaggaggagccggtgtggagccagcaggggacggccaagctgcagaagtatgtgcaccagaacatccccaccagctggagcatttacatcagatctttgtgaccaagaaccatgtgctgtgccaggaggtacaaaggaatttcattgagctttccaagtccaccaaggccactagtcattacaaaccactggaccccaacattcacaaactccaggacctgagggacgagaactttcctctgtttgtcacttccaagcagctgcttcttctgcttgatgcttctctgcccaaaccattttttctgagaaacgaagatggaagcttgaaaagaaccatcataggatggtctgcacaggaagagtcaaccattcctagttggcaagaggatgaagaggaggctgaggtggatggggactacagtgaggaggataaagctgtagaaatgcgtacgggtgacagtgacccccgggtgtacgtgacgtttgaggtgttcaaaaatgaaatatggcccaaaatgaccaaagggaggactgcctacaaccctgcactgatttggaaagaaataaaatcttttctaaagggttcttttgaggccctcagctgtccccatgggagactcactgaagaagtatataagaaattagggaggaaacggtgccccaatttcaaggaagaccggagtgagatctacagcctcttcagtctgtatcagcaaatcaggtcccagaaaggttattttgatgaagaggatgttctgtacaacatatcccggaggctgtcgaagctcagggtgctcccatggtccatccacgagctctatggtgatgagattcaagactttacccaggccgagctggcgctgctgatgaaatgcatcaatgaccccaactctatgttcctcacgggggacacggcccagagcatcatgaagggcgtggccttccgcttcagcgatctgcgctctctgttccattatgccagcagaaacaccatagacaagcagtgtgctgtccggaagcccaagaagatccaccagctgtaccagaattacaggtcccactcaggaatcctcaatctggcatctggagtggtggatttacttcagttctatttcccagaatcttttgatcgccttccaagggattctggcctctttgatggtcctaagccaactgttctggagtcttgtagtgtaagcgacttggcaattttgctacgagggaataaaaggaaaactcagcccattgaatttggagcccaccaggtaatccttgtggccaatgaaacggcaaaggagaaaattccagaagagctggggttagcacttgtgctaacaatttatgaagcaaaaggcttagaatttgatgatgtcctcctttacaacttttttactgattctgaggcttataaggaatggaagatcatttcctcattcacacctacctcaactgactccagagaggaaaaccggccattggttgaagtacccctggacaaaccaggctcttctcagggtcgatctctcatggtgaatccagaaatgtacaagctcctcaacggagagctgaagcagctgtacaccgccatcacacgggctcgggtcaacctctggatctttgatgaaaaccgagagaaacgggctcccgcattcaaatatttcattagaagagattttgtccaagttgtaaagacagatgaaaataaagactttgatgatagcatgttcgttaagacctcaactcctgcggagtggattgcacagggagattactacgccaagcaccagtgctggaaggttgcagccaagtgttaccagaaaggaggtgcatttgagaaggagaagttggccctggcccatgacactgccctgagcatgaaatccaagaaagtcagccccaaggaaaagcagttggaatatttggaattggctaagacctatttggagtgcaaagagccaacactgtcccttaagtgtctgagctatgccaaggagttccagctctctgcccagctgtgcgagaggctgggaaagataagagatgctgcctatttctataagcgaagccagtgctacaaagacgctttcagatgctttgagcagattcaggaatttgatctagcactcaaaatgtactgccaagaggagctttttgaagaagctgctattgcagtggaaaagtatgaagaaatgctaaagactaagacccttcccatttccaagctctcctattctgccagtcagttttacttggaagctgcagcaaagtatctgagtgcaaataagatgaaggaaatgatggctgtcctctcaaagctagacatagaagaccagctggtgttcttgaagtctcggaaacgcttagcagaagctgcagacctgctgaacagggaaggtaggagagaagaggctgccctgctgatgaagcaacatggctgcctcctggaggctgccaggctcactgccgacaaggacttccaggcctcatgtctgctgggggccgcccgcctcaatgtggccagggattccgacatagaacacaccaaggacattctgagagaagcacttgatatctgctatcaaactggccagttgtctggcattgcggaggcccacttcctgcaaggggtaatcctgagagactttcagaagctcagggatgccttcttcaagtttgacacgctcaaccactcagctggagtggtggaagcactctacgaagcagccagccagtgtgaggccgagcctgagaagattctgggcctggctccagggggcttggaaatcctcctcagtctggtcagggctctcaaaagagtgaccaacaatgctgagaaggaaatggtcaaatcttgctttgagttttttgggatttcccaggtggatgccaagtattgccagatagctcagaatgaccctgggcccatattaagaataatttttgacctggatttgaacttgagagagaaaaaaacaaaagatcattttttgataatgactgaccaagtgaaattagccctaaacaaacaccttttgggcaggctgtgtcagatcacacggagcctgcttgggaagacctaccgaggagtctgcatgaggtttattgtaggcttaaaatgtgaggatgaaaactgtgaacattttcacaggcctctgcggcgttgtgaagccaagtgtttagttcagtcgaaaatgaacttggtggcaatcaacgggttgcttttggaagccaaaaaagtattccctaaaatcttagcagaagaacttaaagaaattgattatattttgtctacagatatgtatggcctttgcaagtccattctggatgtccttttccctaagcatttccatcagagagtgttgtcagaaaaccccatggcatgcaaagaaatcctcaaaccaaattacaaatccttccggttctacagatttgctttgaaggagtacatccactttctgtttgaaaatgaaagcgcacgcaaccgccgggaatccacagacctgtggctgagtgccatgcaagctttccttctctcttccaactacccggaggagtttgaaaagctgctccaccaggaggaggacaactacaacagggaactcaaagctctagagtctgaaaaggatgaaaggggcagggggagaggcagcaggataaaaggaatagaagggaaatttggcatgctggcacccaacagggatgatgaaaatatggacaagacccacctgtgcttcatccggcttctggagaattgcattgatcaattctacgtgtacaggaacccagaagactacaagaggctctttttccgtttcatgaatgtcctcatcaagaggtgcaaagaaccactcatccccagcattggaaacacagtagccctcctggagttccagttcatccactgtggggtggtgctggcccgcctctggaagaatgtcattctatgcctccccaagagctacattgcactcttgcactactgggagttcctgtttagcaagaaggacaaggagcttggggatgtgttctccatcattcaggaatacaaacccaaggacgtgacaagagccattcaggatttccggttccatctctcctacctcgccaaggtgctatgtggctatgagaatgtgaacttcaacgtcctgcttgatgccttcagtgaaatagactatgtggtctcgggtgaggctgagcggacactggtgctgtgcttggtgatgctagtgaatgctgaggagatcctgcagccatactgcaagcctctcctgtatcgccacttccgggagattgagtcaaggctgcagctcatgagcatggactgccctggccaggttcccgagaggctcctgaaggtggtgaagcgggtcttggtggcagtcaatgtgaagtctgtggctgaggcactgcaggacctgctctttgagcgggatgaagagtacctaatggactgtgactggcggtgggaccctgtgcacaccaaagggtccatagtccgtggcctctattatgaggaggtcagactaaaccgcctgctctgtttggaccctgtggactactttgctgaacctgagtgtgagtttggccaggatgagatggatgaactggcattagaagaccgagaccacgtcctggccaccattctttcccaaaagcaacggaaggcctccatacagcggaagttgaggagggcatgcctggtggtgtctctgtgcatcagttggaggagaagagtgggcacccagatggagcgtgtcagggaggaggccagggagcccagggctgggaacttcaaaaaggcagacgtggacaggacccagtgtgacctatgtggagtgaagtttacccgtggcccagagaactatttcagccccagcaaagcgtttgagggggcagcttccgaggtggcagtcctttccagggctgagctggaaagggaggagtgtcaggagaggaacagcgagtcttacgagcagcatatccatctagaacaccaccagaggcagcaagtggcctaccagaaatactcagaatttttccacgagaaggtggacccggccattgatgaaggcaagctggtggtgcaggacatcgagcaaagtgtatggatccacagtcacgtgggctccaaggagcacagccacatgctgcagaaggtccaggagcacatcaagagggtttcggatatggtggaggacctctacaggcggaaggcctgggctggcgcggaggaggcgatgactcggctggtcaacattctgatcctgtcagtcagggatgcacgagactggttgatgaaaacagagacccgcttaaagaaggaaggtattgttcaggaagatgattatgaaaatgaagttgaagactttggtgagcttcggcctagaaggcgttctcggaaatgtggaaagcagagaaaatactaatgtccacacagctgcagcctcctcatccttcggaacattccattctgacttagaattctgagcgctggggcagaagacaaaaagaatgtgaattagcattttaaaaataggggagtctaacaacaccattgctttttattctcattacttctctttcagtggcttaggatctgattgctccctcacctctaaagtgtttccaagtagagtctggcagtattagtttcccccacaaacaaattcaggtagagaagttgtagtcgaagggaatgttgggactcctcactgcatggtccctggggtgtctggctcatccccatcatgacatgagttggtagcagaggactaggtgttaggacagactctcctcacctcagttgctgctgctctgggccaggaaatctctctatggattccctcatctcctgccacactgctgcagcatcaagtgtgctatgagagctgtatgtgcccaggggtgggccctgccactggccaccccgagcccaggacgcattctggtcatctctgagcccacttgtagtgtagcttcttctgttagagatgttagccttttctctctgtggcgacttttctgccttcccttcttctgttttttgtgatcattcttagctacctgtgccaagtcacagttagactacctcagaatgtagtcaagaattcacccagtgttctttggatgtcccttccctagggggaaaggctggggaatgttgctgggagcattcccagctgcctctccaaagtggtcctaactctgccttggctatggtgcagacattccaaaaagtgttttgtatacagccctgtacatctagttttcttggttctccctggcaagttcgctaccctagcttaggctgacgttctgatgagtctctgcttgctgagctcatcactgtgggatggtgacctgcagagctgcagattggagcaagtggacagaggagggagccagctaagccaaatccgtcactgccacttggctggcaggccttataagagggcggatctgggcccgtttgcaggaggccattgcctaccctctccccacagtgagccagcagccatcagctgatcccacctgggaaaccttcatgcctctctgatggttactgcccacccttaccccacccctcagctcagcctggtatggaaagcaaggtgcacgttggtctttgattgttctgtcctcacagcagagccagctttccccccatgttgctgctgcttttgctgctcatgctgcttgttgttttctcttccttatctttccaaattgtttccttgaaatgcttgtttccaatttttcttagattatgtttctaatttttattccaggtgtttttttttcttacttgacagaaaaaaagaaaaccccaacaatatcttgctgtattatcacattttttataaagttaaagcatttct

SEQ ID NO: 1685 - DNA, 10713 bp, Homo sapiens
atgaccagtggagagaagtatactgtgtgccttaggccgagaaccgctggggaggtagcagccagaggtggtcctctccgacccactactctgtcgatcatcactggggaggtggaaagacaaggcaagatcctcattttgttgcctgctcaggcctgtgcgcacttactctccatggacacgacgtttttgggctctcgcaactacgtggaaacttggaataggtctgcggctgcacaccgcccggacgccggggttcctgcgtcccccgccccctctgatcgcggctgggtagccgagccgcaggcagctgggggcccccgaacgccgcctctgcatcgcgccgcccctgccccgggctccggtagctttcgggcttccgcactgcccgccgcgccctgcccacagggaagcgcttccccaggcggcggcggtcctggtgcggaccctccggccgcagccatgtgggacccgcgggcagctagggttcccccgagggacttggctgtgctgctgtgcaacaaatcaaatgcatttttcagccttgggaagtggaatgaggcatttgttgctgccaaggaatgtctccaatgggatccaacctacgtgaagggatactaccgagctggttattccttgctgaggttgcaccagccttacgaagccgctcgcatgttttttgagggtctgcgacttgtgcagagaagccaagaccaggcaccggttgctgatttccttgttggagtcttcaccactatgagcaccttttctgtcttctcccaccagtcatttctgcttctgtcagcaaaaaaagaccgattaccaagaaatattcatgtcccagagttatcactgaaaagtctctttgagaaatacgttttcattggactttatgagaagatggaacaagtgcccaagttagtccagtggctcatctccattggtgcaagtgttgagactataggaccgtatccccttcatgccctcatgcgactctgtatccaagccagagaaaaccatcttttccggtggttaatggatcacaagcccgagtggaaaggccgcattaaccagaaggatggggatggctgcactgtcctgcacgtcgtcgctgcccactccccaggatacctcgttaagcgacaaacagaggatgtgcagatgctcctgcgctttggggcagatcccactttgctggatcgacagtctcggtctgttgtggatgtcctgaagaggaataagaacttcaaagccatcgagaaaatcaacagtcacttagaaaagctagctacgtgttctaaggacctatcagttcttggccttttcgagtcagcttacatcaggcctctgaatccttatctttctggtcctccagtggggagccagctgctttctgctgtgctcagcaccaggacagtgcctgttttcagattcagcaatggtgatggacccactagtgaaaacgacattttcaggaaggtcttggagcagctggtgaagtatatgaactcaggaaaccggttattgcataaaaactttctgaagcaggaagtagttcagaggttcttgcgtctcctttctactctgcaagaaattcctcctgacctggtctgtgatattaatcaagactgtgccaccaccgtcttcaaattcttattggaaaaacagagatggcctgaggtgcttctgctgctgacccgcaaagtaagtggagaaccaccgcttggggattgcctcatcaaagactgcaacttctcagacctcgacatctgtaccatcatcccccatctcagcacctgggaccagcggaagaaacagcttctgggctgcctgatagacagtggagccttgcctgatggtcttcaggagagccaggagaggccagttgtcacgtgcctgaaacatgaggacttcgagttggctttccttctcttgaccaagggcgcagacccccgtgctatttctctcacggaaggtgatactcctttgcatgcagcactccacatctttctagagattaaagctgacattggttttagcttcctcagccatctgttggatctgttttggtccaaccccactgaattcgactacctcaaccccaatgtccaggacagcaatgggaacacgctgatgcacatcctcttccagaagggcatgctaaagcgcgtgaagaagctgttagacctgctggtgaagtttgacatcaacttcaatctgaagaacaaagagggcaaagatgcacggcaccggattaagaagaacgactctctgctcttggcctggaacaaagctctgatggagaacaggaggaggagccggcaggactctgctgcccacctggggaagctctcaaagtccactgcccctggtcacacatctcagctcaagtcccagggttcattcaagtcagtgccatgtggtgccactgccagaacactgcctgaaggaagtgcagtccctgacagctgggagactctcccaggtacccaggtgaccaggaaggagcctggagctctcaggccctgctcgctgagagactgccttatgcaggacatcacagttttgattcagcaggttgaagtggatccgtctttcccagaggactgtcttcagagctctgagcctctggaggcaggagctggcaaagaaggaaagaaagatgacaagccgactctgggtgcaggggcccctgactgtagtgaggtgggggaaggacatgctcaggtgggccttggggccttgcagcttgtgcctgatgataacagggggaaggagggcaatgatgatcaggatgactggagcacgcaggagattgaggcctgcctccaggacttcgataacatgacctgggagatcgagtgcacttcagaaatgctgaagaagctgtctagtaaggtaatgaccaaggtcatcaagaagaaaatcatccttgccattcagcagctgggaaatggcgagtggacccagggcctgcagaagcgactgaagcacctgaaaggaagcatccagctcttcgaagctaagctggacaaaggagcccggatgctctgggagctcgccattgacttctcccctcgatgcagtgagaaccctgagaagatcattgccacggagcagaacacgtgtgcaatggagaaatcagggcggatctacacggaaatcatccggatttgggacatcgtcttagatcactgcaaactggctgattccatcaaggccatctgcaatgcctacaaccggggcttgtcctgtgtcctgcggaagaagctgaaaggtatcaataaaggccaagtgtcagctaacatgaaaattcaaaagcgtatacctcgctgctatgtggaggacacagaggccgagaagggcagggagcatgtcaatcctgagtactttcccccagccagtgcagtggagacagaatataacatcatgaagttccacagcttcagcaccaacatggcctttaacatcctcaatgacacgacagccacagtggagtaccccttccgggtgggtgagcttgagtacgcggtgatcgacctcaatcccaggccactggagcccatcatccttattgggcgaagtggcactgggaagacaacctgctgcttgtacagattgtggaagaaattccacgtttactgggaaaaagctgagcaggcaggaagcccattgctggccaaacaggtctggctgaagagaaggttggaagtggaacccggaaaagagagtccaggtggggaggaagaggaggaggaagaggacgaggaagaggaagattctattgaagtggaaacagtagaaagcatagatgagcaggagtatgaagcctgcgcaggaggagccggtgtggagccagcaggggacggccaagctgcagaagtatgtgcaccagaacatccccaccagctggagcatttacatcagatctttgtgaccaagaaccatgtgctgtgccaggaggtacaaaggaatttcattgagctttccaagtccaccaaggccactagtcattacaaaccactggaccccaacattcacaaactccaggacctgagggacgagaactttcctctgtttgtcacttccaagcagctgcttcttctgcttgatgcttctctgcccaaaccattttttctgagaaacgaagatggaagcttgaaaagaaccatcataggatggtctgcacaggaagagtcaaccattcctagttggcaagaggatgaagaggaggctgaggtggatggggactacagtgaggaggataaagctgtagaaatgcgtacgggtgacagtgacccccgggtgtacgtgacgtttgaggtgttcaaaaatgaaatatggcccaaaatgaccaaagggaggactgcctacaaccctgcactgatttggaaagaaataaaatcttttctaaagggttcttttgaggccctcagctgtccccatgggagactcactgaagaagtatataagaaattagggaggaaacggtgccccaatttcaaggaagaccggagtgagatctacagcctcttcagtctgtatcagcaaatcaggtcccagaaaggttattttgatgaagaggatgttctgtacaacatatcccggaggctgtcgaagctcagggtgctcccatggtccatccacgagctctatggtgatgagattcaagactttacccaggccgagctggcgctgctgatgaaatgcatcaatgaccccaactctatgttcctcacgggggacacggcccagagcatcatgaagggcgtggccttccgcttcagcgatctgcgctctctgttccattatgccagcagaaacaccatagacaagcagtgtgctgtccggaagcccaagaagatccaccagctgtaccagaattacaggtcccactcaggaatcctcaatctggcatctggagtggtggatttacttcagttctatttcccagaatcttttgatcgccttccaagggattctggcctctttgatggtcctaagccaactgttctggagtcttgtagtgtaagcgacttggcaattttgctacgagggaataaaaggaaaactcagcccattgaatttggagcccaccaggtaatccttgtggccaatgaaacggcaaaggagaaaattccagaagagctggggttagcacttgtgctaacaatttatgaagcaaaaggcttagaatttgatgatgtcctcctttacaacttttttactgattctgaggcttataaggaatggaagatcatttcctcattcacacctacctcaactgactccagagaggaaaaccggccattggttgaagtacccctggacaaaccaggctcttctcagggtcgatctctcatggtgaatccagaaatgtacaagctcctcaacggagagctgaagcagctgtacaccgccatcacacgggctcgggtcaacctctggatctttgatgaaaaccgagagaaacgggctcccgcattcaaatatttcattagaagagattttgtccaagttgtaaagacagatgaaaataaagactttgatgatagcatgttcgttaagacctcaactcctgcggagtggattgcacagggagattactacgccaagcaccagtgctggaaggttgcagccaagtgttaccagaaaggaggtgcatttgagaaggagaagttggccctggcccatgacactgccctgagcatgaaatccaagaaagtcagccccaaggaaaagcagttggaatatttggaattggctaagacctatttggagtgcaaagagccaacactgtcccttaagtgtctgagctatgccaaggagttccagctctctgcccagctgtgcgagaggctgggaaagataagagatgctgcctatttctataagcgaagccagtgctacaaagacgctttcagatgctttgagcagattcaggaatttgatctagcactcaaaatgtactgccaagaggagctttttgaagaagctgctattgcagtggaaaagtatgaagaaatgctaaagactaagacccttcccatttccaagctctcctattctgccagtcagttttacttggaagctgcagcaaagtatctgagtgcaaataagatgaaggaaatgatggctgtcctctcaaagctagacatagaagaccagctggtgttcttgaagtctcggaaacgcttagcagaagctgcagacctgctgaacagggaaggtaggagagaagaggctgccctgctgatgaagcaacatggctgcctcctggaggctgccaggctcactgccgacaaggacttccaggcctcatgtctgctgggggccgcccgcctcaatgtggccagggattccgacatagaacacaccaaggacattctgagagaagcacttgatatctgctatcaaactggccagttgtctggcattgcggaggcccacttcctgcaaggggtaatcctgagagactttcagaagctcagggatgccttcttcaagtttgacacgctcaaccactcagctggagtggtggaagcactctacgaagcagccagccagtgtgaggccgagcctgagaagattctgggcctggctccagggggcttggaaatcctcctcagtctggtcagggctctcaaaagagtgaccaacaatgctgagaaggaaatggtcaaatcttgctttgagttttttgggatttcccaggtggatgccaagtattgccagatagctcagaatgaccctgggcccatattaagaataatttttgacctggatttgaacttgagagagaaaaaaacaaaagatcattttttgataatgactgaccaagtgaaattagccctaaacaaacaccttttgggcaggctgtgtcagatcacacggagcctgcttgggaagacctaccgaggagtctgcatgaggtttattgtaggcttaaaatgtgaggatgaaaactgtgaacattttcacaggcctctgcggcgttgtgaagccaagtgtttagttcagtcgaaaatgaacttggtggcaatcaacgggttgcttttggaagccaaaaaagtattccctaaaatcttagcagaagaacttaaagaaattgattatattttgtctacagatatgtatggcctttgcaagtccattctggatgtccttttccctaagcatttccatcagagagtgttgtcagaaaaccccatggcatgcaaagaaatcctcaaaccaaattacaaatccttccggttctacagatttgctttgaaggagtacatccactttctgtttgaaaatgaaagcgcacgcaaccgccgggaatccacagacctgtggctgagtgccatgcaagctttccttctctcttccaactacccggaggagtttgaaaagctgctccaccaggaggaggacaactacaacagggaactcaaagctctagagtctgaaaaggatgaaaggggcagggggagaggcagcaggataaaaggaatagaagggaaatttggcatgctggcacccaacagggatgatgaaaatatggacaagacccacctgtgcttcatccggcttctggagaattgcattgatcaattctacgtgtacaggaacccagaagactacaagaggctctttttccgtttcatgaatgtcctcatcaagaggtgcaaagaaccactcatccccagcattggaaacacagtagccctcctggagttccagttcatccactgtggggtggtgctggcccgcctctggaagaatgtcattctatgcctccccaagagctacattgcactcttgcactactgggagttcctgtttagcaagaaggacaaggagcttggggatgtgttctccatcattcaggaatacaaacccaaggacgtgacaagagccattcaggatttccggttccatctctcctacctcgccaaggtgctatgtggctatgagaatgtgaacttcaacgtcctgcttgatgccttcagtgaaatagactatgtggtctcgggtgaggctgagcggacactggtgctgtgcttggtgatgctagtgaatgctgaggagatcctgcagccatactgcaagcctctcctgtatcgccacttccgggagattgagtcaaggctgcagctcatgagcatggactgccctggccaggttcccgagaggctcctgaaggtggtgaagcgggtcttggtggcagtcaatgtgaagtctgtggctgaggcactgcaggacctgctctttgagcgggatgaagagtacctaatggactgtgactggcggtgggaccctgtgcacaccaaagggtccatagtccgtggcctctattatgaggaggtcagactaaaccgcctgctctgtttggaccctgtggactactttgctgaacctgagtgtgagtttggccaggatgagatggatgaactggcattagaagaccgagaccacgtcctggccaccattctttcccaaaagcaacggaaggcctccatacagcggaagttgaggagggcatgcctggtggtgtctctgtgcatcagttggaggagaagagtgggcacccagatggagcgtgtcagggaggaggccagggagcccagggctgggaacttcaaaaaggcagacgtggacaggacccagtgtgacctatgtggagtgaagtttacccgtggcccagagaactatttcagccccagcaaagcgtttgagggggcagcttccgaggtggcagtcctttccagggctgagctggaaagggaggagtgtcaggagaggaacagcgagtcttacgagcagcatatccatctagaacaccaccagaggcagcaagtggcctaccagaaatactcagaatttttccacgagaaggtggacccggccattgatgaaggcaagctggtggtgcaggacatcgagcaaagtgtatggatccacagtcacgtgggctccaaggagcacagccacatgctgcagaaggtccaggagcacatcaagagggtttcggatatggtggaggacctctacaggcggaaggcctgggctggcgcggaggaggcgatgactcggctggtcaacattctgatcctgtcagtcagggatgcacgagactggttgatgaaaacagagacccgcttaaagaaggaaggtattgttcaggaagatgattatgaaaatgaagttgaagactttggtgagcttcggcctagaaggcgttctcggaaatgtggaaagcagagaaaatactaatgtccacacagctgcagcctcctcatccttcggaacattccattctgacttagaattctgagcgctggggcagaagacaaaaagaatgtgaattagcattttaaaaataggggagtctaacaacaccattgctttttattctcattacttctctttcagtggcttaggatctgattgctccctcacctctaaagtgtttccaagtagagtctggcagtattagtttcccccacaaacaaattcaggtagagaagttgtagtcgaagggaatgttgggactcctcactgcatggtccctggggtgtctggctcatccccatcatgacatgagttggtagcagaggactaggtgttaggacagactctcctcacctcagttgctgctgctctgggccaggaaatctctctatggattccctcatctcctgccacactgctgcagcatcaagtgtgctatgagagctgtatgtgcccaggggtgggccctgccactggccaccccgagcccaggacgcattctggtcatctctgagcccacttgtagtgtagcttcttctgttagagatgttagccttttctctctgtggcgacttttctgccttcccttcttctgttttttgtgatcattcttagctacctgtgccaagtcacagttagactacctcagaatgtagtcaagaattcacccagtgttctttggatgtcccttccctagggggaaaggctggggaatgttgctgggagcattcccagctgcctctccaaagtggtcctaactctgccttggctatggtgcagacattccaaaaagtgttttgtatacagccctgtacatctagttttcttggttctccctggcaagttcgctaccctagcttaggctgacgttctgatgagtctctgcttgctgagctcatcactgtgggatggtgacctgcagagctgcagattggagcaagtggacagaggagggagccagctaagccaaatccgtcactgccacttggctggcaggccttataagagggcggatctgggcccgtttgcaggaggccattgcctaccctctccccacagtgagccagcagccatcagctgatcccacctgggaaaccttcatgcctctctgatggttactgcccacccttaccccacccctcagctcagcctggtatggaaagcaaggtgcacgttggtctttgattgttctgtcctcacagcagagccagctttccccccatgttgctgctgcttttgctgctcatgctgcttgttgttttctcttccttatctttccaaattgtttccttgaaatgcttgtttccaatttttcttagattatgtttctaatttttattccaggtgtttttttttcttacttgacagaaaaaaagaaaaccccaacaatatcttgctgtattatcacattttttataaagttaaagcatttct

SEQ ID NO: 1686 - DNA, 1727 bp, Homo sapiens
agccggcgcgcggcggcggcaggaagtctgtgcccgagaacagcagaaataagagccagggagggaccgcggccgcggcggcggcggcgagagcgaaagaggaaactgcagaggaggaagctgcgccgcagcccgagccgcccggcatccccgccgcctctgcgcccgcgccgcgcccccggcgccccctccccagcgcgcccccggccgctcctccgcgccgcgctcgtcggccatggcccgggagaacggcgagagcagctcctcctggaaaaagcaagctgaagacatcaagaagatcttcgagttcaaagagaccctcggaaccggggccttttccgaagtggttttagctgaagagaaggcaactggcaagctctttgctgtgaagtgtatccctaagaaggcgctgaagggcaaggaaagcagcatagagaatgagatagccgtcctgagaaagattaagcatgaaaatattgttgccctggaagacatttatgaaagcccaaatcacctgtacttggtcatgcagctggtgtccggtggagagctgtttgaccggatagtggagaaggggttttatacagagaaggatgccagcactctgatccgccaagtcttggacgccgtgtactatctccacagaatgggcatcgtccacagagacctcaagcccgaaaatctcttgtactacagtcaagatgaggagtccaaaataatgatcagtgactttggattgtcaaaaatggagggcaaaggagatgtgatgtccactgcctgtggaactccaggctatgtcgctcctgaagtcctcgcccagaaaccttacagcaaagccgttgactgctggtccatcggagtgattgcctacatcttgctctgcggctaccctcctttttatgatgaaaatgactccaagctctttgagcagatcctcaaggcggaatatgagtttgactctccctactgggatgacatctccgactctgcaaaagacttcattcggaacctgatggagaaggacccgaataaaagatacacgtgtgagcaggcagctcggcacccatggatcgctggtgacacagccctcaacaaaaacatccacgagtccgtcagcgcccagatccggaaaaactttgccaagagcaaatggagacaagcatttaatgccacggccgtcgtcagacatatgagaaaactacacctcggcagcagcctggacagttcaaatgcaagtgtttcgagcagcctcagtttggccagccaaaaagactgtgcgtatgtagcaaaaccagaatccctcagctgacactgaagacgagcctggggtggagaggagggagccggcatctgccgagcacctcctgtttgccaggcgctttctatacttaatcccatgtcatgcgaccctaggactttttttaacatgtaatcactgggctgggtgcagtggctcacgcctgtaatcccaacactttgggaggctgaggcaggaggactgtttgagttcaggagttttaagaccagcctgaccaacatggtgaaaccccatctctactaaaatataaaaattagccgggtgtggtggcgagcacctgtaatgtcagctacttgggaggctgaggcaggagaatcacttgaacccaggaagcggaggttgcaatgagctgagatcacaccactgcactccagcctgggtgacagattgagactccctctcaaaaaaa

SEQ ID NO: 1687 - DNA, 2242 bp, Homo sapiens
agccggcgcgcggcggcggcaggaagtctgtgcccgagaacagcagaaataagagccagggagggaccgcggccgcggcggcggcggcgagagcgaaagaggaaactgcagaggaggaagctgcgccgcagcccgagccgcccggcatccccgccgcctctgcgcccgcgccgcgcccccggcgccccctccccagcgcgcccccggccgctcctccgcgccgcgctcgtcggccatggcccgggagaacggcgagagcagctcctcctggaaaaagcaagctgaagacatcaagaagatcttcgagttcaaagagaccctcggaaccggggccttttccgaagtggttttagctgaagagaaggcaactggcaagctctttgctgtgaagtgtatccctaagaaggcgctgaagggcaaggaaagcagcatagagaatgagatagccgtcctgagaaagattaagcatgaaaatattgttgccctggaagacatttatgaaagcccaaatcacctgtacttggtcatgcagctggtgtccggtggagagctgtttgaccggatagtggagaaggggttttatacagagaaggatgccagcactctgatccgccaagtcttggacgccgtgtactatctccacagaatgggcatcgtccacagagacctcaagcccgaaaatctcttgtactacagtcaagatgaggagtccaaaataatgatcagtgactttggattgtcaaaaatggagggcaaaggagatgtgatgtccactgcctgtggaactccaggctatgtcgctcctgaagtcctcgcccagaaaccttacagcaaagccgttgactgctggtccatcggagtgattgcctacatcttgctctgcggctaccctcctttttatgatgaaaatgactccaagctctttgagcagatcctcaaggcggaatatgagtttgactctccctactgggatgacatctccgactctgcaaaagacttcattcggaacctgatggagaaggacccgaataaaagatacacgtgtgagcaggcagctcggcacccatggatcgctggtgacacagccctcaacaaaaacatccacgagtccgtcagcgcccagatccggaaaaactttgccaagagcaaatggagacaagcatttaatgccacggccgtcgtcagacatatgagaaaactacacctcggcagcagcctggacagttcaaatgcaagtgtttcgagcagcctcagtttggccagccaaaaagactgtctggcaccttccacgctctgtagtttcatttcttcttcgtcgggggtctcaggagttggagccgagcggagacccaggcccaccactgtgacggcagtgcactctggaagcaagtgactggccctggaggtggggcccggggtcggggctggggaaggggagccccagggtcgccagagccgcgagccactccagcgagaccccaccttgcatggtgccccttcctgcataggactggaagaccgaagtttttttatggccatattttctactgcaattctgaagtgttcatttctcacaaactgtactgactcgaggggcgctgatttcataggatctggtgctgtatatacgaatcttgcaaagctctaactgaacggaccttcttattcctctcccctaacaccatcgtttccactcttctcagtgtaggtaaccgtctatggtgtgttttttcattaatgacaaaaaaaaaaaggtttcaactggattatttaaatattggtaaatattgtgcattagggtttgtttttccttttaagaagtatgtcctttgtatctctaagttacatgacctatatcttttcctctttaatagtagttttatgttaacctttaagagatttgtttttcctcaaaggagaatttaaaggtattttttaaaattctaataagaggatcagccgggtgcaatgactcatgcctgtaatcccagcacgttgggaggccaagtcgggcggatcacaaggtcaggagatcaaggccatcctggccaacatggtgaaaccccacgtctactaaaaatacaaaaaattagccgggcgtggtggcacacacctgtagtcccggctactcgggaggctgaggcaggagaattgcttgaacccgggagacggaggttgcagtgagctgagatcgtgccactgcactccagcctgggtgacagagcaagactctgtctcaaaa

SEQ ID NO: 1688 - DNA, 2090 bp, Homo sapiens
ggaattccgggtcctcctcctcgccctaccttggtttacctgcagccgcctagtcctcttctccttctctttgatgattcagggcctcggcttccctcacgatattgcagaaagacacagctttcctcttcctctccaaaccacctcgaagcaggggcataattggaatatcatttggagaaagtgtcatggaagttctgcgtccacagcttataagaattgatggccggaattacaggaagaatccagtccaagaacagacctatcaacatgaagaagatgaagaggacttctatcaaggctccatggagtgtgctgatgagccctgtgatgcctacgaggtggagcagaccccacaaggattccggtctactttgagggcccccagcttgctctataagcatatagttggaaagagaggggacactaggaagaaaatagaaatggagaccaaaacttctattagcattcctaaacctggacaagacggggaaattgtaatcactggccagcatcgaaatggtgtaatttcagcccgaacacggattgatgttcttttggacacttttcgaagaaagcagcccttcactcacttccttgcctttttcctcaatgaagttgaggttcaggaaggattcctgagattccaggaggaagtactggcgaagtgctccatggatcatggggttgacagcagcattttccagaatcctaaaaagcttcatctaactattgggatgttggtgcttttgagtgaggaagagatccagcagacatgtgagatgctacagcagtgtaaagaggaattcattaatgatatttctgggggtaaacccctagaagtggagatggcagggatagaatacatgaatgatgatcctggcatggtggatgttctttacgccaaagtccatatgaaagatggctccaacaggctacaagaattagttgatcgagtgctggaacgttttcaggcatctggactaatagtgaaagagtggaatagtgtgaaactgcatgctacagttatgaatacactattcaggaaagaccccaatgctgaaggcaggtacaatctctacacagcggaaggcaaatatatcttcaaggaaagagaatcatttgatggccgaaatattttaaagttgtttgagaacttctactttggctccctaaagctgaattcaattcacatctctcagaggttcaccgtagacagctttggaaactacgcttcctgtggacaaattgacttctcctgaggtggatcttggaaagcactagaaactaaacatcttcaccaggtgctgaagaaaagtgtcttcgttttaattgccaagcagggatgtggacatttggatggtgactttcctgggtggttccccatagattcaccattgcctctaatggtgtctacacccgtcatactaccagctgagatggtggtgggcataaggagaatttgtgcctataacccttagtgtgttctggttttttttcttttaatttttaaattgtcgtaaaatactcataaaacatactgtcttcaccatttttaagtgcacagttcagtaacgttaactgttaatacattcataatgctgtgtggccgtcaccgccgtccatctccataggcttctcagcttgtaaaatggaaactgtacccattaaacagtaattcccactcctcccagcccccgcagccaccattctgctttctgtctctctggttttgactattctcagtatctcatataagtggaatcatacagtgacttgtctttttgtgactggcttatttcacttagcataatgtcctcaaggttcatccatgttgtgtcaggtgacaggatttccttcctgtattatacatataatggaatgttccgttacatgtgcgtaccacactctgttcctccatcagtgaacacttggcttgcttcctcttgactattgggagtagtgctaatacagacacgggggtgcaaatatctctttgagactctgcctttaattcctttaccacccagagttttatctttagcaaaataaccattaaagttgtttgccttttacgaaaaaaaaaaaaa

SEQ ID NO: 1689 - DNA, 6608 bp, Homo sapiens
gagtgtggaggcgggagcccgggcggccggcttgaactccgtgcacgcgggcctggagctgcgcccctgcgtcttttcccgacttctgatccgcagaggggcactcggagccccagcctgggtcgcagtgccttcggtctgcgggcctcagtttctcggtggcgtctggactctcgccctcagagggaggcccgtcccacggtctgtggctacggatcccaggaccctcttcgcgggcgattcgcgtagcctcagattgcctcggatgatggcctgcgactgacagtctctcagctcttctcagctctcctgaggctgcagctgtcagctccctgatcctcagcacttgcctggaccagtgcgggtctgccacgccctgttcagccatccctgtcctgttgtgtcgtgcaagccacatctgtccacacccccaccacccaccagtgctggctctcctctcttctcccctgtgctcccagcatgcctcgtggccggtgccgtcagcagggccctcgcattcccatctgggcagccgccaattatgccaacgcacatccatggcagcagatggacaaggcgtctcctggggtggcatacaccccccttgtggatccctggattgagcggccctgctgtggggacaccgtgtgtgtgcgaacgaccatggagcagaagagcacagctagtggcacttgtggcggtaaacctgcagaaaggggtcccctagctgggcacatgcccagctcccgaccccacagggtggacttctgctgggtaccaggctcagacccaggcacctttgatggctccccgtggctactggaccgcttcttggcccagctgggcgattacatgtccttccactttgagcactatcaggacaacatcagccgtgtctgcgagatcctcaggcgcctaacaggccgagcccaggcctgggcagccccctaccttgatggggacctgcccctgcctgacgattacgagctcttctgccaggatctcaaggaagttgttcaagacccgaacagttttgctgagtaccatgctgtggttacctgtcccctgcccctggcctccagccagctgccagtggtccctcagctgcctgtggtgaggcaatacttagctaggttcttagagggcctggcactcgacatgggtactgcccccaggtctttaccagccgccatggccacccctgctgtgtctgggtccaactctgtatctagaagtgctctgttcgagcagcagctgaccaaggagagcacccctgggcccaaggagcccccagtcctgcccagttctacatgtagctccaagcctggtcctgtggaaccagcctcttcccagccagaggaggcagcccccacacctgtccctagactgtcggagtcagctaatcctcctgcccagagaccagacccagctcatccaggaggtccaaaaccccagaaaacagaggaggaggttttggagacagagggagaccaggaggtgtccttaggtaccccacaggaggtggtggaggccccggagaccccaggagagccaccactttctcctgggttctgaacacagcccaggtgggaacaatgctgcccctcatgatgaagtggcctgtgtggcttgagcgccccatagtccccagtcagagcagagtggtgtccccagatgacttcagaccccatagctgggcaagatgcgcttgttttggactctgcgctgagcagaaccagctcccccaactccagcagagcttgacctccgccctgtgccctttccctgctgctggctctctgctgcatccctgcccgtcttctgggagtgccgtctcacccaggcctgctcccacgagggggtcgttttgtagatcaactctcagcagatagttgcatcatctttgtcacctccacccccataaaacaccccccttggtgtcttccacactggctgggactgaactgggtctgccacgtctgccctgttgggacctcgttcctgtatggggtttctgtgtctgtccccctagccccaccctctctgctccctgtgacttctgtcccagctggaatgtgaggaaggctgcctggaggaagtggccactttgattctgggggatgagtgggatagcatcttggcaaagaatgatgtttcctgtgggattaccagcagttctgggcagctggaaggtttggatgcaggaaggtgggatgcaagccccttgccaggctcagctgcaggcattcgccctttgtgtgttaacactgtagctctaatcgtgcctggtgttctgaagcaggctcctcttccctgctgctgtgctgccatcccctgctcactccgcactcgcatgcattgcggattcagcacttaagccctagtgtgtaaatgacttggatctccctcctggcagactgtgaccctcagcacaggggctctgtcttagtcagctctgtggcctggtacacaattggtgctcattaaacacgtgttggattactggctgaggtggtgcagtggctgcctaccagcaagtctttgtttcccattctgtcaggagcagaggcctggccatgagcattccaggtcagcattgcagctgtggtttctggcaggggctttgagggtccaagggtctgatcaaagaagctgggtggggctgagtagggggtgggtggctctgcaggtagagaactgacttccgagagctgtaggtgaagtgaggaccaggcagcagtccagagctgtgaggccccaggcccagaggaatggaatgaagaaagacctgttccacacaaggaggggttttctagtggaagctgagcttggaagctcctggagccaagtttaccacaggataggcaggtacagccgcccagtgtgtgcagtgtgtgcccactctggtgcttggacaagaagttcaagtccctttcaggtttacaattgtgaaaacaacaaaacaacaccttcctggaaagtaggaagaaaaagcagaaatgtgaattggaaatacagccaactattttaggaaaaactaattagcaagcatctgattaaacttattcagaaactggccgggagcagtgtctcacacctgtaatcccagcactctgggaggccaaggtgggtggatcacctgaggtcaggagttcaagaccagcctgaccagcatggagaaatccatctctcctaaaaatacaaaattagccaagtgtggtggtgcatgcctgtaatctcagctacttgggaggctgaggcagaagaattgcttgaacccaggaggcagagggtgtggtgagccgagatcacgccattgcactccagcctggacaacaagagtgaaactccatcccaaaaaaaaaaaacaacaaaaaacaaaaaccttatttagaaaaatataaattgttgggattattttatggtaactatcactagaaaaggctctgggttcagatggttttatgtgtgagttatttcagggcacagataccttgtaggtaaaacaactggaaaccttggaaataggtgggaagctatttttagaaagcaggtatagccctggtagcaaagcaagtgagctggcagaagaaacccattttcagtcttgattctggtcagatgtgagaagtccctggatgtcctggcccagccccatgcttctgtgccaggtcacagctgccctccgtccgatgactcaggccccatccccccttttgtgggttgggtcagactgctccctgatgcctacctccagtgcactgtggcctggctcacctgtgggtctggcagtagaacccagagttgctctctaggatggacagcctagtcacccagctgacctttaccctgtcccacaggcttctggacaggccaccttccccatctccctttagtggacctgaagtggatactccagcctgggattgctgccttctcttttgaaccctgtcctattggggctttggggcttttgtgcccttgggacccaggcagctcctgggggtgtgtgagttatggtctgccgtgtgtctgagggccagtcatgcagcatccacctaggcaggcttgagagtccttgggagagtccaggtgacctggtttttaattaaaacgcgtcctgtttattgtggttgggctctgcccagaaaggaaggtagggccttgaagtggtgatgtccaggtttcctgcacaggtagggtggaggcaacgatggactctggcatggccttccagacaggcagtgcacacagctcctttcagagtggctttgttgccagctgctgcagcacctgctttcagacagatgatgaccaagctgctttcctgctgggggaaggaggcattccccctgggttgtttttctcttctggcccccacacactggcagacccgaaggcagggtgctcaggagctgcagagcctggcagggtttgctggacatgctcagggacgggccatggtgctggctctgctttctaatcatggtgtcagtccttcacttcccttggaaatacccagagattttatttcctgaagataggacatgatgggtgctgtgagatggtatttaaagtacctgtctgcaaggaaaactttaaaataggaagtactaaggataaggtcctatgggatattggaatattttataaagccacaatagttaaagcacttagatgtggacagatgagcagagaatagaggactttgaaacgggccaaataaatatggaaatttagtacaggctagaggtgtttccaattaacgagtaaaatggattattcagtaaaagcagttggccctctggaaaatagtaaagccatgtatgtgcctcactctttatgccagtacatattccagattaaagatttcaatgttacaattatgaaagtactagaggaaaatatgggtgaatttttttttttttttttgcctatgattccaggattttaaaagttttagatgcccagagttgtggaggtatggagaagtggaccttctcatactgttggtgggaatacacaataatataatttgaccacgtaacaattctaggcacatgcatgctgtgactacttgctaggtgcatgaaggctcttgccaggggtggtcatggttcggtaccactacatgggggtttagagcagggactggaggttggccttgcctcctcccctccccgcatgagctgagggtccttacctgacctttttgagctgtgaccagagtttttcctcatggggtggttagaagggttgaatgagaatgatgcccatgcagtgccttggctggggtctgggccctctaacacccacctcatgggtgtcactgttttttgaacagcagaactggaaaagcccaaagatccagcaataaaggagcaaggcaaataaagctgttaccctgcaggatcagtcagcatgagccagattgtgctgcagtaacaaagatctccaacagcgcagcggctacagttggcactgcttatttcttgcttgcacctgtgggccaccgtggctggggcctgtcagacctgtgctgacgacagcctacctggacatatttctccatgctcactgaggcaggggaaaggccacagcaggccacaagtaatgtgtgtcaccccacttccatttctgtggccaaaggaagccacagagccacacctgagttccataggacggcagcagctgatcatcctatgggctggggtgctcagtatggagaagtacaagcagccacccagcgtggggctggttggtgctgctgaggatgggaggatgggaggggcctgcatccatcccagggcaacatacctgtttgtctgctggggctgcctgacaaaggaccgcaggctaggggacttaaacaacagacatttcctcatgattctggagctagaagcctgagatcaaggtgtgggcagggttggtttctcctgaggcctcgctccttggcctgcagatagccatcttcttgccgtgtccctgtctgtgtctgtgtcctaatctctcataagctcactagtctattggatcagggcccaccctcatgacctcatttaaccctgaattacctctttaaagaccctgtcttcaaatgtaagtactaggggttaggacttgaacataaaaatattgaagggacatagttctgcccacagcggtgcccgcgataggcttctctggttttgtctttgctgttcctggcagcgctatattgggcaggcttctgtggtctccacatgcctgtgtgcagagtcccccaggccctgggttctggggcccatactgaggagtggggatggccaagccttggctgttgagtaggcagtgcccagttgtgctgtatgggatgctgtttctcacttaagaaatctttccctacctggggggtacaaaggcattatcctgtattcccaggttgtaactttctgcctttgacattcaaccttgagtccacctgtaagtgtaactgcggcagaagggaggggtctgctgtcatccttgatagcctgtgatgagcagagcccctctgccgaccgcgatgcacatgtaatatgagcaagaaataaatttttgatgtgcgaaaaaaaaaaaaaaaaaaa

SEQ ID NO: 1690 - DNA, 4768 bp, Homo sapiens
atccttgccgcccgccccggcccagccgcgtcccggagccgtcgggcatggagccgtggaagcagtgcgcgcagtggctcatccattgcaaggtgctgcccaccaaccaccgggtgacctgggactcggctcaggtgttcgaccttgcgcagaccctccgcgatggagtcctgctctgccagctgcttaacaacctccgggcgcactccatcaacctgaaggagatcaacctgaggccgcagatgtcccagtttctctgtttgaagaacataaggacatttctcacggcctgttgtgagacgtttggaatgaggaaaagtgaacttttcgaggcatttgacttgtttgatgttcgtgactttggaaaggttatagaaacattatcacgactttctcgaacacctatagcattggccacaggaatcaggcccttcccaacagaagaaagcattaatgatgaagacatctacaaaggccttcctgatttaatagatgaaacccttgtggaagatgaagaagatctctatgactgtgtttatggggaagatgaaggtggagaagtctatgaggacttaatgaaggcagaggaagcacatcagcccaaatgtccagaaaatgatatacgaagttgttgtctagcagaaattaagcagacagaagaaaaatatacagaaactttggagtcaatagaaaagtatttcatggcaccactaaaaagatttctgacagcagcagaatttgattcagtattcatcaacattcctgaacttgtaaaacttcatcggaacctaatgcaagagattcatgattccattgtaaataaaaatgaccagaacttgtaccaagtttttattaactacaaggaaagattggttatttacgggcagtactgcagtggagtggagtcagccatctctagtttagactacatttctaagtcaaaagaagatgtcaaactgaaattagaggaatgttccaaaagagcaaataatgggaaatttactcttcgagacttgcttgtggttcctatgcaacgtgttttaaagtaccaccttctcctccaggaactggtcaaacataccactgatccgactgagaaggcaaatctgaaactggctcttgatgccatgaaggacttggcacaatatgtgaatgaagtgaaaagagataatgagacccttcgtgaaattaaacagtttcagctatctatagagaatttgaaccaaccagttttgctttttggacgacctcagggagatggtgaaattcgaataaccactctagacaagcataccaaacaagaaaggcatatcttcttatttgatttggcagtgatcgtatgtaagagaaaaggtgataactatgaaatgaaggaaataatagatcttcagcagtacaagatagccaataatcctacaaccgataaagaaaacaaaaagtggtcttatggcttctacctcatccatacccaaggacaaaatgggttagaattttattgcaaaacaaaagatttaaagaagaaatggctagaacagtttgaaatggctttgtctaacataagaccagactatgcagactccaatttccacgacttcaagatgcataccttcactcgagtcacatcctgcaaagtctgccagatgctcctgaggggaacattttatcaaggctatttatgttttaagtgtggagcgagagcacacaaagaatgtttgggaagagtagacaattgtggcagagttaattctggtgaacaagggacactcaaactaccagagaaacggaccaatggactgcgaagaactcctaaacaggtggatccaggtttaccaaagatgcaggtcattaggaactattctggaacaccacccccagctctgcatgaaggaccccctttacagctccaggccggggataccgttgaacttctgaaaggagatgcacacagtctgttttggcagggcagaaatttagcatctggagaggttggattttttccaagtgatgcagtcaagccttgcccatgtgtgcccaaaccagtagattattcttgccaaccctggtatgctggagcaatggaaagattgcaagcagagaccgaacttattaatagggtaaatagtacttaccttgtgaggcacaggaccaaagagtcaggagaatatgcaattagcattaagtacaataatgaagcaaagcacatcaagattttaacaagagatggcttttttcacattgcagaaaatagaaaatttaaaagtttaatggaacttgtggagtactacaagcatcattctctcaaggaagggttcagaaccttagatacaactctgcagtttccatacaaggagccagaacattcagctggacagaggggtaatagagcaggcaacagcttgttaagtccaaaagtgctgggcattgccatcgctcggtatgacttctgtgcaagagatatgagagagttgtccttgttgaaaggagatgtggtgaagatttacacaaagatgagtgcaaatggctggtggagaggagaagtaaatggcagggtgggctggtttccatccacatatgtggaagaggatgaataaattcaaatcccgtgttgcaccctgcaccaaaaatttcagagaagggataaatagaagcctgcacagcatcgtgaattaactgaagtgtttaaaaagctgcatttctggctgttcaacatcctccctccttagcccctcctaagtcttaatgctgagatttctaaagatgctggtactgacagattaatggcttgcctagagctgtgcaagaaacagcctgccagtctgtcattgtcagggaccagggcaaaaccaagagctgttcttcccagaagagccctgcaaacacattggttcgtgcttccctttacttcttctggtcagataccatgaatgccagtcatcagtaaatcttaatacacttttgctttattctcacatgccattcaccagattatttgatggtacaaagaagcagaagtgtaattttccttttcccagcatgacgaaaaattggagttctgccatttgagcagcttactggaaagatccagccttacttgtcttaaattgtccaacaaggtgactcattgcccggcaaacacttttaccctcagatgttactcatgatattataaaatatgaggccagtgctcaggtttgcatcataagtgagctatccctgaagggttttaattacttatttggtgtcctgattatatttgcaaacttctttataaaaggtgaaaaaagcacacaaaagagagggtgtcttcatattaaaccttcacaaccttcatgatttcataggattattttggaaatatagcacttgactttatgaaaggatctgggctaggtatattaggggtagttgccaataacctgaagaagctggcattgtttacagaaacagatcaagggctataatttatgtcattttatagcagcagtatctattaatacatgccttttcctcccatccacctcccccgcacacacacaaagatgacctgggacatgatttttttattcccacattttcttggagcacaaacaactttgttgaggattttggaaggaaagcacaactgggtcctttattcatttctgggacagaaagagggtcagtggacttttgtgggcctccagcttctctcagagtctccccctctgcagcccatcctgggagtgtattaactggagggaagatgggtcttgcagtacatttgttttgcccagccatcactcttttttgtgaggagcctaaatacattcttcctggggtccagagtccccattcaaggcagtcaagttaagacactaacttggccctttcctgatggaaatatttcctccatagcagaagttgtgttctgacaagactgagagagttacatgttgggaaaaaaaagaagcattaacttagtagaactgaaccaggagcattaagttctgaaattttgaatcatctctgaaatgaagcaggtgtagcctgccctctcatcaatccgtctgggtgccagaactcaaggttcagtggacacatccccctgttagagaccctcatgggctaggacttttcatctaggatagattcaagacctttacctcagaattatgtaaactgtgattgtgttttagaaaaattattatttgctaaaaccatttaagtctttgtatatgtgtaaatgatcacaaaaatgtattttataaaatgttctgtacaataaagttacacctcaaagtgtactcttggaatggattctttcctgtaaagtcttatctgcgactctgtctcgggaatgttttgtctgttgccgtcagccgaactttgttatggagggagcagcctcacacaagcagaaacactcctgtggatggtattgtagcatgtattgtttattttagtcaatagaccctctccttataaatggtgtttagtcttcctgttgcatttcatgggcctgggggtttcctagcagaggatattggagcccctttttgtgacattaccaattacatctttgtccacgtttaatactttgttttggaaaatttaaatgctgcagatttgtgtagagttctaataccaaagacagaagtaaatgttttccatatactttgtcttgcctgtatgcagcccttgtgtaatatggtgaattagagtggtatttcactttgtattattttgtaaatatgtcaatataataaatagtgactaaaaaaaaaaaaaa

SEQ ID NO: 1691 - DNA, 2729 bp, Homo sapiens
gggaccgcggtggcggcggcggcctcgacagcggtagtgccttctactccgcttttttagtttcctccgccccctcccgtgggacgctgttgtgtggctgccttaaaaaaaaacgcaactttattgttcctcagccccacctccggctcggcgggcgtcctcaggatgcactgaggctgaggggaggggaggcggcggagggtcgaggtcgcggtccctctcctccgagcgcccggctggaggggagggagtcacgatgtctggtagccgccaggccgggtcgggctccgctgggacaagccccgggtcctcggcggcctcctcggtgacttccgcctcctcgtctttatcctcttccccgtcgccgccttccgtggcggtttcggcggcagcgctggtgtccggcggggtggcccaggccgccggctcgggcggcctcgggggcccggtgcggcctgtgttggtggcgcccgccgtatcgggtagcggcggcggggcggtgtccacgggcctgtcccggcacagctgcgcggccaggcccagcgccggcgtaggaggcagcagctccagcctaggcagcggcagcaggaagcgacctctcctcgcccccctctgcaacgggctcatcaactcctacgaggacaaaagcaacgacttcgtatgccccatctgctttgatatgattgaagaagcatacatgacaaaatgtggccacagcttttgctacaagtgtattcatcagagtttggaggacaataatagatgtcccaagtgtaactatgttgtggacaatattgaccatctgtatcctaatttcttggtgaatgaactcattcttaaacagaagcaaagatttgaggaaaagaggttcaaattggaccactcaaatggccacaggtggcagatatttcaagattggttgggaactgaccaagataaccttgatttggccaatgtcaatcttatgttggagttactagtgcagaagaagaaacaactggaagcagaatcacatgcagcccaactacagattcttatggaattcctcaaggttgcaagaagaaataagagagaggaaatgagtggcttatactctcctgtcagtgaggatagcacagtgcctcaatttgaagctccttctccatcacacagtagtattattgattccacagaatacagccaacctccaggtttcagtggcagttctcagacaaagaaacagccttggtataatagcacgttagcatcaagacgaaaacgacttactgctcattttgaagacttggagcagtgttacttttctacaaggatgtctcgtatctcagatgacagtcgaactgcaagccagttggatgaatttcaggaatgcttgtccaagtttactcgatataattcagtacgacctttagccacattgtcatatgctagtgatctctataatggttccagtatagtctctagtattgaatttgaccgggattgtgactattttgcgattgctggagttacaaagaagattaaagtctatgaatatgacactgtcatccaggatgcagtggatattcattaccctgagaatgaaatgacctgcaattcgaaaatcagctgtatcagttggagtagttaccataagaacctgttagctagcagtgattatgaaggcactgttattttatgggatggattcacaggacagaggtcaaaggtctatcaggagcatgagaagaggtgttggagtgttgactttaatttgatggatcctaaactcttggcttcaggttctgatgatgcaaaagtgaagctgtggtctaccaatctagacaactcagtggcaagcattgaggcaaaggctaatgtgtgctgtgttaaattcagcccctcttccagataccatttggctttcggctgtgcagatcactgtgtccactactatgatcttcgtaacactaaacagccaatcatggtattcaaaggacaccgtaaagcagtctcttatgcaaagtttgtgagtggtgaggaaattgtctctgcctcaacagacagtcagctaaaactgtggaatgtagggaaaccatactgcctacgttccttcaagggtcatatcaatgaaaaaaactttgtaggcctggcttccaatggagattatatagcttgtggaagtgaaaataactctctctacctgtactataaaggactttctaagactttgctaacttttaagtttgatacagtcaaaagtgttctcgacaaagaccgaaaagaagatgatacaaatgaatttgttagtgctgtgtgctggagggcactaccagatggggagtccaatgtgctgattgctgctaacagtcagggtacaattaaggtgctagaattggtatgaagggttaactcaagtcaaattgtacttgatcctgctgaaatacatctgcagctgacaatgagagaagaaacagaaaatgtcatgtgatgtctctccccaaagtcatcatgggttttggatttgttttgaatatttttttctttttttcttttccctcctttatgacctttgggacattgggaatacccagccaactctccaccatcaatgtaactccatggacattgctgctcttggtggtgttatctaatttttgtgatagggaaacaaattcttttgaataaaaataaataacaaaacaataaaagtttattgagccacaaaaaaaaaaaaaaaaaaaaaaaaaaaa

SEQ ID NO: 1692 - DNA, 2801 bp, Homo sapiens
gggaccgcggtggcggcggcggcctcgacagcggtagtgccttctactccgcttttttagtttcctccgccccctcccgtgggacgctgttgtgtggctgccttaaaaaaaaacgcaactttattgttcctcagccccacctccggctcggcgggcgtcctcaggatgcactgaggctgaggggaggggaggcggcggagggtcgaggtcgcggtccctctcctccgagcgcccggctggaggggagggagtcacgatgtctggtagccgccaggccgggtcgggctccgctgggacaagccccgggtcctcggcggcctcctcggtgacttccgcctcctcgtctttatcctcttccccgtcgccgccttccgtggcggtttcggcggcagcgctggtgtccggcggggtggcccaggccgccggctcgggcggcctcgggggcccggtgcggcctgtgttggtggcgcccgccgtatcgggtagcggcggcggggcggtgtccacgggcctgtcccggcacagctgcgcggccaggcccagcgccggcgtaggaggcagcagctccagcctaggcagcggcagcaggaagcgacctctcctcgcccccctctgcaacgggctcatcaactcctacgaggacaaaagcaacgacttcgtatgccccatctgctttgatatgattgaagaagcatacatgacaaaatgtggccacagcttttgctacaagtgtattcatcagagtttggaggacaataatagatgtcccaagtgtaactatgttgtggacaatattgaccatctgtatcctaatttcttggtgaatgaactcattcttaaacagaagcaaagatttgaggaaaagaggttcaaattggaccactcagtgagtagcaccaatggccacaggtggcagatatttcaagattggttgggaactgaccaagataaccttgatttggccaatgtcaatcttatgttggagttactagtgcagaagaagaaacaactggaagcagaatcacatgcagcccaactacagattcttatggaattcctcaaggttgcaagaagaaataagagagagcaactggaacagatccagaaggagctaagtgttttggaagaggatattaagagagtggaagaaatgagtggcttatactctcctgtcagtgaggatagcacagtgcctcaatttgaagctccttctccatcacacagtagtattattgattccacagaatacagccaacctccaggtttcagtggcagttctcagacaaagaaacagccttggtataatagcacgttagcatcaagacgaaaacgacttactgctcattttgaagacttggagcagtgttacttttctacaaggatgtctcgtatctcagatgacagtcgaactgcaagccagttggatgaatttcaggaatgcttgtccaagtttactcgatataattcagtacgacctttagccacattgtcatatgctagtgatctctataatggttccagtatagtctctagtattgaatttgaccgggattgtgactattttgcgattgctggagttacaaagaagattaaagtctatgaatatgacactgtcatccaggatgcagtggatattcattaccctgagaatgaaatgacctgcaattcgaaaatcagctgtatcagttggagtagttaccataagaacctgttagctagcagtgattatgaaggcactgttattttatgggatggattcacaggacagaggtcaaaggtctatcaggagcatgagaagaggtgttggagtgttgactttaatttgatggatcctaaactcttggcttcaggttctgatgatgcaaaagtgaagctgtggtctaccaatctagacaactcagtggcaagcattgaggcaaaggctaatgtgtgctgtgttaaattcagcccctcttccagataccatttggctttcggctgtgcagatcactgtgtccactactatgatcttcgtaacactaaacagccaatcatggtattcaaaggacaccgtaaagcagtctcttatgcaaagtttgtgagtggtgaggaaattgtctctgcctcaacagacagtcagctaaaactgtggaatgtagggaaaccatactgcctacgttccttcaagggtcatatcaatgaaaaaaactttgtaggcctggcttccaatggagattatatagcttgtggaagtgaaaataactctctctacctgtactataaaggactttctaagactttgctaacttttaagtttgatacagtcaaaagtgttctcgacaaagaccgaaaagaagatgatacaaatgaatttgttagtgctgtgtgctggagggcactaccagatggggagtccaatgtgctgattgctgctaacagtcagggtacaattaaggtgctagaattggtatgaagggttaactcaagtcaaattgtacttgatcctgctgaaatacatctgcagctgacaatgagagaagaaacagaaaatgtcatgtgatgtctctccccaaagtcatcatgggttttggatttgttttgaatatttttttctttttttcttttccctcctttatgacctttgggacattgggaatacccagccaactctccaccatcaatgtaactccatggacattgctgctcttggtggtgttatctaatttttgtgatagggaaacaaattcttttgaataaaaataaataacaaaacaataaaagtttattgagccacaaaaaaaaaaaaaaaaaaaaaaaaaaaa

SEQ ID NO: 1693 - DNA, 1582 bp, Homo sapiens
cctcagtcagcccccgggggaggccatgaacgccacggggaccccggtggcccccgagtcctgccaacagctggcggccggcgggcacagccggctcattgttctgcactacaaccactcgggccggctggccgggcgcggggggccggaggatggcggcctgggggccctgcgggggctgtcggtggccgccagctgcctggtggtgctggagaacttgctggtgctggcggccatcaccagccacatgcggtcgcgacgctgggtctactattgcctggtgaacatcacgctgagtgacctgctcacgggcgcggcctacctggccaacgtgctgctgtcgggggcccgcaccttccgtctggcgcccgcccagtggttcctacgggagggcctgctcttcaccgccctggccgcctccaccttcagcctgctcttcactgcaggggagcgctttgccaccatggtgcggccggtggccgagagcggggccaccaagaccagccgcgtctacggcttcatcggcctctgctggctgctggccgcgctgctggggatgctgcctttgctgggctggaactgcctgtgcgcctttgaccgctgctccagccttctgcccctctactccaagcgctacatcctcttctgcctggtgatcttcgccggcgtcctggccaccatcatgggcctctatggggccatcttccgcctggtgcaggccagcgggcagaaggccccacgcccagcggcccgccgcaaggcccgccgcctgctgaagacggtgctgatgatcctgctggccttcctggtgtgctggggcccactcttcgggctgctgctggccgacgtctttggctccaacctctgggcccaggagtacctgcggggcatggactggatcctggccctggccgtcctcaactcggcggtcaaccccatcatctactccttccgcagcagggaggtgtgcagagccgtgctcagcttcctctgctgcgggtgtctccggctgggcatgcgagggcccggggactgcctggcccgggccgtcgaggctcactccggagcttccaccaccgacagctctctgaggccaagggacagctttcgcggctcccgctcgctcagctttcggatgcgggagcccctgtccagcatctccagcgtgcggagcatctgaagttgcagtcttgcgtgtggatggtgcagccaccgggtgcgtgccaggcaggccctcctggggtacaggaagctgtgtgcacgcagcctcgcctgtatggggagcagggaacgggacaggcccccatggtcttcccggtggcctctcggggcttctgacgccaaatgggcttcccatggtcaccctggacaaggaggcaaccaccccacctccccgtaggagcagagagcaccctggtgtgggggcgagtgggttccccacaaccccgcttctgtgtgattctggggaagtcccggcccctctctgggcctcagtagggctcccaggctgcaaggggtggactgtgggatgcatgccctggcaacattgaagttcgatcatggtaaaaaaaaaaaaaaaaaa

SEQ ID NO: 1694 - DNA, 1883 bp, Homo sapiens
agttccgcgcggggctgtcggggaaccatggctgccccgagagacaatgtcactttattattcaagttatactgcttggcagtgatgaccctgatggctgcagtctataccatagctttaagatacacaaggacatcagacaaagaactctacttttcaaccacagccgtgtgtatcacagaagttataaagttattgctaagtgtgggaattttagctaaagaaactggtagtctgggtagattcaaagcatctttaagagaaaatgtcttggggagccccaaggaactgttgaagttaagtgtgccatcgttagtgtatgctgttcagaacaacatggctttcctagctcttagcaatctggatgcagcagtgtaccaggtgacctaccagttgaagattccgtgtactgctttatgcactgttttaatgttaaaccggacactcagcaaattacagtgggtttcagtttttatgctgtgtgctggagttacgcttgtacagtggaaaccagcccaagctacaaaagtggtggtggaacaaaatccattattagggtttggcgctatagctattgctgtattgtgctcaggatttgcaggagtatattttgaaaaagttttaaagagttcagatacttctctttgggtgagaaacattcaaatgtatctatcagggattattgtgacattagctggcgtctacttgtcagatggagctgaaattaaagaaaaaggatttttctatggttacacatattatgtctggtttgtcatctttcttgcaagtgttggtggcctctacacttctgttgtggttaagtacacagacaacatcatgaaaggcttttctgcagcagcggccattgtcctttccaccattgcttcagtaatgctgtttggattacagataacactcacctttgccctgggtactcttcttgtatgtgtttccatatatctctatggattacccagacaagacactacatccatccaacaaggagaaacagcttcaaaggagagagttattggtgtgtgattttagcctcacgtgagactccttttaagactaaaccatttgcattaaactagagccttaagtcaatctcagaaggtagcataaacaaataaaaattaactgtatggcatgatcagtgcggttatgtggaaacaacaacaaacaaacgaagctatctgagtgaactgctaatacagaaacttaatgtagacctgtttggggtctactattgttttagaatgaaggaattgtattattgtgtgtatatataatttgtaaataaaaagtatggagatgatacggtgttaaaaaaaatcatggtgaggctacaatactcaagtaacaaggtttgggacaatgtctaagggttaaagtgccaaagccatttctgtactaactgttctcttgttccggtaccggggagaaggatgacccctccttattctccaattcatgtacagtattttgtcctagcagcataaagacctagctcttttcttacaagaggcagaaacaagacaggctagttcataaacaaactgaatgtgtaactaacttctcaaaatgaatctatttcataactcggacaatttctgggtggtgactgagtacccctttagtgagtacccctttagtgctatatttgtgccattcattatctggttcatatttctttgctgttagatgatacacatttcttcaaaaaaatttctaatgtcacttttgtacttttttaaataaagtatgtttaactgttgggctctcaataatttgtgaaatttcagtgttttctataatgttaatggggaaattcagcaataaactttatttgcaaaaaaaaaaaaaaaaaaaaaaaaaaaaaa

SEQ ID NO: 1695 - DNA, 4225 bp, Homo sapiens
gcagagggtgcggcccagaggaggccgcgggccgggaagggccgggcgggacgggaaacgttagggcagcggcccccggggtgagggggccgagcggacgggcagggccccgaggcgaactctgcccggatgaggaacaaagcagtggggcaggcgcgtgcgcccccagcgcagctggcaggttgggcagcccccttcccgaagcttctggacggaaggccccaggtgttccccgagatgccccaacccgtggcggggtgcacggccaccggccctcgggagaagttgggcggccccgggcgaccccggggacgagtggccgcgtcggtgcagcggttgtgagcaagatgtggtagcacgtgaccctggaacgcaaaccctgatgcctgttccccaccacccgagcgctcctttctctgatatttggccccaagccgatgcatcacaggatgaatgaaatgaacctgagtccagtggggatggagcagctgacttcatcctctgtgagcaatgccttgccagtctcaggaagtcacctgggattggctgcctcacccactcacagtgccatccctgccccaggcctcccagtggcaattccaaacctgggtccctccctgagctctctgccttctgctctgtctttaatgctaccaatgggtattggggatcgaggggtgatgtgtgggttacctgaaagaaactacaccctacctccaccaccttaccctcacctggagagcagttatttcagaaccattctacctggcattttatcttatttagctgacagaccacctccacagtacatccaccctaactctataaatgttgatggtaatacagcattatctatcaccaataacccttcagcactagatccctatcagtccaatggaaatgttggattagaaccaggcattgtttcaatagactctcgctctgtgaacacacatggtgcccaaagtcttcatcccagtgatggccatgaggtggccttggacacagcaatcactatggagaacgtttctagggttaccagcccaatttcgacagatggaatggcagaggagcttacgatggacggtgttgcaggcgagcattcccaaatcccaaatggctccagaagtcatgaacctctgtctgtggattctgtgagcaacaaccttgcagcagacgctgtaggacatggtggtgtgatacccatgcatgggaatggcctggagctccctgtggtcatggagacagaccacattgcaagtcgggtcaatggcatgtctgacagtgccctcagtgactccattcacactgtggccatgagcaccaactctgtaagcgtggcactctctacctcacacaaccttgcctccctagaatctgtttccctccatgaagttggcctcagcctagaacctgtggctgtctcctccatcacccaggaggttgctatggggacaggtcatgtagatgtatcttcagacagtctttcttttgtatcaccttcactgcaaatggaagactccaattcaaacaaggagaacatggcaaccttgtttacaatttggtgtactctgtgtgaccgcgcctatccctcggactgtcccgaacatggaccagtgacttttgttcctgacactccaatagagagcagagcaaggctttctctcccaaagcagcttgttctccgtcagtcaattgtgggagcagaagttggtgtatggactggagaaaccattcctgtgcggacttgctttggacctctaattggccagcagagtcactccatggaagtagcagaatggacagacaaggcagttaaccatatctggaagatataccacaatggtgtcctagaattctgcatcattacaactgatgaaaatgaatgtaattggatgatgtttgtgcgcaaagccaggaaccgggaagagcagaatttggtggcttatcctcatgatggaaaaatctttttctgcacctcacaagatatccctcctgaaaatgaactgcttttttattatagccgagattatgctcaacagattggtgttcctgaacacccagatgtgcatctctgtaactgtggcaaggagtgcaattcttacacagagttcaaagcccatctgaccagccacatccataaccatcttcctacccagggacatagcggcagccatgggccaagtcacagcaaagaaaggaagtggaagtgctcaatgtgcccccaagcttttatctctccttccaaacttcatgtccactttatgggtcacatgggtatgaagccccacaagtgtgatttctgtagcaaggcttttagtgatcccagcaacctgcggacccacctcaagatacatacaggtcagaagaactacaggtgtaccttgtgtgacaagtctttcacccagaaggctcacctggagtcccacatggttatccacactggggagaagaatcttaagtgtgattactgtgacaagttgtttatgcggaggcaggacctcaagcagcacgtgctcatccacactcaagaacgccagatcaagtgtcccaagtgtgataagctgttcttgagaacaaatcacttaaagaagcatctcaattctcatgaaggaaaacgggattatgtctgtgaaaaatgtacaaaggcttatctaaccaaataccatctcacccgccacctgaaaacctgcaaagggcccacctccagttcgtcagcaccagaggaggaagaagaggatgactcagaagaggaagatctagcagactctgtggggacagaagactgtaggattaacagtgctgtgtattcagcggatgagtctctttctgcacataaataaaaggaaaagaaacaagcaattttggatgaaaatgcaaatggaaaaatacacataaccagttatctactataatggtttttatataaaatggttcctgatttattttcagccagtaatcaaaacagactgggaatgaataaagcacttacagaagagtatcctaatgaaaacactttaaaacagattgggaaaactgagcatgtgtcctgttttaagtggtggactgggagggaagtgtcaacttctgaggtctttatttacatgataatctgggagatgcatttatgcctgaatcaaagctgccttctgctcaaacaaatcagatttatttcacattcttccattattccattttcctgctggtcctgtgacttggtaacattctaaacggtccttgccccatagccatcctgattgctgatagtgttttatgcagactcttgtgacttatactcaccacagaatggattgggacacagcagcataagtgtgctacttggcagctagtaagtttaaagcaggacctgccttaactgctcctggccacttggaagtttagggtagatcttgttttccaaagtttcggcaggtgcctggagggcaaataaaaaagcagcagtcagtcagtagtcagtgatggagagaacaagaggagagatgcctggcctctgcccaagaaattagctttgatggaagcctgagcaagtcacctggttattgtaacgtggagatctttgtaggtttagacatggctccctgtctccagtaaacatccagccattcagacaaagggggcctggagatacagagagcccaaataatgcctgctggattgtctcctgatgagtacatgtggactcacctgaggaagggaaggaagggaataatcttttatgtttcatttaccttatgaaaagtgttaaaacattgccaactcaaaataacattatttaatgcatgtgcaaagttaggtcttcccagttgtctcagtgctgaggaacctcatcagagaagcatggaagatgccaaaggatttttggaaggtaaagaaggctgaatagtgaccacatgggcctgttttcagggtcccagcttagttaagtcacccatgcacctggtcattgtgtctcccatgcacatccagcgtttctcagaagcagacccacccttaagttgacaggattgatggaacatgctctcctgctcaaggcacaacctctgggctggagtagaggactctggtgggaaggttttgctgctaatgtatttatggaatgaatgtatttcattcaaatctgtattcctctaggaaggattaaaattaaacttttttaaaatacaggaaaaaaaaaaaaaaaaaaaaaaaaaaaaaaaaaaaaaaa

SEQ ID NO: 1696 - DNA, 2508 bp, Homo sapiens
gcaaggacccggacgcgaccaggggaggcagaaggactctgcacttgtccaagagaagaatccagagaaatcagagcaggtcaaatagttctaaaagccatggcccagggactggtgacattcagggacgtggccatagagttctctctggaagaatggaagtgcctggaacctgctcagagggacttgtacagggaggtgactctggagaactttggtcacttggcctcactaggactctccatttctaagcctgatgtcgtctccttattggagcaagggaaagagccctggatgattgcaaatgatgtgacaggaccatggtgcccagacttggagtccaggtgtgagaaatttctacaaaaagacatttttgaaatcggggcattcaactgggagataatggaaagccttaaatgcagtgacctggagggctccgattttagagctgactgggaatgcgaaggccagtttgagagacaagtcaatgaagagtgctattttaagcaagtgaacgtcacctatggacatatgcccgtgttccagcatcacacgtctcacactgtacgtcagagcagggagactggtgagaaactgatggaatgtcatgaatgtgggaaagcatttagccgtggctcacaccttattcaacatcagaaaactcacactggtgaaaaaccctttggatgtaaggaatgtgggaaggccttcagccgtgcctcacaccttgttcagcatcagagaattcacacgggtgagaaaccttatgactgtaaggactgtgggaaggcctttggtcgtacatcagaacttattctacatcagagacttcatactggtgtcaaaccttatgaatgtaaagaatgtgggaagacctttaggcagcattcacagctgattctgcatcaaagaactcacacaggcgagaaaccctacgtatgtaaagactgtggcaaggctttcattcgtggctcccaactcactgtgcatcggagaatccacacaggggccagaccctatgagtgtaaagaatgcgggaaagcctttagacagcactcacagctgactgtacaccagcgaatccacactggtgagaaaccctacgagtgtaaggaatgcggaaagggctttattcacagctcagaagttactcgacatcaaagaattcattctggggagaaaccctatgagtgtaaggaatgtgggaaggccttcagacagcacgcacagctcacacgacatcagagagtccatactggcgacagaccctatgaatgtaaggactgcgggaaggcatttagtcgtagctcatacctcattcaacatcaaagaattcatacaggtgacaaaccctacgaatgtaaggaatgtgggaaggcctttattcgtgtttcacaactgactcatcatcagcgaattcacacttgtgagaaaccctatgaatgcagggagtgtggaatggcctttattcgtagttcacaacttaccgaacatcagagaattcatcctggtatcaaaccttacgaatgtagagagtgtgggcaggcatttattcttggctcacaactcattgaacactacagaattcatactggttagaaagccttgagtgtaagggataaagataagcctttatgtggagttcacatctggctcagtactaggtaatttttaatgtagtgtaattaatgtcagaaaacacctgtcacttccatcatagaacatcagaaaactcacacccaaagaaaattaaataaatgtgggaattctttttgcctcactcactgtttcctaagcatcagataatctatgctaaaaaaaaaatgaatatagaaaagctgcttcttgccattcaaaatatgttaaatttctgacaattcctaatacaaaaatgacccgattaaaagattctgtggccaccgtgcctggactttccattattttttgttctttcaaacaatcccataatatttcccttgcacgtaaattattttgtacatgtgtaatatatctttaaggtaaattcctagaagtggaaatgctagataaaaatgtaaatttttggctgggcgcagcggctcacacctgtaatccctaatcccagcactttgggaggctgaggcagggggatcacgaggtcaggagataaagaccatcctggccaacatggtgaaacctcatctctactaaaaatacaaaaaattagcaacagagcgagattccgtctcaaaaaaaaagtaactttttaaaactttctatcatgaaaaaatttgaacatatacaaaaatacacagaatcttatattgaactccagcggcctcatcaccagcttcaagaattatcagctcatggccaatcttgctttgtctgtgtacccacttctctcatctctgttatttttgaagtaaataccagatatattatttcatccacagacatttcatacatatctttaaagcacatgacaacattagaaaatattttcactccttaaaaaaaaaaaaaaaa

SEQ ID NO: 1697 - DNA, 3408 bp, Homo sapiens
cctttggacgcgcgcctcggttccgaacgcagcggacggcgcctcaggcagcgcggcggacagcccgtcctccggcgcgccgcgagcctcggaggaccctagcgacggtcgtggcgtaagaccggggggacgcggcggtagcggcggccgttgcgattgattgcgctggttgcctgcggcgtccacttccttggccgcccttgctacactggctgattgttgtgcagccggcgccatgtctgtgagcgagatcttcgtggagctgcagggctttttggctgccgagcaggacatccgagaggaaatcagaaaagttgtacagagtttagaacaaacagctcgagagattttaactctactgcaaggggtccatcagggtgctgggtttcaggacattccaaagaggtgtttgaaagctcgagaacattttggtacagtaaaaacacatctaacatctttgaagaccaaatttcctgctgaacagtattacagatttcatgagcactggaggtttgtgttgcagcgcttggtcttcttggcagcatttgttgtgtatttggaaacagaaacactagtgactcgagaagcagttacagaaattcttggcattgagccagatcgggagaaaggatttcatctggatgtagaagattatctctcaggagttctaattcttgccagtgaactgtcgaggctgtctgtcaacagcgtgactgctggagactactcccgacccctccacatctccaccttcatcaatgagctggattccggttttcgccttctcaacctgaaaaatgactccctgaggaagcgctacgacggattgaaatatgacgtgaagaaagtagaggaagtggtctatgatctctccatccggggctttaataaggagacggcagcagcttgtgttgaaaaataggaggctctccttgctcctggccttgctgacctcagcggttgccaggaaggggtgagcacagagtgcctcttacggtagttaggatgctcagttgctaaacactgcgctttattttcttaaccagttgtggtgtgagtatcagaattgaaacacttttttgggggtaaaaaatatagcctttacatggacagaattttttttgttgtttcagtgaatatgcctgtaattcagtgtatttcagttccgtcagaaagtgtaaatgttagtttcttggtaaagtccttttcttgcttaccttgactgttgatgtactgattgagaagttcattgtctcgtttgtgattcttccagatgtgatgcttgatattttctatatgcgagttagccatccacacccaggcatagcctggatacagtataaaaatagataattaaaaagatggttgccaagcaaggaaaacttattttatattttcccttccttattttaagcattgtgagtaaatcagatgttgaattcttttgccaagggaattatagctgcaggttctctctcactgccatcaaactgtaaaagattaaactgcgaagtcaagctcaacagattattttggaaagtttttgtattaagggatttagtaacatcattttgttttccaccaggcagggagtagggcttagtgttttaaaacacctctgctttctgatgttgccttaatattctgctattgcagcaattaaaaattgtcttcatgtacatttggaactaacacgtgatgtgatatattcctaaactatgaaacctttttcctagtagtcagctagatcatttgttctgggagtataaagccacccacgtaagttaataagcaaaatcctgactattatgttgttagagaaaaatgctttgctttgtctggaagaaagataaaatagtgaattataaataagtcaggccgggcgtggtggctcacacctgtaatcccagcacactgggaggccgaggcagggggactgcttgagctcaggagttcgagaccagcctgggcaacaaagtgagactccatctctatataaaaacaaaaaccacgaaagcacacacaaaataaatcagtgggatttggtaatgtgttttagagtaagaaatttcaggttgttggtgactatcccaacagtcatgttttaaatgtacagtttggggcaagtcatgtaaatactgttggtggtcttccccacacgccccaattttcaggtagtactaagagtatgtgccaggaaactcttgctattgaattgagatgattaaaatggtgacttaatccgtagttattttgcacccactgaaaggaaagtgctttccagaataatatgaagtatctaaaagtgtcaccttttcttgcctgatcaacaatttgggcttcctgtttgtacaaggggccatttggcatacctttcacagcttttatcaggccaagttaaaggctgactacattttttcatcatgaggaaagcagttgaaatgaggcatgagttactgtgcattgggattttagaacaattttcttgtgacagctctttttgtgaagttaggttcttaaaagtgcccatgatggtcacttaaaatgtgcagtaatagcactgccaggatcaagcatgaaaggcttttaaattagatcatcccacagacaatacgtttgataatagttttttcttttaacctctttaagtattgattctgcttgagaatattgaagtacttgccagaagttgtggatttcagttttaacaaatgctattaaagtggagaagcacactctggtcttggaattccatttgaggatttagaagtgtcatgtttataactattcagttgtgtttgttgctggcttgttgtaaagcaataaaatttttttggtctttttgtaagtgagtgtgctgctgtaagaaatctcccatgtgcataacaaattctgaatattttttgaggctaaagaagaccggggtgacaagcagatactgctgtgtaatggttacactaaccaaaagacaccagccactcagagttctatactgtaaagcgcagataacatttgtgtgttataccttgattggggaattaaaagtcatttaactgaagatgttgagaaacctgggctctggttttagtataccggaattacttttttccaattttagaaaatcaagcaggttagagaaaatagagatgaattaggggacactgtcttatggattcatttataagaagagaaccagccatatacacttggggagatttgccacatcttaaacttgaataatagtatgagtaatgcttaagggagtttaatagagaaggaaagctttggcagtgttttgagaacttaagtggctaaagagatgagacaaacatgcaggtcgctactggcatagtttcataattgtgtactcggaaattaaagtttgcttgtttcttggtctggattaaa

SEQ ID NO: 1698 - DNA, 3177 bp, Homo sapiens
tgcaaacgttcccaaatcttcccagtcggcttgcagagactccttgctcccaggagataaccagaagctgcatcttattgacagatggtcatcacattggtgagctggagtcatcagattgtggggcccggagtgaggctgaagggagtggatcagagcactgcctgagagtcacctctactttcctgctaccgctgcctgtgagctgaaggggctgaaccatacactcctttttctacaaccagcttgcattttttctgcccacaatgagcggggaatcaatgaatttcagcgatgttttcgactccagtgaagattattttgtgtcagtcaatacttcatattactcagttgattctgagatgttactgtgctccttgcaggaggtcaggcagttctccaggctatttgtaccgattgcctactccttgatctgtgtctttggcctcctggggaatattctggtggtgatcacctttgctttttataagaaggccaggtctatgacagacgtctatctcttgaacatggccattgcagacatcctctttgttcttactctcccattctgggcagtgagtcatgccaccggtgcgtgggttttcagcaatgccacgtgcaagttgctaaaaggcatctatgccatcaactttaactgcgggatgctgctcctgacttgcattagcatggaccggtacatcgccattgtacaggcgactaagtcattccggctccgatccagaacactaccgcgcagcaaaatcatctgccttgttgtgtgggggctgtcagtcatcatctccagctcaacttttgtcttcaaccaaaaatacaacacccaaggcagcgatgtctgtgaacccaagtaccagactgtctcggagcccatcaggtggaagctgctgatgttggggcttgagctactctttggtttctttatccctttgatgttcatgatattttgttacacgttcattgtcaaaaccttggtgcaagctcagaattctaaaaggcacaaagccatccgtgtaatcatagctgtggtgcttgtgtttctggcttgtcagattcctcataacatggtcctgcttgtgacggctgcaaatttgggtaaaatgaaccgatcctgccagagcgaaaagctaattggctatacgaaaactgtcacagaagtcctggctttcctgcactgctgcctgaaccctgtgctctacgcttttattgggcagaagttcagaaactactttctgaagatcttgaaggacctgtggtgtgtgagaaggaagtacaagtcctcaggcttctcctgtgccgggaggtactcagaaaacatttctcggcagaccagtgagaccgcagataacgacaatgcgtcgtccttcactatgtgatagaaagctgagtctccctaaggcatgtgtgaaacatactcatagatgttatgcaaaaaaaagtctatggccaggtatgcatggaaaatgtgggaattaagcaaaatcaagcaagcctctctcctgcgggacttaacgtgctcatgggctgtgtgatctcttcagggtggggtggtctctgataggtagcattttccagcactttgcaaggaatgttttgtagctctagggtatatatccgcctggcatttcacaaaacagcctttgggaaatgctgaattaaagtgaattgttgacaaatgtaaacattttcagaaatattcatgaagcggtcacagatcacagtgtcttttggttacagcacaaaatgatggcagtggtttgaaaaactaaaacagaaaaaaaaatggaagccaacacatcactcattttaggcaaatgtttaaacatttttatctatcagaatgtttattgttgctggttataagcagcaggattggccggctagtgtttcctctcatttccctttgatacagtcaacaagcctgaccctgtaaaatggaggtggaaagacaagctcaagtgttcacaacctggaagtgcttcgggaagaaggggacaatggcagaacaggtgttggtgacaattgtcaccaattggataaagcagctcaggttgtagtgggccattaggaaactgtcggtttgctttgatttccctgggagctgttctctgtcgtgagtgtctcttgtctaaacgtccattaagctgagagtgctatgaagacaggatctagaataatcttgctcacagctgtgctctgagtgcctagcggagttccagcaaacaaaatggactcaagagagatttgattaatgaatcgtaatgaagttggggtttattgtacagtttaaaatgttagatgtttttaattttttaaataaatggaatactttttttttttttttaaagaaagcaactttactgagacaatgtagaaagaagttttgttccgtttctttaatgtggttgaagagcaatgtgtggctgaagacttttgttatgaggagctgcagattagctaggggacagctggaattatgctggcttctgataattattttaaaggggtctgaaatttgtgatggaatcagattttaacagctctcttcaatgacatagaaagttcatggaactcatgtttttaaagggctatgtaaatatatgaacattagaaaaatagcaacttgtgttacaaaaatacaaacacatgttaggaaggtactgtcatgggctaggcatggtggctcacacctgtaatcccagcattttgggaagctaagatgggtggatcacttgaggtcaggagtttgagaccagcctggccaacatggcgaaacccctctctactaaaaatacaaaaatttgccaggcgtggtggcgggtgcctgtaatcccagctacttgggaggctgaggcaagagaatcgcttgaacccaggaggcagaggttgcagtgagccgagatcgtgccattgcactccagcctgggtgacaaagcgagactccatctcaaaaaaaaaaaaaaaaaaaaaggaaagaactgtcatgtaaacataccgacatgtttaaacctgacaatggtgttatttgaaactttatattgttcttgtaagctttaactatatctctctttaaaatgcaaaataatgtcttaagattcaaagtctgtatttttaaagcatggctttggctttgcaaaataaaaaatgtgttttgtacatgaa

SEQ ID NO: 1699 - DNA, 3463 bp, Homo sapiens
tgcaaacgttcccaaatcttcccagtcggcttgcagagactccttgctcccaggagataaccaggtaaaggagtatgaaagtttgggtacaaactcattgctgcaaattgaaaaccatgcaaaggctgtcttcctctggggagttcaatgcctctctttttcttatcactttaccattggttggactttgattccagggatcctacgattactcaataccctacaggatatacatggttaaccatttgcatttgggcaaataggcgttacttttcaataggaagtggcaatccagaacttgcttttgggcaattctagtagctcaccgcttttttcttaatgactgctagaagctgcatcttattgacagatggtcatcacattggtgagctggagtcatcagattgtggggcccggagtgaggctgaagggagtggatcagagcactgcctgagagtcacctctactttcctgctaccgctgcctgtgagctgaaggggctgaaccatacactcctttttctacaaccagcttgcattttttctgcccacaatgagcggggaatcaatgaatttcagcgatgttttcgactccagtgaagattattttgtgtcagtcaatacttcatattactcagttgattctgagatgttactgtgctccttgcaggaggtcaggcagttctccaggctatttgtaccgattgcctactccttgatctgtgtctttggcctcctggggaatattctggtggtgatcacctttgctttttataagaaggccaggtctatgacagacgtctatctcttgaacatggccattgcagacatcctctttgttcttactctcccattctgggcagtgagtcatgccaccggtgcgtgggttttcagcaatgccacgtgcaagttgctaaaaggcatctatgccatcaactttaactgcgggatgctgctcctgacttgcattagcatggaccggtacatcgccattgtacaggcgactaagtcattccggctccgatccagaacactaccgcgcagcaaaatcatctgccttgttgtgtgggggctgtcagtcatcatctccagctcaacttttgtcttcaaccaaaaatacaacacccaaggcagcgatgtctgtgaacccaagtaccagactgtctcggagcccatcaggtggaagctgctgatgttggggcttgagctactctttggtttctttatccctttgatgttcatgatattttgttacacgttcattgtcaaaaccttggtgcaagctcagaattctaaaaggcacaaagccatccgtgtaatcatagctgtggtgcttgtgtttctggcttgtcagattcctcataacatggtcctgcttgtgacggctgcaaatttgggtaaaatgaaccgatcctgccagagcgaaaagctaattggctatacgaaaactgtcacagaagtcctggctttcctgcactgctgcctgaaccctgtgctctacgcttttattgggcagaagttcagaaactactttctgaagatcttgaaggacctgtggtgtgtgagaaggaagtacaagtcctcaggcttctcctgtgccgggaggtactcagaaaacatttctcggcagaccagtgagaccgcagataacgacaatgcgtcgtccttcactatgtgatagaaagctgagtctccctaaggcatgtgtgaaacatactcatagatgttatgcaaaaaaaagtctatggccaggtatgcatggaaaatgtgggaattaagcaaaatcaagcaagcctctctcctgcgggacttaacgtgctcatgggctgtgtgatctcttcagggtggggtggtctctgataggtagcattttccagcactttgcaaggaatgttttgtagctctagggtatatatccgcctggcatttcacaaaacagcctttgggaaatgctgaattaaagtgaattgttgacaaatgtaaacattttcagaaatattcatgaagcggtcacagatcacagtgtcttttggttacagcacaaaatgatggcagtggtttgaaaaactaaaacagaaaaaaaaatggaagccaacacatcactcattttaggcaaatgtttaaacatttttatctatcagaatgtttattgttgctggttataagcagcaggattggccggctagtgtttcctctcatttccctttgatacagtcaacaagcctgaccctgtaaaatggaggtggaaagacaagctcaagtgttcacaacctggaagtgcttcgggaagaaggggacaatggcagaacaggtgttggtgacaattgtcaccaattggataaagcagctcaggttgtagtgggccattaggaaactgtcggtttgctttgatttccctgggagctgttctctgtcgtgagtgtctcttgtctaaacgtccattaagctgagagtgctatgaagacaggatctagaataatcttgctcacagctgtgctctgagtgcctagcggagttccagcaaacaaaatggactcaagagagatttgattaatgaatcgtaatgaagttggggtttattgtacagtttaaaatgttagatgtttttaattttttaaataaatggaatactttttttttttttttaaagaaagcaactttactgagacaatgtagaaagaagttttgttccgtttctttaatgtggttgaagagcaatgtgtggctgaagacttttgttatgaggagctgcagattagctaggggacagctggaattatgctggcttctgataattattttaaaggggtctgaaatttgtgatggaatcagattttaacagctctcttcaatgacatagaaagttcatggaactcatgtttttaaagggctatgtaaatatatgaacattagaaaaatagcaacttgtgttacaaaaatacaaacacatgttaggaaggtactgtcatgggctaggcatggtggctcacacctgtaatcccagcattttgggaagctaagatgggtggatcacttgaggtcaggagtttgagaccagcctggccaacatggcgaaacccctctctactaaaaatacaaaaatttgccaggcgtggtggcgggtgcctgtaatcccagctacttgggaggctgaggcaagagaatcgcttgaacccaggaggcagaggttgcagtgagccgagatcgtgccattgcactccagcctgggtgacaaagcgagactccatctcaaaaaaaaaaaaaaaaaaaaaggaaagaactgtcatgtaaacataccgacatgtttaaacctgacaatggtgttatttgaaactttatattgttcttgtaagctttaactatatctctctttaaaatgcaaaataatgtcttaagattcaaagtctgtatttttaaagcatggctttggctttgcaaaataaaaaatgtgttttgtacatgaa

SEQ ID NO: 1700 - DNA, 296 bp, Homo sapiens
cagtctgtgttgacgcagccgccctcagtgtctgcggccccaggacagaaggtcaccatctcctgctctggaagcagctccaacattgggaataattatgtatcctggtaccagcagctcccaggaacagcccccaaactcctcatttatgacaataataagcgaccctcagggattcctgaccgattctctggctccaagtctggcacgtcagccaccctgggcatcaccggactccagactggggacgaggccgattattactgcggaacatgggatagcagcctgagtgctgg

SEQ ID NO: 1701 - DNA, 753 bp, Homo sapiens
gcgcttcgtcacaagggtgcgaggaaagtcagtgagcaaatcgcggaccaccggggctgccagctcgcctgactcccggcctcttgcgctcctaggggcggagaagggtgcgggctcttcgccctttgtgtcctccttctttcactaacttctggactttccagctcttccgaagttcgttcttgcgcaaagcccaaaggctggaaaaccgtccacgatgaccagcatgactcagtctctgcgggaggtgataaaggccatgaccaaggctcgcaattttgagagagttttgggaaagattactcttgtctctgctgctcctgggaaagtgatttgtgaaatgaaagtagaagaagagcataccaatgcaataggcactctccacggcggtttgacagccacgttagtagataacatatcaacaatggctctgctatgcacggaaaggggagcacccggagtcagtgtcgatatgaacataacgtacatgtcacctgcaaaattaggagaagatatagtgattacagcacatgttctgaagcaaggaaaaacacttgcatttacctctgtggatctgaccaacaaggccacaggaaaattaatagcacaaggaagacacacaaaacacctgggaaactgagagaacagcagaatgacctaaagaaacccaacaatgaatatcaagtatagatttgactcaaacaattgtaatttttgaaataaactagcaaaaccagaaaaaaaaaaaaaaaa

SEQ ID NO: 1702 - DNA, 3338 bp, Homo sapiens
ctggctcgcgcgtgccttttcccctcaggttgtggggagagcggaatcctgctccgccgtcgcagcagcagcggcagccccggcagcctcgggcgacagcggcggcgcgcgagcccccgggcggaccgtaccaccgctcgccagcacgcagggggagccgcccgtctcgccgcgcacgcctcggcgaccccgcggggctgaggcgtcgccgcgcccggcagcgtgagcgcagagccggcctcgaccccgagctcggagccccgcgggccgcgcccgccgccggccccacccatccgggtcgaggaggccgaggccatggctgagacggaggagcggagcctggacaacttctttgccaagagggacaagaagaagaagaaggagcggagcaaccgggcggcgagtgccgcgggcgcagcgggcagcgccggcggaagcagtggagccgcgggtgcggcgggcggcggggcgggcgcggggacccggccgggtgacggcgggaccgccagcgcgggggctgcgggcccaggggccgccaccaaggctgtgacgaaggacgaagatgaatggaaagaattggagcaaaaagaggttgattacagcggcctcagggttcaggcaatgcaaataagcagtgaaaaggaagaagacgataatgaaaagagacaagatccaggtgataactgggaagaaggtggaggtggtggtggaggtatggaaaaatcttcaggtccctggaataaaacagctccagtacaagcacctcctgctccagtaattgttacagaaaccccagaaccagcgatgactagtggtgtgtataggcctcctggggccaggttaaccacaacaaggaaaacaccacaaggaccaccagaaatctacagtgatacacagttcccatccctgcagtcaactgccaagcatgtagaaagccggaaggataaagaaatggagaagagctttgaagtagtaagacacaaaaatagaggtagggatgaggtttcaaaaaaccaggcccttaaacttcagctagacaaccaatatgctgtgcttgaaaatcagaaaagcagccactcacaatacaattaaggaatgggctttgctaacccttctgaggtaactagactgcagctaaccaccaccaacagccattcatcatctgatctctgctggatctacagacaccgatgcagaccactcgatttcatgaccggccctattgcactatggaagttaaagtgtcacgactgctctatgcatattggatttaggggaattttcattgttacataaatgtgtgaactagtttcaacagtgttctttcatatttactctgcaaatacaaaaaaccaaaacctgcagccagtggtcatttcaaaatctttttatgttcagatactgagccttcataagggttgactacctcagatttgctgcactcattgtggacttcatgtggatcacaacttctggataagaagattacaactattaagtgtcgatgtgaaccttgcaaccagctctactggattcttatcagaaatcctgcataaaaagtcagccatctgggttctgatctgctgtaaaagatgaagatttaagtgaccttaattaacctgtcctgtgccctacccttaaggaatactctctgtagtaggctgttgttatattagacttcctggaacacaccgctgaaaagaactgatgtgttcagatcatctgtgtagggctgtgatttgtaatttaaactaattgtattctgaggtaaccacaaaataaattcaaccaaactggggtccaccaagtgggggaaggggaagggagagaataatcttgggggtttttttttttggtaatttttttatttggatagtgcttttttgttttgtttttgttctgcattaaggccttttttgctttgacttgaaataagttctttgacagagcatattgcttggttaattaagtaacctaaagtatgcattaggattgtgaaatgtctcgtgagtatgccaatcctgagggtggaaccaaatagcctttgatgaaaagggcagtggattctggaggctctacttcaggtgctgctataatgcctcatctaatcaggactaaattgtgtaggaaactgcagtgggaagaatatgctttctgctcaggctaagagggtcactgatctgtccttagaaattcagagtaacatgagcaaaacctcagctaaaacccatttaagtggcatggattgtgcatgatctttgataagaattcctcatgtacttgtgcctagtttttcaaggtattggctgttctatagatgcagtgattgtcccagctagctctgttaccagccttttggtgtgtctttatgttcatttggagagtcagggcgaaagacaggtgatgtagcacttctgtttttaataattattgcttaaaatacctattaatagttttgggtcatttaaagggacttgaggaagctacccaggattacagaagagtgtccacctaacaagatggtctggcagtttcctagttttgtatctggttcaatagaaatatgtgaaagtggtaatgtcatcatttgatgcagagtccgggtttctctataataaatccctttgccaaatgcatgagttgcagacttgctactggcaagagtgaagcaagtgggtgagtaaaactattttgacgtgggagcgttttcagataggagtttagtcttgacgaaagtgtccgtgcaggaattggactccgaggagggttacagtatctcctgacgggacctgccactcgcatctgggcaatgttgacatttgaggtggcaggcaggatgcctgccttctaatatatttgggtgagtaactgagccagccaagggaaggttgaatgattaaatcagaaatgggattcttggtaaactgaagacttttatttgggaatgaaaaaccttaaaaaaatctcttcatcgttgaactgtgcattttccctgcattttttcccaacaaaattttgttgggggttatgttactgaagaatgaacagatgagtaagtggaggtgttatgtaaaggcatattgtactcgaaatctgaagacctgcagcagatttaaattacaactcttgttataactttttaaaagattgtgaaaatatcaaaatataaatgaatcaagttttaatatactgtatgatgggtggatgaggctgtccattgtaccatttgtttgaattctcaggcatggtttggcagtgcaagaattctgtaacattaacaaattcaataaaaagtaaatatatggaaaaaaaaaaaaaaaaaaaaaaaaaaaaaaaaa

SEQ ID NO: 1703 - DNA, 2954 bp, Homo sapiens
aggtctggacctgaaccgagacaaggaggtaccacactattcactgctgcgtcgcagagcgggctgggcggctgtctggacctcgagaggcctgaggcaaggatcgcgtcagaccccgaaagctggtttgttgattagtgatctaagaccgccggaagcgcttcttctcaatcaagctatgcaacaggaagtcattacgatcccgttgtaacctctaaatatgtccccgttctgcacagcatcccgataaccgttttgtttttctcatattatgaccttctcatgttagcaccacttcgcaacgctccaggtcgtgaaggagcaacttcaccatcgccgcctacagacgccactgggagcttgggagagtgggacgtggacaggaacgtaaagaccgaagggtgggtttcgaaggagcggatttcgaagttgcaccggttgaggatggctgacattctctctcagtcagagaccctggcgtcgcaagacctcagtggggacttcaagaagccagctctgccggtgtccccagcggcgcggagtaaggccccggccagcagttcttcaaaccctgaggaggtacagaaggaagggcccactgcgttgcaggactccaattctggggagcccgacatccctcctcctcagccggactgcggtgattttaggagtctacaggaggagcagtcgcgccccacgacagcggtttcttcccctggcggtccagcccgggctcccccctaccaagagcctccatggggtggccctgccacagccccctacagcttagagaccctgaagggcggcactatccttggcacccgtagcttgaaagggacgagttactgccttttcgggaggctgtctggctgcgacgtgtgcctggagcacccttcggtgtctcggtaccacgcagtgctgcagcacagggcgtccggccctgacggagaatgcgacagcaacgggccgggcttctacctctacgatctgggaagcacccatggcacttttctcaacaaaactcgcatcccacctcgcacctactgtcgagtccacgttgggcatgttgttcgctttggaggcagcacccggctctttatcctgcagggaccagaggaagaccgagaggcagaatccgagttaacagtaacacagttgaaggaattgcgcaagcagcagcaaatattgttggagaagaagatgctaagagaagactcagatgaagaagaggaaatggatacctctgaaaggaagataaatgctggtagccaagatgatgagatgggttgcacctggggaatgggagaagatgcagtagaggatgatgctgaagagaaccctattgtcttagagtttcagcaggaaagggaggccttttatataaaggatcccaaaaaggttctccaaggcttttttgaccgagaaggagaagaattagaatatgaatttgatgaacagggacatagcacttggctctgcagggtgagattacctgtggacgattcaactggaaaacaactggtggctgaggccattcactcaggaaagaaaaaagaagcaatgatccagtgctcattggaagcttgtcggattcttgacactttgggattgcttcggcaggaagcagtatctcggaaaaggaaagccaagaactgggaagatgaagacttttatgatagtgatgatgacacatttcttgataggactggcctgattgagaagaagcgtctgaacagaatgaagaaggctggcaagattgatgagaagccagagacctttgaatcattggttgcaaaattaaatgatgctgaaagggaactttctgaaatttctgagagattgaaagcctcaagccaagttctatcagagtctccatctcaggattctttagatgcgttcatgtcagaaatgaaatcaggcagtacattagatggtgtgtcccggaagaaacttcacctgagaacttttgaactgaggaaagaacaacagagacttaaagggttaataaaaattgtaaagccagcagagattccagaactaaaaaagactgaaactcagactacaggtgcagaaaacaaagctaaaaagcttacattgcctctatttggtgccatgaaaggaggaagcaaattcaaattaaaaactggaacagtagggaagttaccccccaagcgtccagaactccctccaactctaatgagaatgaaagatgagcctgaagtagaagaggaggaggaagaggaagaggaagaagagaaagaaaaggaggagcatgaaaagaaaaaactggaggatggaagcctcagtaggccacagccagagatagagccagaagcagcagtgcaggaaatgaggcctcccacagatctcacacattttaaagaaacccaaacccatgaaaacatgtctcaacttagcgaggaagaacagaataaagattatcaagactgtagcaaaaccacttcattgtgcgcaggaccctcagcatcaaagaatgaatatgagaaaagcagaggtgaattgaagaaaaagaaaacacctggtccaggcaaacttccaccaacactttcttccaaatatcctgaagatgacccagactactgtgtgtgggtcccacctgaaggtcaaagtggagatggcagaacccatcttaatgacaagtatggctattgattgcttcagaatcccaaaagaaaaccttgtggaccatgtgacatggaatatttgggataatgtatcaaattgaatggccagagaagtttagatgattatttgtaagatctggtgactggcttttcgttctgtgttcttggcttcctaaatttatctgcccacatgattctcatgcatttgatatttatgtttaaaagtgtttatatatgtatgtaaaaagggaaccatatgttttgagaatttgtaaagtgagagacatgatcctattaaaataagaaggc

SEQ ID NO: 1704 - DNA, 2085 bp, Homo sapiens
cagcctcggagggtgagcgtcatggcggcttcttgccctctcccggtgaccccggacctgcccacgctgcgtgccaagttgcagggactgctgcagttcctgagggatgccctgtccatttccaatgcacataccgtggatttctacacagaatccgtgtgggaggagctggtcgacttgccaccggagacagtgctggctgcgctgaggaagtcagcgtcggagacggaggccctgccctcagagacgcgccccctagtggaagcagagtgggaagcaggtatgactgattttcccaaaatattttgtgaaacttctcagaagttggtgagtgtggaagcctttgctctggctgcgaaatactattctgtacaaaacttgggaatatgtactccttttgaacagttgcttgtagcccttcgaggaaatcaaaaccagagaattggtgaaaatcagaaggcagttgagtttatgaatatgaagaaatctcatgaagttcaggcaatgtcagagctgattagcagtattgctgactactatggaataaagcaggtgattgacttgggttccggtaaaggctacctaagctcttttttgtccttgaagtatggcttaaaagtttatggaattgattcttcaaataccaatactcatggagctgaggagagaaacagaaaattgaagaaacattggaaactctgtcatgctcagtcaagattagatgtcaatggactagcattaaaaatggcaaaagaaaggaaagtgaaaaataaagttaaaaataaagctgatactgaggaagtgtttaacaacagtcctacaaatcaagaaaagatgcctacctcagctattttgcctgatttttctggctctgtaatttctaatatcagaaaccaaatggaaacccttcattctcagccacatcaagaagaaaatttgtgttttgaaaattccttttctcttataaaccttttgcctattaatgctgtagagcctacttcttcacagcaaatacccaacagagaaacatctgaagccaataaagagagaagaaaaatgacatcaaagtcaagtgaatcaaatatatattcacctttaacctcttttatcactgctgattcagaactccatgacattattaaagatttggaggattgtttgatggtgggtctccacacttgtggtgatctggctccaaatactttgcgaatatttacctccaactctgaaatcaagggagtttgcagtgtgggttgttgctaccacctcttatctgaagaatttgaaaaccagcataaagaacgtactcaggaaaagtggggatttccaatgtgccactatttaaaggaagagagatggtgctgtggtcgtaatgccagaatgtcagcatgtttggcattggagcgggttgcagctggccaagggctgcctactgaatcactcttctatcgtgctgttcttcaggatattattaaagattgttatggcatcaccaaatgtgatcggcatgttggtaaaatttattccaaatgttcttcttttctggattatgtcagacggtctctaaagaagcttggattagatgagtccaagctgccagaaaaaattataatgaactactacgagaagtataagcctcgaatgaatgagctggaagcttttaatatgttgaaagttgtactggctccctgtatagagactttgattcttctggatcgactttgttacctgaaagagcaggaagatattgcatggtctgctcttgtgaagttgtttgatcccgtgaaatctcccagatgttatgctgttattgccctgaagaagcagcagtgatttccattgaagcaaattattagatgtatttctctatgagacctgttgctgagattgcttttctaaacatatatgtcctgttatacaaaaatttttaaatgactgttatgtattttaaataataaaataatggctaacaacaaaaaaaaaaaaaaaaaaaaaaaaaaaaaaaaaaaaaaaaaaaaaaaaaaaaaaaaaaaaaaaaaaaaaaaaaaaaaaaaaaaaaaaaaaaaaaaaaaaaaaaaaaaaaaa

SEQ ID NO: 1705 - DNA, 4851 bp, Homo sapiens
ggggttgacgatggctgtgttgttgaagggcctgtagccggggggttcctggccggatcccggtctacccttagcccagactcgttccggaccccagcccggcccggaacactctgggcgagacggcggtggcaactctccccttgccgccatgcacgacgctttcgagccagtgccgatcctagaaaagctgcctctgcaaatcgactgtctggctgcctgggaggaatggcttcttgtgggaaccaaacaaggacatcttcttctctataggattcggaaggacgttggttgcaacagatttgaagtgacactagagaaatccaataagaacttctccaaaaagattcagcagatccatgtggtttcccagtttaagattctggtcagcttgttagaaaataacatttatgtccatgacctattgacatttcaacaaatcactacggtttcaaaggcaaagggagcatcactgtttacttgtgacctccagcacacagagaccggtgaggaggtgttacggatgtgtgtggcagtaaaaaagaagctgcagctctatttctggaaggacagggaatttcatgaattgcagggggactttagtgtgccagatgtgcccaagtccatggcgtggtgtgaaaattctatctgtgtgggtttcaagagagactactacctaataagggtggatggaaaggggtccatcaaagagctctttccaacaggaaaacagctggagcccttagttgcacctctggcagatggaaaagtggctgtgggccaggatgatctcaccgtggtactcaatgaggaagggatctgcacacagaaatgtgccctgaactggacggacataccagtggccatggagcaccagcctccctacatcattgcagtgttgcctcgatatgttgagatccgaacatttgaaccgaggcttctggtccaaagcattgaattgcaaaggccccgtttcattacctcaggaggatcaaacattatctatgtggccagcaatcattttgtttggagactcatccctgtccccatggcaacccaaatccaacaacttctccaggacaagcagtttgaattggctctgcagctcgcagaaatgaaagatgattctgacagtgaaaagcagcaacaaattcatcacatcaagaacttgtatgccttcaacctcttctgccagaagcgttttgatgagtccatgcaggtctttgctaaacttggcacagatcccacccatgtgatgggcctgtaccctgacctgctgcccacagactacagaaagcagttgcagtatcccaacccattgcctgtgctctccggggctgaattggagaaggctcacttagctctgattgactacctgacacagaaacgaagtcaattggtaaagaagctgaatgactctgatcaccagtcaagcacctcaccgctcatggaaggcactcccaccatcaaatccaagaagaagctgctacaaatcatcgacaccaccctgctcaagtgctatctccatacaaatgtggccctggtggcccccttgctacgcctggagaacaatcactgccacatcgaggagagcgagcacgtgctaaagaaggctcacaagtacagtgagcttatcatcctgtatgagaagaaggggctccacgagaaagctctgcaggtgctcgtggaccagtccaagaaagccaactcccctctgaaaggccacgagaggacagtgcagtatctgcagcatctgggcacagaaaacctgcatttgattttctcctactcagtgtgggtgctgagagacttcccagaagatggcctgaagatatttactgaagatctcccggaagtggagtctctgccacgtgatcgagtcctcggcttcttaatagagaattttaagggtctggctattccttatctggaacacatcatccatgtttgggaggagacaggctctcggttccacaactgcctgatccagctatactgtgagaaggtgcaaggtctgatgaaggagtatctcctgtccttccctgcaggcaaaaccccagtcccagctggagaggaagagggtgagctgggagaataccggcaaaagctcctcatgttcttggagatttccagctactatgatccaggccggctcatctgtgattttccctttgatggcctcttagaagaacgagctctcctgttggggcgcatggggaaacatgaacaagctcttttcatttatgtccacatcttgaaggatacaaggatggctgaggagtactgccacaaacactatgaccgaaacaaagatggcaacaaagatgtgtatctgtccctgcttcggatgtacctgtcgccccccagcattcactgcctggggccaatcaagctggaactactggagccaaaagccaacctccaggccgctctgcaggtcctcgagctacaccacagcaaactggacaccaccaaggccctcaaccttctgccagcaaacactcagatcaatgacatacgcatcttcctggaaaaggtcttggaagaaaatgcacaaaagaaacggttcaatcaagtgctcaagaaccttctccatgcagaattcctgagggtccaggaagagcggattttacaccagcaggtgaagtgcatcatcacagaggagaaggtgtgcatggtgtgtaagaagaagattgggaacagtgcatttgcaagataccccaatggagtggtcgtccattacttctgttccaaagaggtaaacccagctgacacttgagcccagcatcctggggatccagcggatggacagcttggctctcccagagaggtgaaggagcacctggccttaggaatcctggctgccaccaccacaaggctccccatttggacattactggctatcttgtgccctggaacaactctgaattaattagactcatggtctggcattgccagctttttaatgggaaaagagattagttataccttataccattatgttgtgggcaattccagagaattcagtacctgcttggtcaggaggatgtgcaccatcttgcctttgcacaccagtcacctgaacaaggaaacttgtcacaagtgtttgtaaccatggggttgttcatcaagggcttttctattaagtacatgacttcacaaggaccgctcagcatggctcactggagagttccatgagagaacagcactcaagcttctggccgcatggacccgatggctcgcattctgtgtagtgttttacgtctccatggtaactgtgccctgcacccctcggtagccgccctgttagttttcagtctccttttctttctcaccatttatcacttccctcactgccctacccaggctttctctcccacttccctgactctgggaataactaatatttaagcaaggtaagatgagaagcaaggggtctcagttctaggaatacagtgctagttgattgtcaggtatgttgtaaatagaccctctttggccatacactccatgcctagatgcctcggagagcatcattctctgcctaggcaaggccctgcatcccttgcctcaggccgggctgagtgtgactgcagctcctgaggatgggcctgccctgtctggggtatgcgtgatccctagatacatgttcccacagaggtgcctgctccgtcttcgctcaccagacactcaggcaggctggcttagtctttgtgcgtggcgattttgtgctctgggccctttctctttttccagccagtttccattcacttgccttacagcctgccctggccgtcactccccagctttgttcagcaatggtgtggttggagagttgtgctgggatagcgcaggaaggtgggtcccggcaacacgcaggggatgagtggacctggaactgacaatggcgtgctgccaagtgttcctgagaggtgtttaggcacagcagaggggacgcggggggcaagaacagcaggacgctggtttaaaaataactcaccgccaaacctgtggagcagtgtggggcatcctgccagaggtgcacaggctggagtttcaggcactgcaggctgatgacacacagggagagtggccctgcctcctgtcctccccggggtttttgcagactcgaagtctcactgcaccagtgtctttgatggtggtgagggtgggtgatggtgcccagcaccaacagttttagtggcctgtccttgacctgccgtggtcctttgtaaactatggctccatgctgtgtgacagatcaacgtgctgatggtaagtagactaggcttccccaggcatgccgtccgtgggggcctgaagagacagtgagtgccattggccccattcgcagatgtgggagactctgctcaggcctgtgaggctgggcagcccttcaccagagttcggaggagcagtgtgtggcgccacgtcccgactggccatacccacacagaagcagtgctgcccggggcctcatctgggccagcttggactctgcttcctccaggagcagcagggaagctctgggccacctccctggatagcaggaacttgacctgccatgtgtgccctgccttcctggccagctgtgcttgttatcttccattctcacaaactgtctttgaagcaatagaataaagaatgtgtgttttctttcctggtatacatacatgatcccatgctcccaagctccattcttccttccctcaactctctgccctccacagagctatggagaaggctggagatgaaagctttgtagtgaggactgataaagatctcatcactgctccttataataaacctaataaagcaagaaaccaagcctaaaaaaaaaaaaaaaaaaaa

SEQ ID NO: 1706 - DNA, 2133 bp, Homo sapiens
agcggaggcggctgaagagttgctgtattctgggaatgggcagggtcactcgtccgaacagagtcctatcctacgcggcggaagagtgtgccctttgacttgcatcgtctacctacctctgccatcctctaccagccgcaactgcgagggctggagccaacttcaggactgattgatcatgacttctataaaggagcaggcagcaattagcaggctcttaagttttttacaggagtgggacaacgctggcaaagtcgcaaggagtcacatcctcgacaagttcattgaaaccaaccaaggcaagactgcccctgaactggagcaggagttttcccagggagccagtttgttcctggtacgcttgaccacctcgcttagaatcacctatatgactgactcatgtttagaaaagcttctcaggtccattggcatcttcttatcagctgtaagcagtaatcggtaccttatagaatttcttgaggttggaggtgtcctaaccctcttggaaatacttgggctagagaagatcaaggaggaggccaagaaggaatctgtcaaactacttcaggttattgcgaactctggcaggacatacaaggaactcatttgtgaaagctatggtgtacgatccatagcagaatttttggcaaagtctaagtcagaagagacccaggaggaagtgcaggttctgttggattctttggtccacggcaatcccaagtaccaaaatcaagtgtataaaggtctaatagctttgctgccctgcgagtccccaaaagcccagcagctgtccctgcagactctcaggactgcccagccaatcattgggaccacacaccccagcatcgtggactgcgtgctgaaggtgctgggcacgatgcacctggaagtccagtatgaagccatcgagttgatcaaagacctggtcggttacgatgtgcgccaggcgctgctcaagggcctcgtggcgctgctgataccgtcggtcaaggagatctccaaactgcaggccaagatcctcagtgacccctcggttctccagctcacccccagcctgccgatgtttttgcagcaggccgcggccgccaaggccatcgggtaagcgggcaggggttagtgggtagctgcagcaagcctggcttggcgctgccggcgggccccgggagcgctccgtgcgccgggtgggcgggggtgtgcgccgggtgagccccagggcgtcgccccagcccgaacccccggcccagggtcctggcgcgcaacgacatgagcatcgccgaggagctgctgtacctgcgcgtggtgcgtggcctaatggccgccatgggcaacacggaccacagcaacagccagcggctggccagcctcacgctggagatgttccccttggtggcggagcacgtgcgcaagtgcatgggggaggaactctaccagctcttcctggtaagtgcgcccttcctgccccgccgcaatgagcagatggcggctcggacagtgtgatgccccttcagacagtccccatcctggagcgcgccacatgcagagtggacctggccaccagctgcaggagggactgctctggcgtaggctcctccacccgccaccttcctgttccctttcctgccctttcggtcaggctgccgacccgcaccccacctgcaacatccctctgccaagcccaactccaagtccagactgccctggcaccccagccgggtcccccttgctcctgtcctcagagcaacgctgaggacttgtacatgaaaatagacagcattcaggcggacatcttggcggccaacacagtcaatgttaccaaagccctgtgcctccatggcagctcctacagcatgaacactctctatggctcgcgcgattcggctcagatggcctacctcacacacttcgaggaggatgtagaatcaaaggagtaacagcccctgtggcaaaccaggaaggccaaggctgcggggcagggaagcctggcaagaggaaggcgcctggggtcaagctcagagccactccacttggctccaggggggagacggggattaggcatcccagaggggcagaggaagagccgctggctgcgaagagtcaataaacagccttgatacctgaaaaaaaaaaaaaaaa

SEQ ID NO: 1707 - DNA, 1993 bp, Homo sapiens
ccgctctgtctgcttcgccaccttctccccgagcactgcccggccggccgccatggctaacgtggctgacacgaagctgtacgacatcctgggcgtcccgcccggcgccagcgagaacgagctgaagaaggcatacagaaagttagccaaggaatatcatcctgataagaatccaaatgcaggagacaaatttaaagaaataagttttgcatatgaagtactatcaaatcctgagaagcgtgagttatatgacagatacggagagcaaggtcttcgggaaggcagcggcggaggtggtggcatggatgatattttctctcacatttttggtgggggattgttcggcttcatgggcaatcagagtagaagtcgaaatggcagaagaagaggagaggacatgatgcatccactcaaagtatctttagaagatctgtataatggcaagacaaccaaactacaacttagcaagaatgtgctctgtagtgcatgcagtggccaaggcggaaagtctggagctgtccaaaagtgtagtgcttgtcgaggtcgaggtgtgcgcatcatgatcagacagctggctccagggatggtacaacagatgcagtctgtgtgctctgattgtaatggagaaggagaggtaattaatgaaaaagaccgctgtaaaaaatgtgaagggaagaaggtgattaaagaagtcaagattcttgaagtccacgtagacaaaggcatgaaacatggacagagaattacattcactggggaagcagaccaggccccaggagtggaacccggagacattgttcttttgctacaggagaaagaacatgaggtatttcagagagatgggaatgatttgcacatgacatataaaataggacttgttgaagctctatgtggatttcagttcacatttaagcaccttgatggacgtcagattgtggtgaaatacccccctggcaaagtaattgaaccagggtgtgttcgtgtagttcgaggtgaagggatgccgcagtatcgtaatccctttgaaaaaggtgatctttacataaagtttgatgtgcagtttcctgaaaacaactggatcaacccagacaagctttctgaactagaagatcttctgccatctagaccggaagttcctaacataattggagaaacagaggaggtagagcttcaggaatttgatagcactcgaggctcaggaggtggtcagaggcgtgaagcctataatgatagctctgatgaagaaagcagcagccatcatggacctggagtgcagtgtgcccatcagtaaactctgcaaacaaattgcacaggtggattttctttccacatttgcctgatttgttctcagcaatccagctggagtgtcttatcaatcccagatgaactgagggacatctgttggtctatgtataacttttaaaattggtatagtatctacagagtgtataatttaaactaaccacaaagctttacatcttcattttgactgttccatagcaaaataaagcacttgaaaggaaacaaaactccctttcacacatggattattataagtttcaatcctggtatctgtgcttgatttttatcagttttgtgtaaatttttatgtttcatattttaaatttaaatcccacattgtaaagtttgtacaatttgtcctgaagctttgtgtttggctgcacctgcataagctgctacaaataaaataaaaaatttcatagcctgtatctatcatttaaatgcatggaaaaaaatgggctttgcacacaatgggtttggagctgactgggaacaatggaaaaaattacattagctgtggttgtaaagtttttttgtttttgggttttgttttttttttgttttttttttttttttttttaccattttgtgaaaggtttttgaaaatcgataataaaaagcggttggtgtaaatttaaaaaaaaaaaaaaaaaaaaaaaaaaaaaaaaaaaaaaaaaaaaaaaaaaaaaaa

SEQ ID NO: 1708 - DNA, 1445 bp, Homo sapiens
gtccggaggaggcgttgtgaggtgagctttttcagaagcgcgatcccaggacacgtcgggaagcaagcatccccagagctgcttggaaagaggaccaaagacgtctaaaaagtcatttggaaatatctctaaatatttgttaccatgtataagctgctaaagagaaattgggcccaacaaaactaattgaataattgaggcagatttgtgtgtatcatcaaattctatccagaagttgaagaatctgaatttaaagattgtgtgcatttaataagaggatgacctttcagtttaatttcactatagaagaccatctggaaaatgaattaacacccattagagatggagctttgaccctggattcctcaaaagagctgtcagtctcagaaagtcaaaaaggagaagagagggacagaaaatgttctgcagaacaatttgacttgcctcaggatcacttgtgggaacataagtcaatggaaaatgcagctccctctcaagacacagacagtccactcagtgcagccagcagttcaaggaacttggagccacatggaaaacagccctccttgagagctgccaaagagcatgctatgcctaaagatttaaagaagatgttagaaaataaagtcatagaaacattaccaggtttccagcatgttaagttatcagtagtgaaaaccatcttgttgaaagagaacttccctggagaaaacatagtttcaaaaagcttttcttctcactctgatctgattacaggtgtttatgagggaggcttaaaaatctgggaatgtacctttgacctcctggcttatttcacaaaggccaaagtgaaatttgctgggaaaaaagtcttggatcttggttgtggatcaggtttactaggtataactgcattcaagggagggtccaaagaaattcactttcaagattataacagtatggtgattgatgaagtaaccttacctaatgtagtagctaactccactttggaagatgaagaaaatgatgtaaatgagccagatgtgaaaagatgcaggaaaccaaaagtaacacaactatataaatgccgatttttttctggtgagtggtctgagttttgtaagcttgtactaagtagtgaaaaactttttgtaaaatatgatctcattctcacctcagaaaccatttacaacccagattattatagtaatttgcaccagactttccttagactgttaagtaaaaatggacgtgtacttttggccagcaaagcacattattttggtgtaggtggaggtgttcatctctttcagaagtttgtagaagaaagagatgtttttaagaccagaatactcaaaataattgatgaaggattgaagaggttcataattgaaataacttttaagtttcctggttaattaacattcactgagtatccaaaatgaaataaacagaaggaccaaaaa

SEQ ID NO: 1709 - DNA, 2351 bp, Homo sapiens
tgcgggcaggattcacgccgctgtgacccggaggtcctcagggggcgaagccccggcctaggcctcgcggagatgcccagctgcggtgcttgtacttgcggcgcggcggccgtccggctcatcacctcctcactcgcctccgcgcagagaggtatttctggtggtcgcattcatatgtcagttttaggaaggcttgggacatttgaaactcagattctgcaaagagctcctcttagatcctttacagaaacaccagcatactttgcctcaaaagatgggataagtaaagatggttctggagatggaaataagaaatcagcaagtgagggaagtagtaagaaatcaggctctgggaattctgggaaaggtggaaaccagctgcgctgtcctaaatgtggcgacttgtgcacacatgtagagacctttgtatcatccacccgttttgtcaagtgtgaaaagtgtcatcatttttttgttgtgctatctgaagcagactcaaagaaaagcataattaaagaacctgaatcagcagcagaagctgtaaaattggcattccaacagaaaccaccacctccccctaagaagatttataactacctcgacaagtatgttgttggccagtcatttgctaagaaggtgctttcagttgctgtgtacaatcattataagagaatatataataatatcccagctaatctgagacagcaagcagaggttgagaagcagacatcattaacaccaagagagttagaaataagaagacgggaggatgagtacagatttacaaaattgcttcagattgctggaattagcccacatggtaatgctttaggagcatcaatgcagcaacaggtaaatcaacaaatacctcaggaaaaacgaggaggtgaagtattggattcttctcatgatgacataaaacttgaaaaaagtaatattttgctgcttggaccaactgggtcaggtaaaactctgctggcacaaaccctagctaaatgccttgatgtcccttttgctatctgtgactgtacaactttgactcaggctggatatgtaggcgaagatattgaatctgtgattgcaaaactactccaagatgccaattataatgtggaaaaagcacaacaaggaattgtctttctggatgaagtagataagattggcagtgtgccaggcattcatcaattacgggatgtaggtggagaaggcgttcagcaaggcttattaaaactactagaaggcacaatagtcaatgttccagaaaagaattcccgaaagctccgtggagaaacagttcaagttgatacaacaaacatcctgtttgtggcatctggtgctttcaatggtttagacagaatcatcagcaggaggaaaaatgaaaagtatcttggatttggaacaccatctaatctgggaaaaggcagaagggctgcagctgctgcagaccttgctaatcgaagtggggaatcgaatactcaccaagacattgaagaaaaagatcggttattgcgtcatgtggaagccagagatctgattgagtttggcatgattcctgagtttgtgggacggttgcctgtggtggttccattgcatagcctagatgagaaaacacttgtacaaatattaactgagccacgaaatgctgttattcctcagtaccaggccttattcagcatggataagtgtgaactgaatgttactgaggatgctttgaaagctatagccagattggcactagaacgaaaaacaggtgcacgaggccttcggtccataatggaaaagctgttactagaaccaatgtttgaagtccctaattctgatatcgtatgtgtggaggttgacaaagaagtagtagaaggaaaaaaggaaccaggatacatccgggctccaacaaaagaatcctctgaagaggagtatgactctggagttgaagaagaaggatggccccgccaagcagatgctgcaaacagctaaactgtcatattgctgtcttgtatatacagcttttccttcttttgtttaggatcataattgtctctacagtctgatattaaaggcattggatctatcttggatatcatacatggtcagagaagcctttaggagaagaatcagatcatgtatataattgtaacatcacattgattttacggaagatgttatatggactttaatgacacaatgtttagagataaaatgtacattattttggttcagttttttaaaaaaaatatgctttaacaaaattcttaggaattcttttaagcaatgcaggtattgcgataactgtagattttacaataatgttactctacaaatgggaaaataaattctttaaaattgaatattga

SEQ ID NO: 1710 - DNA, 1454 bp, Homo sapiens
ggtaaggtgtagctgttctgtcccagtccccgtagctctgcaccgagcagaagaggtctagggtcacgcaggggccatggctgaggcacttgggcttggttctggcaggcggagcggacggggctgagagcggggccctacgggcggaagaggagcactggaagaaggaagagacaaatgttggggtctacggattcagttccagtttaatgatgtggccctctaaggagataattttgccttaaacagaaagacttgaccctcttaggtgtcatacctaagatcagtgtgttttttgtgtccaattcttttatcaccaaaaaagagaagaaatattgcagtgaatgaagattcctctgcattttagcactgctttttcaactgtagttggcttttgaatgaggatgacaatggaagagatgaagaatgaagctgagaccacatccatggtttctatgcccctctatgcagtcatgtatcctgtgtttaatgagctagaacgagtaaatctgtctgcagcccagacactgagagccgctttcatcaaggctgaaaaagaaaatccaggtctcacacaagacatcattatgaaaattttagagaaaaaaagcgtggaagttaacttcacggagtcccttcttcgtatggcagctgatgatgtagaagagtatatgattgaacgaccagagccagaattccaagacctaaacgaaaaggcacgagcacttaaacaaattctcagtaagatcccagatgagatcaatgacagagtgaggtttctgcagacaatcaaggatatagctagtgcaataaaagaacttcttgatacagtgaataatgtcttcaagaaatatcaataccagaaccgcagggcacttgaacaccaaaagaaagaatttgtaaagtactccaaaagtttcagtgatactctgaaaacgtattttaaagatggcaaggcaataaatgtgttcgtaagtgccaaccgactaattcatcaaaccaacttaatacttcagaccttcaaaactgtggcctgaaagttgtatatgttaagagatgtacttctcagtggcagtattgaactgcctttatctgtaaattttaaagtttgactgtataaattatcagtccctcctgaagggatctaatccaggatgttgaatgggattattgccatcttacaccatatttttgtaaaatgtagcttaatcataatctcacactgaagattttgcatcacttttgctattatcattcttttaagaattataagccaaaagaatttacgccttaatgtgtcattatataacattccttaaaagaattgtaaatattggtgtttgtttctgacattttaacttgaaagcgatatgctgcaagataatgtatttaacaatatttggtggcaaatattcaataaatagtttacatctgttaaaaaaaaaaaaaaaaaa

SEQ ID NO: 1711 - DNA, 1313 bp, Homo sapiens
gatccgggagttgaagagggctgcaaggtgggaagtgaagtcagtgcctcagttgctgctttctcctctaaatcttggtctcttgtttggaagtgactaacagcattttggcatgagaaagccctaaaaagatcagtgtgttttttgtgtccaattcttttatcaccaaaaaagagaagaaatattgcagtgaatgaagattcctctgcattttagcactgctttttcaactgtagttggcttttgaatgaggatgacaatggaagagatgaagaatgaagctgagaccacatccatggtttctatgcccctctatgcagtcatgtatcctgtgtttaatgagctagaacgagtaaatctgtctgcagcccagacactgagagccgctttcatcaaggctgaaaaagaaaatccaggtctcacacaagacatcattatgaaaattttagagaaaaaaagcgtggaagttaacttcacggagtcccttcttcgtatggcagctgatgatgtagaagagtatatgattgaacgaccagagccagaattccaagacctaaacgaaaaggcacgagcacttaaacaaattctcagtaagatcccagatgagatcaatgacagagtgaggtttctgcagacaatcaaggatatagctagtgcaataaaagaacttcttgatacagtgaataatgtcttcaagaaatatcaataccagaaccgcagggcacttgaacaccaaaagaaagaatttgtaaagtactccaaaagtttcagtgatactctgaaaacgtattttaaagatggcaaggcaataaatgtgttcgtaagtgccaaccgactaattcatcaaaccaacttaatacttcagaccttcaaaactgtggcctgaaagttgtatatgttaagagatgtacttctcagtggcagtattgaactgcctttatctgtaaattttaaagtttgactgtataaattatcagtccctcctgaagggatctaatccaggatgttgaatgggattattgccatcttacaccatatttttgtaaaatgtagcttaatcataatctcacactgaagattttgcatcacttttgctattatcattcttttaagaattataagccaaaagaatttacgccttaatgtgtcattatataacattccttaaaagaattgtaaatattggtgtttgtttctgacattttaacttgaaagcgatatgctgcaagataatgtatttaacaatatttggtggcaaatattcaataaatagtttacatctgttaaaaaaaaaaaaaaaaaaaaaaaaaaaa

SEQ ID NO: 1712 - DNA, 1212 bp, Homo sapiens
tgcaaggtgggaagtgaagtcagtgcctcagttgctgatcagtgtgttttttgtgtccaattcttttatcaccaaaaaagagaagaaatattgcagtgaatgaagattcctctgcattttagcactgctttttcaactgtagttggcttttgaatgaggatgacaatggaagagatgaagaatgaagctgagaccacatccatggtttctatgcccctctatgcagtcatgtatcctgtgtttaatgagctagaacgagtaaatctgtctgcagcccagacactgagagccgctttcatcaaggctgaaaaagaaaatccaggtctcacacaagacatcattatgaaaattttagagaaaaaaagcgtggaagttaacttcacggagtcccttcttcgtatggcagctgatgatgtagaagagtatatgattgaacgaccagagccagaattccaagacctaaacgaaaaggcacgagcacttaaacaaattctcagtaagatcccagatgagatcaatgacagagtgaggtttctgcagacaatcaaggatatagctagtgcaataaaagaacttcttgatacagtgaataatgtcttcaagaaatatcaataccagaaccgcagggcacttgaacaccaaaagaaagaatttgtaaagtactccaaaagtttcagtgatactctgaaaacgtattttaaagatggcaaggcaataaatgtgttcgtaagtgccaaccgactaattcatcaaaccaacttaatacttcagaccttcaaaactgtggcctgaaagttgtatatgttaagagatgtacttctcagtggcagtattgaactgcctttatctgtaaattttaaagtttgactgtataaattatcagtccctcctgaagggatctaatccaggatgttgaatgggattattgccatcttacaccatatttttgtaaaatgtagcttaatcataatctcacactgaagattttgcatcacttttgctattatcattcttttaagaattataagccaaaagaatttacgccttaatgtgtcattatataacattccttaaaagaattgtaaatattggtgtttgtttctgacattttaacttgaaagcgatatgctgcaagataatgtatttaacaatatttggtggcaaatattcaataaatagtttacatctgttaaaaaaaaaaaaaaaaaaaaa

SEQ ID NO: 1713 - DNA, 4220 bp, Homo sapiens
acgttgcccgggatgcggacaggttccgccgcctccagcgccccatcctgagccgattatctgcaattatgaaatgaagtaactcaagatgagcaagttaaaagtgataccagaaaaaagccttaccaataattctaggatcgtaggactcctggctcaactggagaagatcaatgctgagccttcagaatcagacactgcccgatatgttacatcaaaaattcttcatctggctcagagtcaagaaaaaacaaggagagaaatgacagccaaaggttctacaggaatggaaattctgctgtcaacattagagaacacaaaagatcttcaaactacacttaatatcttaagcattcttgttgagctggtgtcagctggtggaggtcgaagagtgagtttcttagtcaccaaaggtggttcacaaatattgttgcagttacttatgaatgccagcaaagaatctcccccacatgaggacttaatggtacagattcattctattcttgcaaagattggaccaaaagataaaaaatttggagtaaaggctagaattaatggggctctgaatataaccctgaatttggtcaagcagaatttgcagaatcatcgcttggttctaccttgccttcagcttttacgagtatattctgccaactctgtgaattcagtatccttagggaaaaatggagttgtggaactgatgtttaaaatcattggaccatttagtaagaagaattccagtcttataaaggttgctttagacactcttgctgcattgctaaaatcaaaaacaaatgccaggagagctgtagacagaggatatgtccaagtgcttttaacaatttatgtagattggcaccgccatgataaccggcatagaaacatgctcattcggaaaggaattttacggagtttaaaaagtgttacaaacatcaagttgggaagaaaagcatttattgatgccaatgggatgaaaattctgtataatacttcgcaattgcctgttattcctgtgactggtcctgtggctcagctctacagcttacctcctgaagtggatgacgtagtagatgaaagtgatgacaacgatgatattgatgtagaagctgaaaacgaaactgagaatgaagatgacctagatcaaaattttaagaatgatgatattgaaacagatattaacaaactaaaaccccagcaagaaccgggacgaacaatagaagatctaaaaatgtatgaacaccttttccctgagcttgttgatgattttcaggactatgatttaatctccaaagaaccaaagccttttgtatttgagggaaaagtacgtggtcctattgttgttcctacggcaggcgagggaacatctgggaattctggcaatttaagaaaagttgtaatgaaggagaacatatcttctaaaggagatgaaggtgaaaagaagtctacctttatggatctagcaaaagaagatattaaagataatgatagaacattacaacagcagccaggtgatcaaaatagaactatttcatcagtccatggtttaaacaatgatattgtaaaggccttggaccgaattacattgcagaatattccttctcaaacagccccaggttttactgcagaaatgaagaaggactgcagtcttcctcttactgtccttacctgtgctaaagcatgtccacacatggctacttgtggaaatgttctgtttgagggaagaacagttcagctagggaagctttgctgcactggagttggaactgaagatgatgaagatactgagtcaaattcatcggtagaacaagcatcggttgaagtacctgatggaccaacactccatgacccagacctctatattgagattgtgaaaaatacgaagtctgtcccagaatattcagaggtggcttatcccgattattttggtcacattccgcctccattcaaagagcctattttagaaaggccttatggtgtacaaaggacaaaaattgctcaagatattgaaaggctaatacatcagagtgatatcatagatcgtgtggtatatgacttggataacccaaattacaccattccagaagagggagatattttgaaatttaactccaaatttgagtctgggaatctgcgcaaagtaattcaaattagaaaaaatgaatatgatcttattctgaactcagacataaacagcaatcattatcatcagtggttttactttgaagtcagtggaatgcgaccaggtgttgcttacaggtttaacatcattaactgtgaaaagtccaacagtcagtttaattatggtatgcaaccactcatgtattcggttcaggaagcattaaatgccagaccatggtggattcgtatggggactgacatttgttactataaaaatcatttctcaagaagttcagttgctgcaggtgggcaaaagggaaaatcctactatacaattacatttactgtcaattttccacataaagatgatgtttgctactttgcttatcactatccatatacgtattcaactttacagatgcatcttcaaaaattggaatcagcacacaatcctcagcaaatctattttcggaaagatgtgttatgtgaaaccctgtctggaaacagctgccccttggtgactataacagcaatgccagagtctaattattatgaacatatctgccatttcagaaatcgcccttacgttttcttgtctgctcgggtacatcctggagaaactaatgcaagttgggttatgaaaggaacgttggaatatctcatgagcaataaccccactgctcagagcttacgagaatcttatatttttaaaattgtccctatgttaaatccagatggtgtcatcaatggaaatcatcgctgttctttaagtggagaggatttgaataggcagtggcaaagtccaagtccggatttacatcctacaatttaccatgctaaggggctgttgcaatacttggctgcagtgaagcgtttacccttggtttattgtgattatcatggccattcccgaaagaagaatgtatttatgtatggttgcagcatcaaagagacagtgtggcataccaatgataatgcaacttcatgtgatgttgtggaggatacgggatacaggacattgcctaagatactgagccatatcgccccagcattttgcatgagcagctgtagcttcgtagtggaaaaatctaaagaatccacagcacgtgttgtagtttggagggaaataggagtacaaagaagttataccatggagagtactttatgtggctgtgatcagggaaaatacaagggtttacagattggtacccgagaactggaagagatgggagcaaaattttgtgttggtcttttacgtttgaaaagactgacctctccattggagtataatctgccttccagcctgcttgactttgaaaatgatttaattgaatcaagctgcaaagtaactagccctaccacttatgtcttggatgaagatgaacctcgattccttgaagaagttgattacagtgcagaaagtaatgatgagttagatattgagttggctgaaaatgtaggagattatgaaccttctgctcaagaagaagtactttctgactctgaattatcaagaacatacctaccttgagcccgctgccatctcttgttaactgcaaagaataaatgaaatatcttggtttttatttcccaggaagcttgagagaaatgagtttatacagagctgactcaaaaagacaaaaagtaacttgggccagtttggtttcaagataataaatgtgttattaattaatgataaaattggcgcttgttttattttcgatattcaatgcactttatgtagcattgaatgatcaaatattggatttacctttaaaaaaaaaaaacctgagtatcattgcatgaatttttatctccctatggttatatcctgcatcaagtggataattttgaagtgtgttcagaatataaaattgaaattttagagttgttgaaaatcctgacttgttgaaaactaatatatatgtacatggatttctatagatgtgtttgtttagaagtgggtagatattgcagataagactgttcttcagaatcatgttaactattgggttgtgactgaagtagtgcagggtttgccttgaaaccattacattctacatttaccaaattaaacaaataaaaactgtattaaatgttgc

SEQ ID NO: 1714 - DNA, 1418 bp, Homo sapiens
cacgaggggagtccgggaggggtcgctttgctcctccggaaggcttccccttcagccaatcaccgttcgaggcccgcccccgtcgccggaaggagccgtcgccccgagcaactacaacgtccggctttctgagttgggtggcgggaaaggcgatgagtaaaggccgggcagaagctgcggcgggagccgccgggatcctcctgaggtacctgcaggagcagaaccggccctacagctcccaggatgtgttcgggaacctacagcgggaacacggactgggcaaggcggtggtggtgaagacgctggagcagctggcgcaacaaggcaagatcaaagagaagatgtacggcaagcagaagatctattttgcggatcaggaccagtttgacatggtgagtgatgctgaccttcaagtcctagatggcaaaatcgtggccctcactgctaaggtgcagagcttgcagcagagctgccgctacatggaggctgagatgcagaaagaaatccaggagttaaagaaggaatgcgctggctacagagagagattgaagaacattaaagcagctaccaatcatgtgactccagaagagaaagagcaggtgtacagagagaggcagaagtactgtaaggagtggaggaagaggaagaggatggctacagagctgtctgatgcaatacttgaaggataccccaagagcaagaagcagttctttgaggaagttgggatagagacggatgaagattacaacgtcacactcccagacccctgaggggcccacggtcaggactggtggggactgcaggatgtcagaagagtgagatgtcttgcactggctaccttgtttttggttggcttttgttgttgttcctgctactttcacctttaagcagagcagtcaggagacaagcataaaccagagcactgggtagagaggatgagggctggtggctgggggtagacccagcccatttcattgtctaaattgcagtagcttgaggttaacatttagacttggaacaatgctaaaggaaagcatttggcaatatttattataatttaattttatataaaaatatttaatttcctctggatagtcaaacctgccagatatcaaacctgaggaaggcagaagtgaatttggagaactagggtagagagaggttgctataaaacgagcatttggagggcccacggcttcactcaggacctgctgggcttgtgtaccccaggagcccttttaagtatcttttgtacgcttttcaccccacccccaagtcctgggagaaatgcaggcaacactgagacatgggagaggccaagatatgcttgacagaaagggtgattttgaggctcagttaatatttcaaaattgtaaccgtagcaaaactgcattggtatttagaaaaaaaaaaaaaaa

SEQ ID NO: 1715 - DNA, 1349 bp, Homo sapiens
aactacaacgtccggctttctgagttgggtggcgggaaaggcgatgagtaaaggccgggcagaagctgcggcgggagccgccgggatcctcctgaggtacctgcaggaacagaaccggccctacagctcccaggatgtgttcgggaacctacagcgggaacacggactgggcaaggcggtggtggtgaagacgctggagcagctggcgcaacaaggcaagatcaaagagaagatgtacggcaagcagaagatctattttgcggatcaggaccagtttgacatggtgagtgatgctgaccttcaagtcctagatggcaaaatcgtggccctcactgctaaggtgcagagcttgcagcagagctgccgctacatggaggctgagctcaaggaattatctagtgccctgaccacaccagagatgcagaaagaaatccaggagttaaagaaggaatgcgctggctacagagagagattgaagaacattaaagcagctaccaatcatgtgactccagaagagaaagagcaggtgtacagagagaggcagaagtactgtaaggagtggaggaagaggaagaggatggctacagagctgtctgatgcaatacttgaaggataccccaagagcaagaagcagttctttgaggaagttgggatagagacggatgaagattacaacgtcacactcccagacccctgaggggcccacggtcaggactggtggggactgcaggatgtcagaagagtgagatgtcttgcactggctaccttgtttttggttggcttttgttgttgttcctcttacttttcactttagcagagcagtcaggagacaagcataaaccagagcactgggtagagaggatgagggctggtggctgggggtagaccccacgcatttcattgtctaaattgcagtagcttgaggttaacatttagacttggaacaatgctaaaggaaagcatttggcaatatttattataatttaattttatataaaaatatttaatttcctctggatagtcaaacctgccagatatcaaacctgaggaaggcagaagtgaatttggagaactagggtagagagaggttgctataaaacgagcatttggagggcccacggcttcactcaggacctgctgggcttgtgtaccccaggagcccttttaagtatcttttgtacgcttttcaccccacccccaagtcctgggagaaatgcaggcaacactgagacatgggagaggccaagatatgcttgacagaaagggtgattttgaggctcagttaatatttcaaaattgtaaccgtagcaaaactgcattggtatttagaaaaataaaaaatttccaat

SEQ ID NO: 1716 - DNA, 2258 bp, Homo sapiens
cccgggaaggcaggcgcgcgggttagaacgcgccagaggtcggcgcgcgcacacccgcaccgccccgaacccaggtagtgaggccagtgattccgagtgtgtgaggagcggcagtggcggcggaggagggggcggcgtgggtgggggcgggggcgggatgcgctccccggcccctctagccccgtggtggtacaacgcgaaggtgtgggaaggccgcgataaaccggaactgcagcccgccggacacctccggcttcacttccgtaagaggagaggagtgtacggcaaggggcgggaactggaacttggcccgcctcgttgtgagctgagctcagcggcacgcttttgtggcgtcactgcactgttaccccgccctacgtgtctctgacgctgacaccttctcactgtgaaacgtcgcgacctgtgacgtctggggggcgcctcaaatcttccactccagcatcggatcccggaaaggcagcgtcggagactggacccaaaactcttcctgttctgcctgcagagttgagccccgtccgggtcctggacccgcgtagtactgaccctggatccctgttcactgcgttctcgctccccgcgctccctgctggaccccgggatgccgggcatctccgcccgaggcctctctcatgaggggaggaagcagctagctgttaacctcacccgtgtcctggcactctaccgttccatcttggatgcctacatcatcgaatttttcacagacaacctatgggacacactcccttgctcatggcaggaagcattggatggactgaaaccaccacagctggccacaatgctgctggggatgcctggggaaggggaggtcgtcaggtacaggtcagtgtggccactcaccctgctggccctgaagtccacggcgtgtgccctggcctttacccggatgcctggctttcagaccccctcagaattcctggagaaccccagccagagctcccgactaacagctccattccggaaacatgtcaggcccaagaagcagcatgagatccggaggctgggagagttggtgaagaagctgagtgatttcacaggctgcacccaggttgtagacgtgggctcaggccagggccatctctcccgcttcatggctcttggcctggggttgatggtgaagagcatcgaaggggatcagagactggtggagagagcccagcgcctggaccaggagcttctgcaggctctggagaaagaggagaagaggaacccgcaggtggtccaaaccagccctcgtcactccccacaccacgtggttaggtgggtagaccccacagccctgtgtgaggagcttctgcttccactggagaacccgtgtcagggcagggcccgcttgctgctcacaggcctccacgcctgtggggatctgagtgttgccttgctgagacacttctcctgctgtcctgaggtggtggccctggcctcagtgggctgctgctacatgaagctgagtgaccctggcggctacccactgagtcagtgggtggctgggctgcctggctatgaactgccctaccggcttcgggagggggcctgccatgccctggaggaatatgctgagcggctacagaaagctggccctggccttcgaactcactgctaccgtgcagcactggagacagtcatccgacgggcccggcccgagctccgtcggccaggcgtgcagggtatccccagggtccacgagctcaagattgaagaatatgtgcagcgggggctacagcgagtggggctagatccccagctgccactgaatctggctgcccttcaggcccacctggcccaggagaaccgtgtggtggccttcttcagcctggctctactgcttgccccactggtggagacgcttattctactggaccggctgctgtaccttcaggaacagcttttccatgctgagctcctgcccatcttcagtcctgaactctctcccagaaacctggttctggtggccaccaagatgcccctgggtcaggctctttctgttctggagactgaagacagctgatgcagcctgaggagacatctcagaccccatcatctgaaagtgcccagagagcacagtggcagagtacatctcatccagagaaacagcaccctgcatcctccagagtcctggttccttcagtttcatcccctttctctccttccatggattatgtaatacattgtaaagttttaattaattaaaaattggatatctgaaaaaaaaaaaaaaa

SEQ ID NO: 1717 - DNA, 4372 bp, Homo sapiens
gttcagcccagcctgggcacagcacatggatggggcaggatgctgcccgcctgttctgggcccccccgccccctgctgagagcgttgtccccttcccagggcctctgtaggagggtggggcggggccaggcctgcccacggggtccaccttctgctccagccagaggagggtcctgtagggatcccagctggggaaggtgcagggggcctgggagactgcctctccgaagcggtgaaaccctcacccttccgtccctcccagccaccctccctaaaacttcccctgacagagggtggcagccccaggctctttgcataatcctgtggcttcgctgtcttcacccagcaccagcggacagggaagggcagagaaggccaccatggcgacactcctctcccatccgcagcagcgccctcccttcttgcgccaggccatcaagataaggcgccgcagagtcagagatctacaggatcccccgccccaaatggccccggagatccagcctccatcccaccacttctcccccgagcagcgggccctgctctacgaggacgcactctacactgtcttgcaccgcctgggtcatcctgagcccaaccatgtgacggaggcctctgagctgctgcgatacctgcaggaggccttccacgtggagcccgaggagcaccagcagacactgcagcgggtcagggagcttgagaagccaatattttgtctgaaggcaacagtgaaacaggccaagggcattctgggcaaagatgtcagtgggttcagcgacccctactgcctgctgggcattgagcagggggtaggtgtgccagggggcagccccgggtcccggcatcggcagaaggctgtggtgaggcacaccatccccgaggaggagacccaccgcacgcaggtcatcacccagacactcaaccccgtctgggacgagaccttcatcctggagtttgaggacatcaccaatgcgagctttcatctggacatgtgggacctggacactgtggagtctgtccgacagaagcttggggagctcacggatctgcatgggcttcgcaggatctttaaagaggcccggaaggacaaaggccaggacgactttctggggaacgtggttctgaggctgcaggacctgcgctgccgagaggaccagtggtaccccctggaaccccgcactgagacctacccagaccgaggccagtgccacctccagttccaactcatccataagcggagagccacttcggccagccgctcgcagccgagctacaccgtgcacctccacctcctgcagcagcttgtgtcccacgaggtcacccagcacgaggcgggaagcacctcctgggacgggtcgctgagtccccaggctgccaccgtcctctttctgcacgccacacagaaggacctatccgacttccaccagtccatggcgcagtggctggcctacagccgcctctaccagagcctggagttccccagcagctgcctcctgcaccccatcaccagcatcgagtaccagtggatccagggtcggctcaaggcagaacagcaggaggagctggccgcctcattcagctccctgctgacctacggcctctccctcatccggaggttccgctctgtcttccccctctctgtctcggactccccagcccggctgcagtctcttctcagggtcctggtacagatgtgcaagatgaaggcctttggagaactgtgccccaacaccgccccattgccccagctggtgactgaggccctgcagactggcaccactgaatggttccacctgaagcagcagcaccatcaacccatggtgcagggcatcccggaggcaggcaaggccttgctgggcctggtacaggatgtcattggcgacctgcaccagtgccagcgcacatgggacaagatcttccacaataccctcaagatccacctcttctccatggctttccgggagctgcagtggctggtggccaagcgggtgcaggaccacacgacggttgtgggtgatgtagtgtccccagagatgggcgagagtctgttccagctctacatcagcctcaaggagctctgccagctgcgcatgagctcctcagagagggatggagtcctggccctggataatttccaccgctggttccagccggccatcccctcctggctgcagaagacgtacaacgaggccctggcgcgggtgcagcgcgctgtgcagatggatgagctggtgcccctgggtgaactgaccaagcacagcacatcagcggtggatctatccacctgctttgcccagatcagccacactgcccggcagctggactggccagacccagaggaggccttcatgattaccgtcaagtttgtggaggacacctgtcgcctggccctggtgtactgcagccttataaaggcccgggcccgcgagctctcttcaggccagaaggaccaaggccaggcagccaacatgctgtgtgtggtggtgaatgacatggagcagctgcggctggtgatcggcaagttgcccgcccagctggcatgggaggccctggagcagcgggtaggggccgtgctggagcaggggcagctgcagaacacgctgcatgcccagctgcagagcgcgctggccgggctgggccatgagatccgcactggcgtccgcaccctggccgagcagttggaggtgggcatcgccaagcacatccagaaactggtgggcgtcagggagtctgtcctgcctgaggatgccattctgcccctgatgaagttcctggaggtggagctttgctacatgaacaccaacttggtgcaggagaacttcagcagcctcctgaccctgctctggacccacacactcacagtgctggtggaggcggccgcctcccagcgcagctcatccctggcttccaacaggctgaagattgccctgcagaacctggagatctgcttccacgctgagggctgtggcctgccacccaaggccctgcacactgccaccttccaggctctgcagagggacctggagctgcaggcggcctccagccgggaactcatccggaagtacttctgcagccgaatccagcagcaggcagaaaccacctctgaggagctgggggctgtgacagtcaaggcctcctaccgcgcctctgagcagaagctgcgtgtggagctgctcagcgcctccagcctgctgcccctggactccaatggctccagcgacccctttgtccagctgaccttggagcccaggcatgagttccctgagctggccgcccgggagacccagaagcacaagaaggaccttcacccattgtttgatgagacctttgaattcctggtgcctgctgagccgtgccgcaaggctggggcatgcctcctgctcaccgtgctggactacgacacgctgggggccgacgacctggaaggcgaggccttcctgccgctgcgtgaggtgcccgggctgagtggctctgaggagcctggtgaggtgcctcagacccgcctgcccctcacgtaccccgcacccaacggggacccaatcctgcagctgctggagggccggaagggtgaccgagaagcccaggtctttgtgaggctgcggcggcaccgggccaagcaggcctcccagcatgccttgcggccggcaccgtagccgtagaggtttgcggtggggctgggtccccggtggggacttgcaagggctttcctgtagggtctggggcttccccgccacatcgcggccctccagcctggcctaacacttggggagccccagcatgcggagtgcccagagtgcagacctcccctgcctcccatggtgatgggggctcagcagcgacatctctactcccgcctccctgcctccagccctggctgcaatgtctctaccacatcccagcaccagggggagcaaaccctgcccctgcccgcctctcagaaaagctgctgtggtgggcaggggattgggccatctgtctcctggccctggcccatctgcctcctggccttcctgttccagccactggggtgggggccaggttcactgggaccagggctacaggcacagagtctcctggaaaagggagaggggaccctgccaaagatgaggctccagctgccctggggggagggtggtggccattactagagggggcctgggtcctctccccaggggctgccagcatccaggccaggaagcctggagccaagaaccttctggctctgagggagcaagagctggcaggcggcagggctggcacagacagacggaagcagaaaggacagtttggctgctgtgtctgctgcgcacgccccctccccggacagcacctgccacctagaaactttcttagcaaaaaaaaaaaaaaaaaa

SEQ ID NO: 1718 - DNA, 683 bp, Homo sapiens
ctgcgcagatgaggggagactcgtcaccaggcgtgcagtgggcactgctgggctcccccatcccgtcctaacccggaacagccccgggcaggaggcgtggaaagtcgagggggtaaaccgcgaatgtgcgttgtgtaagccacggcgcagggtggggcgcgggcgggacttgggcgggcggggtgggcttggccgagctggcctccggggcaccgaccgctataaggccagtcggactgcgacacagcccatcccctcgaccgctcgcgtcgcatttggccgcctccctaccgctccaagcccagccctcagccatggcatgccccctggatcaggccattggcctcctcgtggccatcttccacaagtactccggcagggagggtgacaagcacaccctgagcaagaaggagctgaaggagctgatccagaaggagctcaccattggctcgaagctgcaggatgctgaaattgcaaggctgatggaagacttggaccggaacaaggaccaggaggtgaacttccaggagtatgtcaccttcctgggggccttggctttgatctacaatgaagccctcaagggctgaaaataaatagggaagatggagacaccctctgggggtcctctctgagtcaaatccagtggtgggtaattgtacaataaattttttttggtcaaattt

SEQ ID NO: 1719 - DNA, 5159 bp, Homo sapiens
cgcatggagcggcgcgggccgggggccgccacggcgaggggccgggccaggccgggcggagccagagcagctgagttccagataaaaactgtcagacccggcctgtaggctgctccattgccaatgaactccatgaaccccatgaaacctgccctgccccctgcgccacacggtgatggttcattcgcatatgagtctgtgccttggcaacaaagcgccactcagccggctggatcgctgtctgtggtcactactgtgtggggagttggcaacgcgacacagagccaggttttggggaaccccatgggccctgcagggagtccctctggcagctccatgatgcctggtgtggcagggggcagctccgccttgacctccccacagtgcctgggacagcaggcgtttgctgaaggcggcgccaacaagggctacgtgcagcaaggcgtgtacagccgcgggggctaccctggggcccccggcttcaccaccgggtatgcaggcggcccggggggcctgggcctcccctcacatgctgcaagaccctccactgacttcacgcaagcggcagctgctgcagctgtggctgctgcggcagccactgccaccgccacagccacagccaccgtggctgctctccaggagaagcagagccaggagctgagccagtatggagcgatgggggccggacagtcttttaacagccagtttctgcagcatggaggtccccgggggcctagtgtccccgctggcatgaaccctactggcataggaggggtaatgggcccctctggcctctcccccttggctatgaaccccacccgggcagcaggaatgacacccttgtatgcagggcagcgtctgccccaacatgggtatcctgggcctccccaggcccagccactgccccgacagggggtcaagagaacctactctgaggtgtatccagggcagcagtatctgcaaggaggccagtatgcacccagcaccgcccagtttgcgcccagccctgggcagccccctgccccctccccttcctaccctgggcacaggctgcccctgcagcagggcatgacccagtccctgtccgtgcctggccccacgggactgcattataagcccacagagcagttcaacgggcagggcgccagcttcaacgggggcagcgtcagctacagccaacctggcctgagtgggcctacccgttccatcccgggctatcccagttccccactgccagggaaccccacgccacccatgaccccaagcagcagcgtcccttacatgtcaccaaaccaagaggtcaagtctcccttcttgcctgatctcaagcccaacctcaactccttgcactcatcgccctctggaagcgggccttgtgacgagttgcggctgaccttccctgtgcgcgatggggtggtcctggagcccttccgcctgcagcacaacctggctgtaagcaaccatgtcttccagctgcgagactcagtctacaagaccctgataatgaggcctgacctggagctgcaattcaagtgctaccaccacgaggaccggcagatgaacaccaactggccagcctcggtgcaggtcagcgtcaatgccacgccgctcaccatcgagcgtggcgacaacaagacctcgcacaagccactctacctgaagcatgtgtgccagccaggccgcaacaccatccagatcaccgtcaccgcctgctgctgctcccacctcttcgtgctgcagctagtgcaccgcccatccgtccgctcggtgctgcagggcctcctcaaaaagcgcctcctgcctgctgagcactgcatcaccaagataaagcggaacttcagcagcggcaccatccctggcacccctgggcccaacggagaggacggggtggagcagacagctatcaaggtgtccctgaagtgccccatcaccttccgcaggatccagctccctgcccgaggtcatgactgtcgccacatacagtgctttgacctggagtcgtacctgcagctcaactgtgagcgggggacttggaggtgtcctgtgtgcaacaagacagctttgctggagggcctggaggtggaccagtacatgctgggcatcctgatttacattcagaactctgactatgaggagatcaccatcgaccccacgtgcagctggaagccagtgcccgtgaagcctgacatgcacatcaaggaggagccggatgggccagcactgaagcgctgccgcaccgtgagccccgcccacgtgctcatgcccagcgtgatggagatgatcgccgccctgggccccggcgctgccccctttgcccccctgcagcccccctcagtccctgcccccagcgactaccctggccagggttccagcttcctggggcctggaactttccctgagtccttcccacccaccacgcccagcaccccaacccttgctgagttcaccccgggaccaccccccatctcctaccagtctgacattcccagcagcctcctgacttcagagaagtctaccgcctgcctcccaagccagatggcaccagcaggtcacctggaccccactcacaatcctgggacaccaggactacacacctccaaccttggggcccctccaggtccccagctgcaccattcaaaccctcccccagcgtcccggcagtccttgggccaagcgagcttaggacctacgggtgaactggccttcagtcctgccacaggcgtgatggggccccccagcatgtctggagccggggaggccccagaaccagctctggacctgctcccggaactgaccaaccctgatgagctactgtcctacttgggcccacccgacctccctacgaacaacaatgacgacctgctttctctgtttgagaacaactgatcctgtgtttaccccaagcccggcggggacacgctcacagatgtcaccacagccctgcccttcatgcccagccccatgggacacccggtggtctttcccaaacctcccccaaaacacacctggagccagagccttctgccgccagccctgcccctgaattggaagcagccctgtgctcgatgggaggggctcccaggccggcagcccttgccacctccctctgccaagcctgctgctgcagaacggtttttgctgaggtgcccctgcccagccctgtccagccttgtccacacacacatctcacgcccctggtctcacagcctcacaccttgtccttccacccctgcctgcccccacccagcctgcttcttgtccagcattgatccttctgtttcaacaactcctccactgggcagagctgggcatctggcagggctggctctgtcccctgggcctttggctccagtggcccctgtgcccagcagtccagctcttggaacctcgctgaatggcagcctcttgggggcctggagctctggcagcccagccgtgtgtggtgtcaggttcctctccccaccccagcttcaagcagaggcctcggggtgggggagctacaaagcacaacaatgtacatagtgtagaaacactaacagctgggagaggggagccagctgtccagccagcatgttcctgttgtacagcccggtctccctgcgcgctctgctccttcccatgtgcagacagatcagggaggaacctccaatgggtgggggacagtgagcttcggcctggccgaggtgggtgggtgggctctcagattcagctctgtgtaaagattctctagcgggctgcgctcccaagttccccttctctgtgaaagtgaagaattagtacagctgtgttttttaaagccacctctctgtctccaccccatgggcccacacccaggtgggggaggaggaagccactgcatctgttggctcagggccccagcctgtgcgagcagggcgcctgggctgttgtgtctcctgtctgtgccgatctctattaaaggactccctcttggtgggcctggccgagtccctcctttgtgctcccagggactattttctcctcgtaagccagcgacctgcctaaagcttgggctgtgcctgcaaagcttgtgcaggacctgggggccaggtcgaccttcaagtggcttttggggccccaggttgagctctggatgtttcaagccaaggctcggctattcccgccccatagtaaatttccttttccctggaattttccaagttggcttcagctgaagagctgttttgtgaagcatcccaggcttgcccaggagagacatttgccactatgtcaccttatctgggcttgccctggggcactgagacagttgtttggcagccccagcccagccaggggctcatccttctcagctcttgtccctgggaggcctctgcttgtcacttcccagagattgcagaggtgtgtcctgcctaccatctgcctgtccagcttggtgggggtccgggtcaccatttcctccagtcctgggccccatccttgagggccttcccagccagccagcaggagaggcaagaactgggggaacacaggaacctaggggaggaggggagcgctgggcatcctcaggctggcggccaaggcctgcccctggaggcactagaggagggcatctgtctgtgggagcccagaggctgcagggaggaggaggagggaggtatctggtgtgagcgttgcccctgcgacatttgggaccacacaggtgggcttccttattccctgacaaagcctctgtttccagctcttccgccctctctggatgagggaacagaagtggaggaaacaaaagaagcagcagcacgcacagtcctgtcgctgggtgcggagacagcctggcaaagtcccactcagccatggcctgatgcaggccccaggccctcctttcttgggtgtcaaatgactgtgtcctggacatctgatgcaccacctgccctgcctgttgcaaacgtgatgctcccggatggagtggagaaactaggagactgggacaagcaaaaggctgcaaacaacccagaagcccatcctcagaagactggagaaatgattgaggaatgcatgggcaccgtggccctgtgctccatcacaaacacctctcagaaacaacgtgggatgaaaaagcaagacagttcatacagtatgatgccatttttataaagctcaaaaccaaaaaaaaaaaaaaaaaa

SEQ ID NO: 1720 - DNA, 5020 bp, Homo sapiens
ccagagcagctgagttccagataaaaactgtcagacccggcctgtaggctgctccattgccaatgaactccatgaaccccatgaaacctgccctgccccctgcgccacacggtgatggttcattcgcatatgagtctgtgccttggcaacaaagcgccactcagccggctggatcgctgtctgtggtcactactgtgtggggagttggcaacgcgacacagagccaggttttggggaaccccatgggccctgcagggagtccctctggcagctccatgatgcctggtgtggcagggggcagctccgccttgacctccccacagtgcctgggacagcaggcgtttgctgaaggcggcgccaacaagggctacgtgcagcaaggcgtgtacagccgcgggggctaccctggggcccccggcttcaccaccgggtatgcaggcggcccggggggcctgggcctcccctcacatgctgcaagaccctccactgacttcacgcaagcggcagctgctgcagctgtggctgctgcggcagccactgccaccgccacagccacagccaccgtggctgctctccaggagaagcagagccaggagctgagccagtatggagcgatgggggccggacagtcttttaacagccagtttctgcagcatggaggtccccgggggcctagtgtccccgctggcatgaaccctactggcataggaggggtaatgggcccctctggcctctcccccttggctatgaaccccacccgggcagcaggaatgacacccttgtatgcagggcagcgtctgccccaacatgggtatcctgggcctccccaggcccagccactgccccgacagggggtcaagagaacctactctgaggtgtatccagggcagcagtatctgcaaggaggccagtatgcacccagcaccgcccagtttgcgcccagccctgggcagccccctgccccctccccttcctaccctgggcacaggctgcccctgcagcagggcatgacccagtccctgtccgtgcctggccccacgggactgcattataagcctacccgttccatcccgggctatcccagttccccactgccagggaaccccacgccacccatgaccccaagcagcagcgtcccttacatgtcaccaaaccaagaggtcaagtctcccttcttgcctgatctcaagcccaacctcaactccttgcactcatcgccctctggaagcgggccttgtgacgagttgcggctgaccttccctgtgcgcgatggggtggtcctggagcccttccgcctgcagcacaacctggctgtaagcaaccatgtcttccagctgcgagactcagtctacaagaccctgataatgaggcctgacctggagctgcaattcaagtgctaccaccacgaggaccggcagatgaacaccaactggccagcctcggtgcaggtcagcgtcaatgccacgccgctcaccatcgagcgtggcgacaacaagacctcgcacaagccactctacctgaagcatgtgtgccagccaggccgcaacaccatccagatcaccgtcaccgcctgctgctgctcccacctcttcgtgctgcagctagtgcaccgcccatccgtccgctcggtgctgcagggcctcctcaaaaagcgcctcctgcctgctgagcactgcatcaccaagataaagcggaacttcagcagcggcaccatccctggcacccctgggcccaacggagaggacggggtggagcagacagctatcaaggtgtccctgaagtgccccatcaccttccgcaggatccagctccctgcccgaggtcatgactgtcgccacatacagtgctttgacctggagtcgtacctgcagctcaactgtgagcgggggacttggaggtgtcctgtgtgcaacaagacagctttgctggagggcctggaggtggaccagtacatgctgggcatcctgatttacattcagaactctgactatgaggagatcaccatcgaccccacgtgcagctggaagccagtgcccgtgaagcctgacatgcacatcaaggaggagccggatgggccagcactgaagcgctgccgcaccgtgagccccgcccacgtgctcatgcccagcgtgatggagatgatcgccgccctgggccccggcgctgccccctttgcccccctgcagcccccctcagtccctgcccccagcgactaccctggccagggttccagcttcctggggcctggaactttccctgagtccttcccacccaccacgcccagcaccccaacccttgctgagttcaccccgggaccaccccccatctcctaccagtctgacattcccagcagcctcctgacttcagagaagtctaccgcctgcctcccaagccagatggcaccagcaggtcacctggaccccactcacaatcctgggacaccaggactacacacctccaaccttggggcccctccaggtccccagctgcaccattcaaaccctcccccagcgtcccggcagtccttgggccaagcgagcttaggacctacgggtgaactggccttcagtcctgccacaggcgtgatggggccccccagcatgtctggagccggggaggccccagaaccagctctggacctgctcccggaactgaccaaccctgatgagctactgtcctacttgggcccacccgacctccctacgaacaacaatgacgacctgctttctctgtttgagaacaactgatcctgtgtttaccccaagcccggcggggacacgctcacagatgtcaccacagccctgcccttcatgcccagccccatgggacacccggtggtctttcccaaacctcccccaaaacacacctggagccagagccttctgccgccagccctgcccctgaattggaagcagccctgtgctcgatgggaggggctcccaggccggcagcccttgccacctccctctgccaagcctgctgctgcagaacggtttttgctgaggtgcccctgcccagccctgtccagccttgtccacacacacatctcacgcccctggtctcacagcctcacaccttgtccttccacccctgcctgcccccacccagcctgcttcttgtccagcattgatccttctgtttcaacaactcctccactgggcagagctgggcatctggcagggctggctctgtcccctgggcctttggctccagtggcccctgtgcccagcagtccagctcttggaacctcgctgaatggcagcctcttgggggcctggagctctggcagcccagccgtgtgtggtgtcaggttcctctccccaccccagcttcaagcagaggcctcggggtgggggagctacaaagcacaacaatgtacatagtgtagaaacactaacagctgggagaggggagccagctgtccagccagcatgttcctgttgtacagcccggtctccctgcgcgctctgctccttcccatgtgcagacagatcagggaggaacctccaatgggtgggggacagtgagcttcggcctggccgaggtgggtgggtgggctctcagattcagctctgtgtaaagattctctagcgggctgcgctcccaagttccccttctctgtgaaagtgaagaattagtacagctgtgttttttaaagccacctctctgtctccaccccatgggcccacacccaggtgggggaggaggaagccactgcatctgttggctcagggccccagcctgtgcgagcagggcgcctgggctgttgtgtctcctgtctgtgccgatctctattaaaggactccctcttggtgggcctggccgagtccctcctttgtgctcccagggactattttctcctcgtaagccagcgacctgcctaaagcttgggctgtgcctgcaaagcttgtgcaggacctgggggccaggtcgaccttcaagtggcttttggggccccaggttgagctctggatgtttcaagccaaggctcggctattcccgccccatagtaaatttccttttccctggaattttccaagttggcttcagctgaagagctgttttgtgaagcatcccaggcttgcccaggagagacatttgccactatgtcaccttatctgggcttgccctggggcactgagacagttgtttggcagccccagcccagccaggggctcatccttctcagctcttgtccctgggaggcctctgcttgtcacttcccagagattgcagaggtgtgtcctgcctaccatctgcctgtccagcttggtgggggtccgggtcaccatttcctccagtcctgggccccatccttgagggccttcccagccagccagcaggagaggcaagaactgggggaacacaggaacctaggggaggaggggagcgctgggcatcctcaggctggcggccaaggcctgcccctggaggcactagaggagggcatctgtctgtgggagcccagaggctgcagggaggaggaggagggaggtatctggtgtgagcgttgcccctgcgacatttgggaccacacaggtgggcttccttattccctgacaaagcctctgtttccagctcttccgccctctctggatgagggaacagaagtggaggaaacaaaagaagcagcagcacgcacagtcctgtcgctgggtgcggagacagcctggcaaagtcccactcagccatggcctgatgcaggccccaggccctcctttcttgggtgtcaaatgactgtgtcctggacatctgatgcaccacctgccctgcctgttgcaaacgtgatgctcccggatggagtggagaaactaggagactgggacaagcaaaaggctgcaaacaacccagaagcccatcctcagaagactggagaaatgattgaggaatgcatgggcaccgtggccctgtgctccatcacaaacacctctcagaaacaacgtgggatgaaaaagcaagacagttcatacagtatgatgccatttttataaagctcaaaaccaaaaaaaaaaaaaaaaaa

SEQ ID NO: 1721 - DNA, 3012 bp, Homo sapiens
gctttggccagagtggtttgatggttttgtgttagtcttcctgcagctgagcttccacaagacactttttccctttcagccacccaatatctcgcgagacttgctattctgcgccccctcctaccttgcgcttgcgcagatcttcaaagcagaaggtcgcgcttggaggaagtggcggctttgagtccggtggcccaatcgctgttactacttctctgaagctcctctcggctgcttgccgagacaccctgccgccaagatgcctcgaattatgatcaaggggggcgtatggaggaataccgaggatgaaattctgaaagcagcggtaatgaaatatgggaaaaatcagtggtctaggattgcctcattgctgcatagaaaatcagcaaagcagtgcaaagccagatggtatgaatggctggatccaagcattaagaagacagaatggtccagagaagaagaggaaaaactcttgcacttggccaagttgatgccaactcagtggaggaccattgctccaatcattggaagaacagcggcccagtgcttagaacactatgaatttcttctggataaagctgcccaaagagacaatgaagaggaaacaacagatgatccacgaaaacttaaacctggagaaatagatccaaatccagaaacaaaaccagcgcggcctgatccaattgatatggatgaggatgaacttgagatgctttctgaagccagagcccgcttggctaatactcagggaaagaaggccaagaggaaagcaagagagaaacaattggaagaagcaagacgtcttgctgccctccaaaaaagaagagaacttcgagcagctggcatagaaattcagaagaaaagaaaaaggaagagaggagttgattataatgccgaaatcccatttgaaaaaaagcctgcccttggtttttatgatacttctgaggaaaactaccaagctcttgacgcagatttcaggaaattaagacaacaggatcttgatggggagctaagatctgaaaaagaaggaagagatagaaaaaaagacaaacagcatttgaaaaggaaaaaagaatctgatttaccatcagctattcttcaaactagtggtgtttctgaatttactaaaaagagaagcaaactagtacttcctgcccctcagatttcagatgcagaactccaggaagttgtaaaagtaggccaagcgagtgaaattgcacgtcaaactgccgaggaatctggcataacaaattctgcttccagtacacttttgtctgagtacaatgtcaccaacaacagcgttgctcttagaacaccacgaacaccagcttcccaggacagaattctgcaggaagcccagaacctcatggccctcaccaatgtggacaccccattgaaaggtggacttaataccccattgcatgagagtgacttctcaggtgtaactccacagcgacaagttgtacagactccaaacacagttctctctactccattcaggactccttctaatggagctgaagggctgactccccggagtggaacaactcccaaaccagttattaactctactccgggtagaactcctcttcgagacaagttaaacattaatcccgaggatggaatggcagactatagtgatccctcttacgtgaagcagatggaaagagaatcccgagaacatctccgtttagggttgttgggccttcctgcccctaagaatgattttgaaattgttctaccagaaaatgccgagaaggagctggaagaacgtgaaatagatgatacttacattgaagatgctgctgatgtggatgctcgaaagcaggccatacgagatgcagagcgtgtaaaggaaatgaaacgaatgcataaagctgtccagaaagatctgccaagaccatcagaagtaaatgaaactattctaagacccttaaatgtagaaccgcctttaacagatttacagaaaagtgaagaactaatcaaaaaagaaatgatcacaatgcttcattatgaccttctacatcacccttatgaaccatctggaaataaaaaaggcaaaactgtagggtttggtaccaataattcagagcacattacctatctggaacataatccttatgaaaagttctccaaagaagagctgaaaaaggcccaggatgttttggtgcaggagatggaagtggttaaacaaggaatgagccatggagagctctcaagtgaagcttataaccaggtgtgggaagaatgctacagtcaagttttatatcttcctgggcagagccgctacacacgggccaatctggctagtaaaaaggacagaattgaatcacttgaaaagaggctcgagataaacaggggtcacatgacgacagaagccaagagggctgcaaagatggaaaagaagatgaaaattttgcttgggggttaccagtctcgtgctatggggctcatgaaacagttgaatgacttatgggaccaaattgaacaggctcacttggagttacgcacttttgaagaactcaagaaacatgaagattctgctattccccggaggctagagtgtctaaaagaagacgttcagcgacaacaagaaagagaaaaggaacttcaacatagatatgctgatttgctgctggagaaagagactttaaagtcaaaattctgaagtacagtttatattctgtcacaggattaattaattgccggttttcatactctagaaggctgaaactgatgtttatcttcattgacaaatttacccaccatctgtggtttttcagttgtttattttaaatgatatcgatcttacacattctgtgtataaagaccttaactccacaggacggacattttagagtttaaattattaaggctatcattcttttagtaatgtcatatttgcaaacttttttagttttggcctttaatttaaaaagcctaattttaaagtgctgcctttgagtaactcttgaataaaaacaaaatataaaaaattgaaaaaaaaaaaaa

SEQ ID NO: 1722 - DNA, 1691 bp, Homo sapiens
cgagggttgcttgggcagcgactgtcatggcggcggccgcccccaatgccggaggctcggcccctgagacagcgggttccgccgaagctccgctgcagtacagcctgctcctgcagtacctggtgggtgacaagcgtcagccccggctcctggagcctgggagcctgggcgggatcccaagtccagccaagagtgaggagcagaagatgatcgagaaggcgatggaaagctgcgctttcaaggctgcgctggcctgcgtgggaggatttgtcttaggaggtgcatttggggtgtttaccgctggcatcgataccaacgtgggctttgaccctaaggatccttaccgtacaccgactgcaaaagaagtgctgaaagacatggggcagagaggaatgtcctatgccaaaaatttcgccattgtgggagccatgttttcttgtactgagtgtttgatagaatcttaccggggaacatcagactggaagaacagtgtcatcagtggctgcatcacgggaggagctattggtttcagagctggcttaaaggctggggccattggttgtggaggttttgctgctttctctgctgcgattgattattacctccggtgagagtaattgcctgcagggaaggatgatgccagccccggatccgggctgctctctggaggacagtttctgtaccacaccagggccttgcttcagggcctgaagacattcattttccctcatgtcgttggtattctgagggagctgcctggcttctctgcctccagcctttggggtagccacactttgctgctcctggactccagccagccttcacagaggacgtcccgtgccagattctctcacagcagatcgggagacaggatgttgacatataggaattcagctccacaaagcttcaggcctgaccacagctggccctctaggttgtttggtgttgtgggcacagaggtgacagtgtctctgcaggcactcaggaagctgttctaccttggaactccatgcaactatccgtctcgaataccagggcagggcaaggcggactgatgccgtccaaccaattatctcacttgttttgtgttctgtcatccttgttttttttttaaaaatacactcccctcccccaccgccacacaccttacagttcaaaaggttggtttatttgtattttattttcaaattccctattccaaaaatagtgccgggtggcccaaagataacatctgaagggaaagaatgagaaagctcccagggaagcgggggatggggcgctgaggcagggttgttagaggactgtgtcatcctcaccaagctcattacatctgccagggcctgcctcaagaagcccagcccagccttttcctgggatgcagtgaaatcccatccatgaactcgatgggcccctcctgtgccggccgagaggcacacactgccttcacgacgtgactgctggacctggccgagcttgaggccacatgtgaagggtcctgctgtggtcatcttggtgactcggtcacagcagctactggccaagatcagacgtcgctgaggggctgttcaccaccatcctcgttctccagggtcaaggaagtgttttaacatgtcgtgttttcgacttgaccttgtggtatttttcttggcctagttgtgtgccatggatattaaaaaaaaaaaaaaaaaaaa

SEQ ID NO: 1723 - DNA, 2132 bp, Homo sapiens
gcctcaggcatgagacctgtaccagcccccgggagccgtgcggggccaacaatgaggagcagaatgcaaggggcggcctcgctcccctggccaccgcgggggtcgcggcctcccattacatagcgcgtgtctcgagccctggcctgctctcggcaccgccacaacgggcgtaatatggccgctggtgccgggacctgccgggcgcgcggagggtcgggccgaggtccgggatccggaactgctcccggcattcctcgcgagtgtatggcgtgggctcccttccccctctgtgggtcccgcgaggagactctcgggctttgaggtgagacctgaagttccgctggccggtagtgtagcaggaaagggcaggtcctcccgggtcgtgagccagtagcctcctggggtggcaaggtgtagagaggggggcgttgaaaggacacccgctacccggcctgctttctaggggtctctttggattgaggacatcagcagcagtggaagggattttactggagacctgtcactgtcagagccttaaaatatcaccgacggggccttaatgtcaccgaggtagagagaaaagggcagtagccctagagactattgcgacacagtgtgcccctcataagtttttccagggaggggttctgtactgagttgacgccccaggagctgagcaccaggctttgcatccttgggaactcagcaaacgtttgttcagccaattgcaggtagcatggcccagggcttgattgaggtggagcgaaagttccttccagggcctggcacagaggagcggctgcaggagttggggggcaccctggagtaccgggtcaccttccgagacacctactatgacacccctgagctgagcctcatgcaggctgaccactggctgcgacgacgagaggatagtggatgggagctcaaatgtcctggagcagcaggtgtcttaggaccccacacggagtataaggaactcacagcggaacctacaattgtggcccaactctgtaaggtgctgcgggctgacggcctgggggctggagatgtggctgctgtgctgggcccactggggctgcaggaagtagctagttttgtgactaagcggagtgcctggaagctggtgctcttgggagctgatgaagaggagccacagctcagggtggacttggatacagccgactttggctacgctgtgggtgaggtagaggccctggtgcatgaggaggctgaagtaccaactgccctagagaagatccacaggctcagcagcatgcttggtgtgcctgcacaggagacagcaccagccaagctgattgtgtatctacagcgtttccggcctcaagactatcagcgcctgctagaagtgaacagctccagagagaggccacaggagactgaagatcctgaccactgcctgggctaggggtgtcacttcctagaaggggaagggaactctgggtctaacggagtccactcctgggcccactgtgcctctcccctcagtgtcccttctgacagtgactcctctctctccagcgctgcctgtttcttccccctcctctaagctactcttccttgagccctccctggctgcttcctctcgctcatccgtcagatgcaatctgtgggccgcccctctcccctggccgctaagcagcctccattgatttccgctcgtgtttataggatttccacttagccgtgatcagtagttaagcacaggaaaatcccttgccaccccccctcccttggtcgatgccattgattctgccagcggctcctaaaccgccttacagctgagttagaagatgaggagaggcagcagggatttccctgccttgggatgtgggaaacagaagaaaagttgaggaaatggttgggaatcgctgttagaactctagaaattctaatctgactttgccactgtgcccagctctggcccagagggtagagtgcctcctgtggaagtttaggggcaaatttgttccctgacctggagagggttagaaagaaccaacagctgccccctccccgcccccgtgttgagacaggttctcaaggctcaggggaagatgcatacctcctatgtaagaatgctcttcccttgctgttattcatacacactt

SEQ ID NO: 1724 - DNA, 3905 bp, Homo sapiens
gacagataccctccttccggccgcgccactcgggaggcggatcccgtgggcctgaggaggcttcccccgcccggtttgctttccctccctcgctggcgctgccgcgagtccaccgagcggcctctgaggagcagccgcaggaggaggaggaggtcgtcgggggcggcgggcggagaccgcgctctcgcttccccggcggcggcaagggcaggacaatggaggtggcggtggagaaggcggtggcggcggcggcagcggcctcggctgcggcctccggggggccctcggcggcgccgagcggggagaacgaggccgagagtcggcagggcccggactcggagcgcggcggcgaggcggcccggctcaacctgttggacacttgcgccgtgtgccaccagaacatccagagccgggcgcccaagctgctgccctgcctgcactctttctgccagcgctgcctgcccgcgccccagcgctacctcatgctgcccgcgcccatgctgggctcggccgagaccccgccacccgtccctgcccccggctcgccggtcagcggctcgtcgccgttcgccacccaagttggagtcattcgttgcccagtttgcagccaagaatgtgcagagagacacatcatagataacttttttgtgaaggacactactgaggttcccagcagtacagtagaaaagtcaaatcaggtatgtacaagctgtgaggacaacgcagaagccaatgggttttgtgtagagtgtgttgaatggctctgcaagacgtgtatcagagctcatcagagggtaaagttcacaaaagaccacactgtcagacagaaagaggaagtatctccagaggcagttggtgtcaccagccagcgaccagtgttttgtccttttcataaaaaggagcagctgaagctgtactgtgagacatgtgacaaactgacatgtcgagactgtcagttgttagaacataaagagcatagataccaatttatagaagaagcttttcagaatcagaaagtgatcatagatacactaatcaccaaactgatggaaaaaacaaaatacataaaattcacaggaaatcagatccaaaacagaattattgaagtaaatcaaaatcaaaagcaggtggaacaggatattaaagttgctatatttacactgatggtagaaataaataaaaaaggaaaagctctactgcatcagttagagagccttgcaaaggaccatcgcatgaaacttatgcaacaacaacaggaagtggctggactctctaaacaattggagcatgtcatgcatttttctaaatgggcagtttccagtggcagcagtacagcattactttatagcaaacgactgattacataccggttacggcacctccttcgtgcaaggtgtgatgcatccccagtgaccaacaacaccatccaatttcactgtgatcctagtttctgggctcaaaatatcatcaacttaggttctttagtaatcgaggataaagagagccagccacaaatgcctaagcagaatcctgtcgtggaacagaattcacagccaccaagtggtttatcatcaaaccagttatccaagttcccaacacagatcagcctagctcaattacggctccagcatatgcagcaacagcaaccgcctccacgtttgataaactttcagaatcacagccccaaacccaatggaccagttcttcctcctcatcctcaacaactgagatatccaccaaaccagaacataccacgacaagcaataaagccaaaccccctacagatggctttcttggctcaacaagccataaaacagtggcagatcagcagtggacagggaaccccatcaactaccaacagcacatcctctactccttccagccccacgattactagtgcagcaggatatgatggaaaggcttttggttcacctatgatcgatttgagctcaccagtgggagggtcttataatcttccctctcttccggatattgactgttcaagtactattatgctggacaatattgtgaggaaagatactaatatagatcatggccagccaagaccaccctcaaacagaacggtccagtcaccaaattcatcagtgccatctccaggccttgcaggacctgttactatgactagtgtacaccccccaatacgttcacctagtgcctccagcgttggaagccgaggaagctctggctcttccagcaaaccagcaggagctgactctacacacaaagtcccagtggtcatgctggagccaattcgaataaaacaagaaaacagtggaccaccggaaaattatgatttccctgttgttatagtgaagcaagaatcagatgaagaatctaggcctcaaaatgccaattatccaagaagcatactcacctccctgctcttaaatagcagtcagagctctacttctgaggagactgtgctaagatcagatgcccctgatagtacaggagatcaacctggacttcaccaggacaattcctcaaatggaaagtctgaatggttggatccttcccagaagtcacctcttcatgttggagagacaaggaaagaggatgaccccaatgaggactggtgtgcagtttgtcaaaacggaggggaactcctctgctgtgaaaagtgccccaaagtattccatctttcttgtcatgtgcccacattgacaaattttccaagtggagagtggatttgcactttctgccgagacttatctaaaccagaagttgaatatgattgtgatgctcccagtcacaactcagaaaaaaagaaaactgaaggccttgttaagttaacacctatagataaaaggaagtgtgagcgcctacttttatttctttactgccatgaaatgagcctggcttttcaagaccctgttcctctaactgtgcctgattattacaaaataattaaaaatccaatggatttgtcaaccatcaagaaaagactacaagaagattattccatgtactcaaaacctgaagattttgtagctgattttagattgatctttcaaaactgtgctgaattcaatgagcctgattcagaagtagccaatgctggtataaaacttgaaaattattttgaagaacttctaaagaacctctatccagaaaaaaggtttcccaaaccagaattcaggaatgaatcagaagataataaatttagtgatgattcagatgatgactttgtacagccccggaagaaacgcctcaaaagcattgaagaacgccagttgcttaaataatatgcagcaccactagcttgtgctggtttttagatttttttgttttcaaaaaaacatttgtcagtaatttaacatcactacaaaaagaagagtttgtgactattctcatctctgttttggacgtttactagactttgatttccttaatagcccatttctgttaacctcttatcactaagaaagaaaggaaagaaggagatgaatagaagaaagaaaatggaaagaaggaaaaaaggaggatagaaaaaggatggaagaaagaagcattgaaaacaaagacattcttcccacttcttggatttttaaaccacagtctggagtgatagctactgtagaaaggaaatagactttgtatgaactctttaagttgaaaagtaaaaaatatatgtggtttggatgtgtgctttaattcagctttagaaattaataccactacccgtgaattatatggcctgacaatatgaattaggtgtactgtactgaagaacagtactccacaaacatgggtggtaacaagagttccatcccaggaggccaaacggtgcaacagaagggtaggttagatgctattaagaaggcacttaatagtacatcatgtaagatggcaactgtattaaagaaaaatccggaaaacaaaaa

SEQ ID NO: 1725 - DNA, 4007 bp, Homo sapiens
gacagataccctccttccggccgcgccactcgggaggcggatcccgtgggcctgaggaggcttcccccgcccggtttgctttccctccctcgctggcgctgccgcgagtccaccgagcggcctctgaggagcagccgcaggaggaggaggaggtcgtcgggggcggcgggcggagaccgcgctctcgcttccccggcggcggcaagggcaggacaatggaggtggcggtggagaaggcggtggcggcggcggcagcggcctcggctgcggcctccggggggccctcggcggcgccgagcggggagaacgaggccgagagtcggcagggcccggactcggagcgcggcggcgaggcggcccggctcaacctgttggacacttgcgccgtgtgccaccagaacatccagagccgggcgcccaagctgctgccctgcctgcactctttctgccagcgctgcctgcccgcgccccagcgctacctcatgctgcccgcgcccatgctgggctcggccgagaccccgccacccgtccctgcccccggctcgccggtcagcggctcgtcgccgttcgccacccaagttggagtcattcgttgcccagtttgcagccaagaatgtgcagagagacacatcatagataacttttttgtgaaggacactactgaggttcccagcagtacagtagaaaagtcaaatcaggtatgtacaagctgtgaggacaacgcagaagccaatgggttttgtgtagagtgtgttgaatggctctgcaagacgtgtatcagagctcatcagagggtaaagttcacaaaagaccacactgtcagacagaaagaggaagtatctccagaggcagttggtgtcaccagccagcgaccagtgttttgtccttttcataaaaaggagcagctgaagctgtactgtgagacatgtgacaaactgacatgtcgagactgtcagttgttagaacataaagagcatagataccaatttatagaagaagcttttcagaatcagaaagtgatcatagatacactaatcaccaaactgatggaaaaaacaaaatacataaaattcacaggaaatcagatccaaaacagaattattgaagtaaatcaaaatcaaaagcaggtggaacaggatattaaagttgctatatttacactgatggtagaaataaataaaaaaggaaaagctctactgcatcagttagagagccttgcaaaggaccatcgcatgaaacttatgcaacaacaacaggaagtggctggactctctaaacaattggagcatgtcatgcatttttctaaatgggcagtttccagtggcagcagtacagcattactttatagcaaacgactgattacataccggttacggcacctccttcgtgcaaggtgtgatgcatccccagtgaccaacaacaccatccaatttcactgtgatcctagtttctgggctcaaaatatcatcaacttaggttctttagtaatcgaggataaagagagccagccacaaatgcctaagcagaatcctgtcgtggaacagaattcacagccaccaagtggtttatcatcaaaccagttatccaagttcccaacacagatcagcctagctcaattacggctccagcatatgcagcaacaggtaatggctcagaggcaacaggtgcaacggaggccagcacctgtgggtttaccaaaccctagaatgcaggggcccatccagcaaccttccatctctcatcagcaaccgcctccacgtttgataaactttcagaatcacagccccaaacccaatggaccagttcttcctcctcatcctcaacaactgagatatccaccaaaccagaacataccacgacaagcaataaagccaaaccccctacagatggctttcttggctcaacaagccataaaacagtggcagatcagcagtggacagggaaccccatcaactaccaacagcacatcctctactccttccagccccacgattactagtgcagcaggatatgatggaaaggcttttggttcacctatgatcgatttgagctcaccagtgggagggtcttataatcttccctctcttccggatattgactgttcaagtactattatgctggacaatattgtgaggaaagatactaatatagatcatggccagccaagaccaccctcaaacagaacggtccagtcaccaaattcatcagtgccatctccaggccttgcaggacctgttactatgactagtgtacaccccccaatacgttcacctagtgcctccagcgttggaagccgaggaagctctggctcttccagcaaaccagcaggagctgactctacacacaaagtcccagtggtcatgctggagccaattcgaataaaacaagaaaacagtggaccaccggaaaattatgatttccctgttgttatagtgaagcaagaatcagatgaagaatctaggcctcaaaatgccaattatccaagaagcatactcacctccctgctcttaaatagcagtcagagctctacttctgaggagactgtgctaagatcagatgcccctgatagtacaggagatcaacctggacttcaccaggacaattcctcaaatggaaagtctgaatggttggatccttcccagaagtcacctcttcatgttggagagacaaggaaagaggatgaccccaatgaggactggtgtgcagtttgtcaaaacggaggggaactcctctgctgtgaaaagtgccccaaagtattccatctttcttgtcatgtgcccacattgacaaattttccaagtggagagtggatttgcactttctgccgagacttatctaaaccagaagttgaatatgattgtgatgctcccagtcacaactcagaaaaaaagaaaactgaaggccttgttaagttaacacctatagataaaaggaagtgtgagcgcctacttttatttctttactgccatgaaatgagcctggcttttcaagaccctgttcctctaactgtgcctgattattacaaaataattaaaaatccaatggatttgtcaaccatcaagaaaagactacaagaagattattccatgtactcaaaacctgaagattttgtagctgattttagattgatctttcaaaactgtgctgaattcaatgagcctgattcagaagtagccaatgctggtataaaacttgaaaattattttgaagaacttctaaagaacctctatccagaaaaaaggtttcccaaaccagaattcaggaatgaatcagaagataataaatttagtgatgattcagatgatgactttgtacagccccggaagaaacgcctcaaaagcattgaagaacgccagttgcttaaataatatgcagcaccactagcttgtgctggtttttagatttttttgttttcaaaaaaacatttgtcagtaatttaacatcactacaaaaagaagagtttgtgactattctcatctctgttttggacgtttactagactttgatttccttaatagcccatttctgttaacctcttatcactaagaaagaaaggaaagaaggagatgaatagaagaaagaaaatggaaagaaggaaaaaaggaggatagaaaaaggatggaagaaagaagcattgaaaacaaagacattcttcccacttcttggatttttaaaccacagtctggagtgatagctactgtagaaaggaaatagactttgtatgaactctttaagttgaaaagtaaaaaatatatgtggtttggatgtgtgctttaattcagctttagaaattaataccactacccgtgaattatatggcctgacaatatgaattaggtgtactgtactgaagaacagtactccacaaacatgggtggtaacaagagttccatcccaggaggccaaacggtgcaacagaagggtaggttagatgctattaagaaggcacttaatagtacatcatgtaagatggcaactgtattaaagaaaaatccggaaaacaaaaa

SEQ ID NO: 1726 - DNA, 1775 bp, Homo sapiens
gtgcaaagtgctgggttctgggtttctggattcgcgggccgttcacacgtagcctgtgccggctcctcgggtgagtccgtccgcgcgcggtgccccgggacggcctaggctgccgggggtccggggccccaggcattccgggctgcagattgacggggatcccggatgcaccgcgcgcccccgcgccctcaccgacgggtccagacctggtgggaagaaggtgcggggacgggtccctgaggatcccgatgcctacgagccaagatgctcagctttataggtgtgacctacacatgtgacttcacctcagttttgtgatccgtaaaatggacaaattcgaagctacttcacagtgctgttgagaggattaaatgaaacaatgcttgtaaagctctttgcaggagggagcctcggaagcagggcctggccggcagagcacacctgctgtcaccagggaccacaggcagcatgaagacccccgtggagctggccgtcagtgggatgcagaccctcggccttcagcaccgctgccgaggtggctaccgggtcaaggccaggacgtcatatgtggatgagactctgtttggcagcccagcaggcacccggcctaccccaccggacttcgatccgccctgggtggagaaggctaacagaaccagaggcgtgggcaaggaggcatcgaaggccttgggggcaaaggggagctgtgagaccaccccctcaaggggcagcacccccaccctcacaccaaggaagaagaacaaatacagacccatcagccacaccccgtcttactgtgatgagtcgctgtttggctcccgatctgaaggcgccagcttcggggccccgcggatggcgaagggggatgccgcaaagctccgtgctctcttgtggacgccaccacctacccccaggggtagccactcgccccgccccagggaggcaccactgcgagccattcacccagctggtccctccaagacagagccggggccagcggcagactcccagaagttatctatgggtgggttacactcttcacgccccctgaagcggggactttcccattccctcacccacctgaatgtccccagcactggtcatccagccaccagtgccccccacacaaatgggcctcaggatctcaggccttccacgtcaggggtgaccttccggagccccctggtgacttccagggctcgctcagttagcatttcagtgccatctaccccacgacgaggtggggccacccagaaaccaaagcccccttggaaatgatactctttcatcagggttgcctatggggccacggcgacaggtatggccccttgccagggtaggaggacattcatcacccagggaaccccaggtattaaagaagcccctgtgggggcagacagacatagcaggggtgggcagtgcctccctttatcctgacaatctctagtcgattcttgcctttttctcccgattgcggatttgggggccacctctaagatgcctctctccagccctgtctcaaccatactccaaattagtgccaacccaggggcctggcacctcccacatcatccattgtcttgctgccaagtgcgaataaacggcgtgattgccaacctggagggtcccctcttatcccttcaagccaagcttcctgctcaggattagtttccagctaagtctgcaagccctagaggagtttttccaggctgtctgtgaagcctggggaacacaacggcaactgggagatttgtgagtgaacactgtttcatctt

SEQ ID NO: 1727 - DNA, 1916 bp, Homo sapiens
acttctgacagtggggaaagcagctgtgtgtgatagcttggaaggtttactgctgcctcaagtcctcttctctgcagttgaggtttcaggtttcaatcctcccaataccacaagacagagcacggggcggctgccgcctccgcctccgcgccttaacctaggcggcttgccgaagatctcagccccgcggccgcgcgctcgccctgccctagaccagggttgggcgcagcggcggaggtggcttctgggctgcgcgagctgggagagctgggaggcggcgatcgcagctgggccgggacttccttcctccaccgcacggcaacaaaacaaccctgcggcaggcactgagtgcttcgcagctgtctgggcgagaggcacagcgatgggctccgtgctgagcaccgacagcggcaaatcggcgcccgcctctgccaccgcgcgggccctggagcgcaggagggacccggagttgcccgtcacgtccttcgactgcgccgtgtgccttgaggtgttacaccagcctgtccggacccgctgtggccacgtattctgccgttcctgtattgctaccagtctaaagaacaacaagtggacctgtccttattgccgggcatatcttccttcagaaggagttccagcaactgatgtagccaaaagaatgaaatcagagtataagaactgcgctgagtgtgacaccctggtttgcctcagtgaaatgagggcacatattcggacttgtcagaagtacatagataagtatggaccactacaagaacttgaggagacagcagcaaggtgtgtatgtcccttttgtcagagggaactgtatgaagacagcttgctggatcattgtattactcatcacagatcggaacggaggcctgtgttctgtccactttgccgtttaatacccgatgagaatccaagcagcttcagtggcagtttaataagacatctgcaagttagtcacactttgttttatgatgatttcatagattttaatataattgaggaagctcttatccgaagagtcttagaccggtcacttcttgaatatgtgaatcactcgaacaccacataattttattaaaacgaagggaaaagggaccactgaattgcaccatttaagatgctgcttgaacaaatgggagggaagttgtcaatgattgatgggcaaaaatgtacaacacagttatgtgtttgtccatgtttattgttatagtgcatttaaaaactgctttaattttaatggtttaaatctgttttacatccttgagattcttacacatctaacaacaaaaaaaattatctacatcagtcattgttacatggaaaagacaggtggtaggcaagtaggtggaggatctcggtttgcaaattagataatactctgtgtataatgctacatatcaataactaccatcatggttaggcacgataactaatctttgttctgtgtaaaaaaatatggagagtgaaacaaagtgcagacattcaaagaaataagaaatctgctccaatgctcttgttctaatctctaataggttaacgttaataatcttgtatgggagttggaaaggaaaattttggaagtcaagaaagtccatttaggccggacgcggtggcttacgcttgtaatcccagcactttgggaggctgaagcaggcggatcacaaggtcaggagttcgagaccagcctggccaacactggtctctgtgaaactccgtctctactaaaaatacaaaaattagctggacgtgttggcgggcatctgtaataccagctacttgggaggctgaggcagaagaatcacttgaacccgggaggcagaggttacagtgagctgagatcgcaccagtacactccagcctgggtaacagagctagactccatctcaaaaaaaaaaaaaaaaaaa

SEQ ID NO: 1728 - DNA, 1511 bp, Homo sapiens
cccaaagtaggctaggcctacggaagctgggtcttcttgctgtgaggtcgcgttccccagtgttacggagggtccttgaggcaggagtgaaaattgggtctgggggttagtcctggggtggaggtctgggcacgccgggtcggaccccctccatcttcggttttgcacaccccgctttccagcgcggagtcgcggcgggtagggcggcgtcgcgtgcgtgacgtcatccagcggcgcctcgcgaggctccagtggccttgacctcccgcggcgtgggaggctgcgcggcgatgctgcagttcgtccgggccggggcgcgggcctggcttcggcctaccggcagccagggcctgagttccctggcggaagaggcagcgcgtgcgaccgagaacccggagcaggtggcgagcgagggtctcccggagcccgtgctgcgcaaagtcgagctcccggtacccactcatcgacgcccagtgcaggcctgggtcgagtccttgcggggcttcgagcaggagcgcgtgggcctggccgacctgcaccccgatgttttcgccaccgcgcccaggctggacatactgcaccaggttgctatgtggcagaagaacttcaagagaattagctatgccaagaccaagacgagagccgaggtgcggggcggtggccggaagccttggccgcagaaaggcactgggcgggcccggcatggcagcatccgctctccgctctggcgaggaggaggtgttgcccatggcccccggggccccacaagttactactacatgctgcccatgaaggtgcgggcgctgggtctcaaagtggcactgaccgtcaagctggcccaggacgacctgcacatcatggactccctagagctgcccaccggagacccacagtacctgacagagctggcgcactaccgccgctggggggactccgtactcctcgtggacttaacacacgaggagatgccacagagcatcgtggaggccacctctaggcttaagaccttcaacttgatcccggctgttggcctaaatgtgcacagcatgctcaagcaccagacgctggtcctgacgctgcccaccgtcgccttcctggaggacaagctgctctggcaggactcacgttacagacccctctaccccttcagcctgccctacagcgacttcccccgacccctaccccacgctacccagggcccagcggccaccccgtaccactgttgatgtgaagcacctcttctgagccaggccgagcccctggccgacttgggagcctcaggcccacgcccacccttcgaggaaggtgtcacctggaccccttcattccacggaggaagctgaggccacagggagcggccatcgccattgggaaggggcgactccacggaaagcccagacgggcttctgcatccattccctctttttgtttttaaaataaattgtatttttgaatcaaaaaaaaaaaaaaaaaaaaaaaaaaaaaaaaaaaaaaaaaaaaaaaaaaaaaaa

SEQ ID NO: 1729 - DNA, 1375 bp, Homo sapiens
cccaaagtaggctaggcctacggaagctgggtcttcttgctgtgagcgcggagtcgcggcgggtagggcggcgtcgcgtgcgtgacgtcatccagcggcgcctcgcgaggctccagtggccttgacctcccgcggcgtgggaggctgcgcggcgatgctgcagttcgtccgggccggggcgcgggcctggcttcggcctaccggcagccagggcctgagttccctggcggaagaggcagcgcgtgcgaccgagaacccggagcaggtggcgagcgagggtctcccggagcccgtgctgcgcaaagtcgagctcccggtacccactcatcgacgcccagtgcaggcctgggtcgagtccttgcggggcttcgagcaggagcgcgtgggcctggccgacctgcaccccgatgttttcgccaccgcgcccaggctggacatactgcaccaggttgctatgtggcagaagaacttcaagagaattagctatgccaagaccaagacgagagccgaggtgcggggcggtggccggaagccttggccgcagaaaggcactgggcgggcccggcatggcagcatccgctctccgctctggcgaggaggaggtgttgcccatggcccccggggccccacaagttactactacatgctgcccatgaaggtgcgggcgctgggtctcaaagtggcactgaccgtcaagctggcccaggacgacctgcacatcatggactccctagagctgcccaccggagacccacagtacctgacagagctggcgcactaccgccgctggggggactccgtactcctcgtggacttaacacacgaggagatgccacagagcatcgtggaggccacctctaggcttaagaccttcaacttgatcccggctgttggcctaaatgtgcacagcatgctcaagcaccagacgctggtcctgacgctgcccaccgtcgccttcctggaggacaagctgctctggcaggactcacgttacagacccctctaccccttcagcctgccctacagcgacttcccccgacccctaccccacgctacccagggcccagcggccaccccgtaccactgttgatgtgaagcacctcttctgagccaggccgagcccctggccgacttgggagcctcaggcccacgcccacccttcgaggaaggtgtcacctggaccccttcattccacggaggaagctgaggccacagggagcggccatcgccattgggaaggggcgactccacggaaagcccagacgggcttctgcatccattccctctttttgtttttaaaataaattgtatttttgaatcaaaaaaaaaaaaaaaaaaaaaaaaaaaaaaaaaaaaaaaaaaaaaaaaaaaaaaa

SEQ ID NO: 1730 - DNA, 2404 bp, Homo sapiens
cccaaagtaggctaggcctacggaagctgggtcttcttgctgtgaggtcgcgttccccagtgttacggagggtccttgaggcaggagtgaaaattgggtctgggggttagtcctggggtggaggtctgggcacgccgggtcggaccccctccatcttcggttttgcacaccccgctttccagcgcggagtcgcggcgggtagggcggcgtcgcgtgcgtgacgtcatccagcggcgcctcgcgaggctccagtggccttgacctcccgcggcgtgggaggctgcgcggcgatgctgcagttcgtccgggccggggcgcgggcctggcttcggcctaccggcagccagggcctgagttccctggcggaagaggcagcgcgtgcgaccgagaacccggagcaggtggcgagcgagggtctcccggagcccgtgctgcgcaaagtcgagctcccggtacccactcatcgacgcccagtgcaggcctgggtcgagtccttgcggggcttcgagcaggagcgcgtgggcctggccgacctgcaccccgatgttttcgccaccgcgcccaggctggacatactgcaccaggttgctatgtggcagaagaacttcaagagaattagctatgccaagaccaagacgagagccgaggtgcggggcggtggccggaagccttggccgcagaaaggcactgggcgggcccggcatggcagcatccgctctccgctctggcgaggaggaggtgttgcccatggcccccggggccccacaagttactactacatgctgcccatgaaggtgcgggcgctgggtctcaaagtggcactgaccgtcaagctggcccaggacgacctgcacatcatggactccctagagctgcccaccggagacccacagtacctgacagagctggcgcactaccgccgctggggggactccgtactcctcgtggacttaacacacgaggagatgccacagagcatcgtggaggccacctctaggcttaagaccttcaacttgatcccggctgttggtgagcaaagagcccaggcccctagagtgcgcatgtgcaggctccgctgttagaatcacagcggttcaaatccggcatctggtcgctgagtggcctcaggcagtgaccacgctcccggacccaaccttcagcttgcccaaagcaataatctttcctaaagaagtgcttggctggggatggtggctcacgcttgtaatcccagtactttgggaggccaaggcagtctgggcaatatagtgaggctcccatctgtactaaaaataaaaaagttaggcgtggcgatgtgcacctgtagtcccagctactcgggggctgagccaggcggatagcttgagctcagggggccaaggctgcagtgagtcatgatcgcaccactgcacccaaacctggggagagagctagactcttgtctcaaaaaaaaaaaaaaaaaaaaaaaaaaagctccaaagtcacctctgtcaaagccacagtctgttccttccacagccacaagatggcgacatgagcctaagtcaagtcctgtccctcaacccacgcccctcgctggcttccccacctctctcaggatgaaagcccaagtcatcagggtggcacgtcaggccctgcacgatgtgccccgtcacctccctgccctcccgtcatttgccctgggtctcccccaccagaatgggagccaggagtcccagccaggcacaggaccgagcctggctctcggtcagcaggtgatgagctgggagcagctccttggccagaggcttacaggcaacaagcggccaggcagggtctggccccgggctgctgggctcacaaagtcacactagaccacagtgacgatctctgtaagcacaaagggactccgatgtgggtggggtgaggagagaggcagccccggcctgaccggccccccgccccgcccccaccccgcccccaggcctaaatgtgcacagcatgctcaagcaccagacgctggtcctgacgctgcccaccgtcgccttcctggaggacaagctgctctggcaggactcacgttacagacccctctaccccttcagcctgccctacagcgacttcccccgacccctaccccacgctacccagggcccagcggccaccccgtaccactgttgatgtgaagcacctcttctgagccaggccgagcccctggccgacttgggagcctcaggcccacgcccacccttcgaggaaggtgtcacctggaccccttcattccacggaggaagctgaggccacagggagcggccatcgccattgggaaggggcgactccacggaaagcccagacgggcttctgcatccattccctctttttgtttttaaaataaattgtatttttgaatcaaggaggataaagataa

SEQ ID NO: 1731 - DNA, 987 bp, Homo sapiens
aatataagtggaggcgtcgcgctggcgggcattcctgaagctgacagcattcgggccgagatgtctcgctccgtggccttagctgtgctcgcgctactctctctttctggcctggaggctatccagcgtactccaaagattcaggtttactcacgtcatccagcagagaatggaaagtcaaatttcctgaattgctatgtgtctgggtttcatccatccgacattgaagttgacttactgaagaatggagagagaattgaaaaagtggagcattcagacttgtctttcagcaaggactggtctttctatctcttgtactacactgaattcacccccactgaaaaagatgagtatgcctgccgtgtgaaccatgtgactttgtcacagcccaagatagttaagtgggatcgagacatgtaagcagcatcatggaggtttgaagatgccgcatttggattggatgaattccaaattctgcttgcttgctttttaatattgatatgcttatacacttacactttatgcacaaaatgtagggttataataatgttaacatggacatgatcttctttataattctactttgagtgctgtctccatgtttgatgtatctgagcaggttgctccacaggtagctctaggagggctggcaacttagaggtggggagcagagaattctcttatccaacatcaacatcttggtcagatttgaactcttcaatctcttgcactcaaagcttgttaagatagttaagcgtgcataagttaacttccaatttacatactctgcttagaatttgggggaaaatttagaaatataattgacaggattattggaaatttgttataatgaatgaaacattttgtcatataagattcatatttacttcttatacatttgataaagtaaggcatggttgtggttaatctggtttatttttgttccacaagttaaataaatcataaaacttgatgtgttatctctta

SEQ ID NO: 1732 - DNA, 1416 bp, Homo sapiens
attcggcaccgcagcgtaggtgctaccaccgctgccgtcgccgccgccattttgatggcaggaagagtccggttctgggacagctggagacagtggtggtgactgaaataactttaccaaaggaaagctattttgcgaactatcttctccagcggagatggccaatgtgctttgtaacagagccagactggtttcctatctcccaggattttgctctttagttaaaagggttgtcaatcccaaagccttttcgactgcaggatcatcaggttcggatgagtctcatgtggctgctgcacctccagatatatgctctcgaacagtgtggcctgatgaaactatgggaccctttggacctcaagatcagaggttccagcttcctgggaacataggttttgattgtcacctcaatgggactgcttcacagaagaaaagcctggttcataaaactttgcctgatgttctagcagaacctttatcaagtgaaagacatgagtttgtgatggcacaatatgtgaatgaatttcagggtaatgatgcacctgttgaacaagaaattaacagtgcagaaacttactttgaaagtgccagagtagagtgtgcaatacaaacatgtccagaattgctgcgaaaagattttgaatcactgtttccagaagtagctaatggcaaactaatgattctgactgtaacacaaaaaactaagaatgatatgactgtttggagtgaagaagtagaaattgaaagagaagtgctcttagaaaagttcatcaatggtgctaaggaaatttgctatgctcttcgagctgagggttattgggctgactttattgacccatcatctggtttggcattttttggaccatatacaaacaacactctttttgaaactgatgaacgctaccgacatttaggattctctgttgatgaccttggatgctgtaaagtgattcgtcatagtctctggggtacccatgtagttgtagggagtatcttcactaatgcaacaccagacagccatattatgaagaaattaagtggaaattagcagaaatatccattcatttgctgtactatttgtatgtaatatttgggttgatctataaacactgtcagactaaagtttttaaaatatacttatttctaagtatttatttcagcatttatgaatttgcaacattggcaagtgatttgggattttaaaattgcaaatgttcatttattcatatcattgaatacacgttgaacacatccacattgtataggatgtggtaattagcttgtaaccagggtatgatctgctattgttatttctcctctttattggaaaaaggcctcagttttaattattttcttcccaaaataaatcacacatttggttacaaaaaaaaaaaaaaaaaaaaaaaaaaaaaaaaa

SEQ ID NO: 1733 - DNA, 2683 bp, Homo sapiens
caccggtctgcatctcccagcagaaggcgcagccatgaatccgttattcggccccaacctcttcctcctgcagcaggagcagcagggcctggccgggccactgggggactcactgggaggcgaccacttcgccgggggaggagacttgcccccggcgcctctctcgccggccggccctgctgcctactcgccgcccgggccgggcccggccccgcctgccgccatggccctccgcaatgacctgggctccaacatcaacgtgctcaagaccctgaacctccggttccgctgcttcctggccaaggtgcatgagctggagcgccggaaccggctgttggagaagcaactgcagcaagcgctggaggagggtaagcagggccggcggggcctgggtcgtcgcgaccaggcagtgcagaccggcttcgtcagccccatccggcccctggggctgcagctgggcgcccggccggccgctgtctgcagcccttcggcgcgcgtgctgggctcgcccgcgcgctccccggccggccccctcgcgccctccgcggccagcctctcgtcgtcctccacctccacctccaccacctattcctcgtcggcccgcttcatgcccggcaccatctggtcgttctcgcacgcccgccggctcgggccgggactggagcccactctggtgcaagggcctggcttgtcgtgggtgcacccggatggggtgggcgtccagatcgacaccatcacgcccgagatccgcgctctctacaacgtgctggccaaagtgaagcgggagcgggacgagtacaagcggaggtgggaagaggagtacacggtgcggatccagctgcaagaccgtgtaaatgagctccaggaggaagcccaggaggctgatgcctgccaggaggagctggcactgaaggtggaacagttgaaggctgagctggtggtcttcaaggggctcatgagtaacaacctgtcggagctggacaccaagatccaggagaaagccatgaaggtggatatggacatctgccgccgcatcgacatcaccgccaagctctgcgatgtggctcagcagcgcaactgcgaggacatgatccagatgttccagaagaagctggtcccatccatgggggggcggaagcgggagcgcaaggctgccgtcgaggaggacacctccctgtcggagagtgaggggccccgccagcccgatggggatgaggaggagagcacagccctcagcatcaacgaggagatgcagcgcatgctcaaccagctgagggagtatgattttgaggacgactgtgacagcctgacttgggaggagactgaggagaccctgctgctttgggaggatttctcaggctatgccatggcagctgcagaggcccagggagagcagcaggaagatagcctggagaaggtgattaaagatacggagtccctgttcaaaacccgggagaaggagtatcaggagaccattgaccagatagagctggagttggccacggccaagaacgacatgaaccggcacctgcacgagtacatggagatgtgcagcatgaagcgcggcctggacgtgcagatggagacctgccgccggctcatcacccagtctggagaccgaaagtctcctgctttcactgcggtcccgcttagcgacccgccgccgccgccaagcgaggctgaggactccgatcgcgatgtctcatctgacagctccatgagatagagacctgcctcccccttgcacccgaggccctcgcagcagggagctcagcgaggcagagggtggggctgcacagaggggaacatcagctgcagctctgcaccaggccggtccctggggactggggcgctcctccctcaggctttctccctcagtcttggcttctccagggctctggggtgtctggagctaggcttggccctaccattctggggccatttccaccacagttggggctctcctgccttcacgcgtgggtgtctgctacttccccatctttaaaatgctgccagagcgattgcggcccctcaccttgtccacgtatcaggaatgtgaatgtgggacctttcctccatccctgttgtccggagccagctcactgtcttccacactggtgctaactggcccaggcactggagtggaatagaatgcagctggaggctacgcatggcctctgcagcacacgcagctggagagggcttctgtccctgtcagcggcagagggcgttggggctggccggggcaccttgtccctgctatggtccacgtgctcacgctgtccacctgccaggtggagtgtatgtggctgtggccctccctcgtggaggtgccgtgctttaaagaggccttagtgcccgggatgggcacagtgttttgaagggaggtgggagctcttgctctcctggtcactgcagaatgacagagaaggtgaagctccatgcatgtgtgcgcgggtgtatgtgcgctcagggtctctgtttaagtatcagctaaagatgtgcttcctccgtgtctgtcatacactgagaccaacaggctacagtgtccctgattcttggaaaagcctggagaagctggggagatgcggttcacaatgcctcggtataggaggctgtgttgagctgacattcaaatggattctttaataataatgaaactggcgagtatttattgtgcaaa

SEQ ID NO: 1734 - DNA, 2671 bp, Homo sapiens
caccggtctgcatctcccagcagaaggcgcagccatgaatccgttattcggccccaacctcttcctcctgcagcaggagcagcagggcctggccgggccactgggggactcactgggaggcgaccacttcgccgggggaggagacttgcccccggcgcctctctcgccggccggccctgctgcctactcgccgcccgggccgggcccggccccgcctgccgccatggccctccgcaatgacctgggctccaacatcaacgtgctcaagaccctgaacctccggttccgctgcttcctggccaaggtgcatgagctggagcgccggaaccggctgttggagaagcaactgcagcaagcgctggaggagggtaagcagggccggcggggcctgggtcgtcgcgaccaggcagtgcagaccggcttcgtcagccccatccggcccctggggctgcagctgggcgcccggccggccgctgtctgcagcccttcggcgcgcgtgctgggctcgcccgcgcgctccccggccggccccctcgcgccctccgcggccagcctctcgtcgtcctccacctccacctccaccacctattcctcgtcggcccgcttcatgcccggcaccatctggtcgttctcgcacgcccgccggctcgggccgggactggagcccactctggtgcaagggcctggcttgtcgtgggtgcacccggatggggtgggcgtccagatcgacaccatcacgcccgagatccgcgctctctacaacgtgctggccaaagtgaagcgggagcgggacgagtacaagcggaggtgggaagaggagtacacggtgcggatccagctgcaagaccgtgtaaatgagctccaggaggaagcccaggaggctgatgcctgccaggaggagctggcactgaaggtggaacagttgaaggctgagctggtggtcttcaaggggctcatgagtaacaacctgtcggagctggacaccaagatccaggagaaagccatgaaggtggatatggacatctgccgccgcatcgacatcaccgccaagctctgcgatgtggctcagcagcgcaactgcgaggacatgatccagatgttccaggtcccatccatgggggggcggaagcgggagcgcaaggctgccgtcgaggaggacacctccctgtcggagagtgaggggccccgccagcccgatggggatgaggaggagagcacagccctcagcatcaacgaggagatgcagcgcatgctcaaccagctgagggagtatgattttgaggacgactgtgacagcctgacttgggaggagactgaggagaccctgctgctttgggaggatttctcaggctatgccatggcagctgcagaggcccagggagagcaggaagatagcctggagaaggtgattaaagatacggagtccctgttcaaaacccgggagaaggagtatcaggagaccattgaccagatagagctggagttggccacggccaagaacgacatgaaccggcacctgcacgagtacatggagatgtgcagcatgaagcgcggcctggacgtgcagatggagacctgccgccggctcatcacccagtctggagaccgaaagtctcctgctttcactgcggtcccgcttagcgacccgccgccgccgccaagcgaggctgaggactccgatcgcgatgtctcatctgacagctccatgagatagagacctgcctcccccttgcacccgaggccctcgcagcagggagctcagcgaggcagagggtggggctgcacagaggggaacatcagctgcagctctgcaccaggccggtccctggggactggggcgctcctccctcaggctttctccctcagtcttggcttctccagggctctggggtgtctggagctaggcttggccctaccattctggggccatttccaccacagttggggctctcctgccttcacgcgtgggtgtctgctacttccccatctttaaaatgctgccagagcgattgcggcccctcaccttgtccacgtatcaggaatgtgaatgtgggacctttcctccatccctgttgtccggagccagctcactgtcttccacactggtgctaactggcccaggcactggagtggaatagaatgcagctggaggctacgcatggcctctgcagcacacgcagctggagagggcttctgtccctgtcagcggcagagggcgttggggctggccggggcaccttgtccctgctatggtccacgtgctcacgctgtccacctgccaggtggagtgtatgtggctgtggccctccctcgtggaggtgccgtgctttaaagaggccttagtgcccgggatgggcacagtgttttgaagggaggtgggagctcttgctctcctggtcactgcagaatgacagagaaggtgaagctccatgcatgtgtgcgcgggtgtatgtgcgctcagggtctctgtttaagtatcagctaaagatgtgcttcctccgtgtctgtcatacactgagaccaacaggctacagtgtccctgattcttggaaaagcctggagaagctggggagatgcggttcacaatgcctcggtataggaggctgtgttgagctgacattcaaatggattctttaataataatgaaactggcgagtatttattgtgcaaa

SEQ ID NO: 1735 - DNA, 1852 bp, Homo sapiens
cgagcccttccttccttgtctgactgctcttcttctcgatttcttcttgttctgccttctcggtttgcagccctgacccccgctgtgtgtctggcccttggtgactgtccgtgtttctgttcctgtcattgtaactgtgacttttctctctgtctgcccccccttcctactggttcatgcttctcccccattcccaccctctctgcccggcctcccgctcccgccctttctcctcatgcacccggcctcgtctctgtagtctctgcacttgtctcccattaaggtcccatccatgggggggcggaagcgggagcgcaaggctgccgtcgaggaggacacctccctgtcggagagtgaggggccccgccagcccgatggggatgaggaggagagcacagccctcagcatcaacgaggagatgcagcgcatgctcaaccagctgagggagtatgattttgaggacgactgtgacagcctgacttgggaggagactgaggagaccctgctgctttgggaggatttctcaggctatgccatggcagctgcagaggcccagggagagcagcaggaagatagcctggagaaggtgattaaagatacggagtccctgttcaaaacccgggagaaggagtatcaggagaccattgaccagatagagctggagttggccacggccaagaacgacatgaaccggcacctgcacgagtacatggagatgtgcagcatgaagcgcggcctggacgtgcagatggagacctgccgccggctcatcacccagtctggagaccgaaagtctcctgctttcactgcggtcccgcttagcgacccgccgccgccgccaagcgaggctgaggactccgatcgcgatgtctcatctgacagctccatgagatagagacctgcctcccccttgcacccgaggccctcgcagcagggagctcagcgaggcagagggtggggctgcacagaggggaacatcagctgcagctctgcaccaggccggtccctggggactggggcgctcctccctcaggctttctccctcagtcttggcttctccagggctctggggtgtctggagctaggcttggccctaccattctggggccatttccaccacagttggggctctcctgccttcacgcgtgggtgtctgctacttccccatctttaaaatgctgccagagcgattgcggcccctcaccttgtccacgtatcaggaatgtgaatgtgggacctttcctccatccctgttgtccggagccagctcactgtcttccacactggtgctaactggcccaggcactggagtggaatagaatgcagctggaggctacgcatggcctctgcagcacacgcagctggagagggcttctgtccctgtcagcggcagagggcgttggggctggccggggcaccttgtccctgctatggtccacgtgctcacgctgtccacctgccaggtggagtgtatgtggctgtggccctccctcgtggaggtgccgtgctttaaagaggccttagtgcccgggatgggcacagtgttttgaagggaggtgggagctcttgctctcctggtcactgcagaatgacagagaaggtgaagctccatgcatgtgtgcgcgggtgtatgtgcgctcagggtctctgtttaagtatcagctaaagatgtgcttcctccgtgtctgtcatacactgagaccaacaggctacagtgtccctgattcttggaaaagcctggagaagctggggagatgcggttcacaatgcctcggtataggaggctgtgttgagctgacattcaaatggattctttaataataatgaaactggcgagtatttattgtgcaaa

SEQ ID NO: 1736 - DNA, 1666 bp, Homo sapiens
gccttcgcggcgctcgtttcctggcgctccccacctttagcgagaccaacgagagaacaccgcctgcagctagaacagcctggtcaggagcgtaacggagtggtgcgccaacgtgagaggaaacccgtgcgcggctgcgctttcctgtccccaagccgttctagacgcgggaaaaatgctttctgaaagcagctcctttttgaagggtgtgatgcttggaagcattttctgtgctttgatcactatgctaggacacattaggattggtcatggaaatagaatgcaccaccatgagcatcatcacctacaagctcctaacaaagaagatatcttgaaaatttcagaggatgagcgcatggagctcagtaagagctttcgagtatactgtattatccttgtaaaacccaaagatgtgagtctttgggctgcagtaaaggagacttggaccaaacactgtgacaaagcagagttcttcagttctgaaaatgttaaagtgtttgagtcaattaatatggacacaaatgacatgtggttaatgatgagaaaagcttacaaatacgcctttgataagtatagagaccaatacaactggttcttccttgcacgccccactacgtttgctatcattgaaaacctaaagtattttttgttaaaaaaggatccatcacagcctttctatctaggccacactataaaatctggagaccttgaatatgtgggtatggaaggaggaattgtcttaagtgtagaatcaatgaaaagacttaacagccttctcaatatcccagaaaagtgtcctgaacagggagggatgatttggaagatatctgaagataaacagctagcagtttgcctgaaatatgctggagtatttgcagaaaatgcagaagatgctgatggaaaagatgtatttaataccaaatctgttgggctttctattaaagaggcaatgacttatcaccccaaccaggtagtagaaggctgttgttcagatatggctgttacttttaatggactgactccaaatcagatgcatgtgatgatgtatggggtataccgccttagggcatttgggcatattttcaatgatgcattggttttcttacctccaaatggttctgacaatgactgagaagtggtagaaaagcgtgaatatgatctttgtataggacgtgtgttgtcattatttgtagtagtaactacatatccaatacagctgtatgtttctttttcttttctaatttggtggcactggtataaccacacattaaagtcagtagtacatttttaaatgagggtggtttttttctttaaaacacatgaacattgtaaatgtgttggaaagaagtgttttaagaataataattttgcaaataaactattaataaatattatatgtgataaattctaaattatgaacattagaaatctgtggggcacatatttttgctgattggttaaaaaattttaacaggtctttagcgttctaagatatgcaaatgatatctctagttgtgaatttgtgattaaagtaaaacttttagctgtgtgttccctttacttctaatactgatttatgttctaagcctccccaagttccaatggatttgccttctcaaaatgtacaactaagcaactaaagaaaattaaagtgaaagttgaaaaa

SEQ ID NO: 1737 - DNA, 1838 bp, Homo sapiens
gccttcgcggcgctcgtttcctggcgctccccacctttagcgagaccaacgagagaacaccgcctgcagctagaacagcctggtcaggagcgtaacggagtggtgcgccaacgtgagaggaaacccgtgcgcggctgcgctttcctgtccccaagccgttctagacgcggatgaagtgcaaaacaaacttctccatagaggagttgttgcaaagttccagtttataccaaacagtaatcagattccattggaagctaaagattttgagagccttttgtactatatgcaactaacttgatttcaagcttgggaaccttttaaaaaaaacattaaaagcaaaatgaaaaatgctttctgaaagcagctcctttttgaagggtgtgatgcttggaagcattttctgtgctttgatcactatgctaggacacattaggattggtcatggaaatagaatgcaccaccatgagcatcatcacctacaagctcctaacaaagaagatatcttgaaaatttcagaggatgagcgcatggagctcagtaagagctttcgagtatactgtattatccttgtaaaacccaaagatgtgagtctttgggctgcagtaaaggagacttggaccaaacactgtgacaaagcagagttcttcagttctgaaaatgttaaagtgtttgagtcaattaatatggacacaaatgacatgtggttaatgatgagaaaagcttacaaatacgcctttgataagtatagagaccaatacaactggttcttccttgcacgccccactacgtttgctatcattgaaaacctaaagtattttttgttaaaaaaggatccatcacagcctttctatctaggccacactataaaatctggagaccttgaatatgtgggtatggaaggaggaattgtcttaagtgtagaatcaatgaaaagacttaacagccttctcaatatcccagaaaagtgtcctgaacagggagggatgatttggaagatatctgaagataaacagctagcagtttgcctgaaatatgctggagtatttgcagaaaatgcagaagatgctgatggaaaagatgtatttaataccaaatctgttgggctttctattaaagaggcaatgacttatcaccccaaccaggtagtagaaggctgttgttcagatatggctgttacttttaatggactgactccaaatcagatgcatgtgatgatgtatggggtataccgccttagggcatttgggcatattttcaatgatgcattggttttcttacctccaaatggttctgacaatgactgagaagtggtagaaaagcgtgaatatgatctttgtataggacgtgtgttgtcattatttgtagtagtaactacatatccaatacagctgtatgtttctttttcttttctaatttggtggcactggtataaccacacattaaagtcagtagtacatttttaaatgagggtggtttttttctttaaaacacatgaacattgtaaatgtgttggaaagaagtgttttaagaataataattttgcaaataaactattaataaatattatatgtgataaattctaaattatgaacattagaaatctgtggggcacatatttttgctgattggttaaaaaattttaacaggtctttagcgttctaagatatgcaaatgatatctctagttgtgaatttgtgattaaagtaaaacttttagctgtgtgttccctttacttctaatactgatttatgttctaagcctccccaagttccaatggatttgccttctcaaaatgtacaactaagcaactaaagaaaattaaagtgaaagttgaaaaa

SEQ ID NO: 1738 - DNA, 3928 bp, Homo sapiens
gaaggtccccggcttcgtggctagccggggtcctagcgctggaaaggtggccgtagcggccgcctgacccatacaaaagtctgggacaggggcagcgacaaaggccttgggaggacgcccatggtcggagggatctcgccccgggagaaaagttgggacaggagcgcgggatcgaagggtggactccgagccggcctgtcaggcaagagccgggcaggtgcggtggcggaagtgcagggacggaggccgaagcggagcggtctagggagccgcggccgcgggtcacccggcgggtagcagttgctgagtgtcagctagacagcagcgactagggctcgggcgccggcgagatgcctttgttcaccgccaaccccttcgagcaagacgtggaaaaagccacgaatgagtacaacactacagaagattggagtcttattatggacatatgtgacaaagttggaagtactcctaatggagcgaaagattgcctaaaagccataatgaaaagggtaaatcataaggttccacatgttgctctgcaagcactaactcttcttggggcttgtgtggcaaactgtggaaagatatttcatttagaagtatgttcccgtgattttgcaacagaagtacgtgctgtgattaaaaataaggcacatcctaaagtatgtgaaaaactgaaatctttaatggtggagtggtcagaagaatttcagaaggaccctcagtttagtctgatatctgcaactattaaatctatgaaagaagaaggaattacttttcctccagcaggttctcagactgtctcagctgctgccaagaatggtacgtcatcgaacaaaaacaaagaggatgaagacatagctaaagctattgaattatcgctgcaagaacagaaacagcaacacacagaaacaaaatccttatatccatcttcagaaattcagttaaataataaggttgcacggaaagtgagagctttatatgattttgaagctgttgaggacaatgaactcacctttaaacatggtgaaataattattgttttggatgacagtgatgccaattggtggaaaggagaaaatcacagaggaataggacttttcccatccgattttgtaacaactaatttaaacatagagactgaggtagcggctgtggacaaattgaatgtaattgatgatgatgtggaggaaattaagaaatcagagcctgagcctgtttatatagatgaggataagatggatagagccctgcaggtacttcagagtatagatccaacagattcaaaaccagactcccaagaccttttggatttagaagatatctgccaacagatgggtccaatgatagatgaaaaacttgaagaaattgataggaagcattcagaattgtctgaattgaatgttaaagtcctggaagctctggaactatataacaaattggtgaatgaagcaccagtgtactcagtctattcaaagctccaccctccagcacattacccacctgcatcatctggggttccaatgcagacatatccagttcaatcacatggtggaaactatatgggtcagagcattcaccaagtaactgttgcccaaagctatagcctaggacccgatcaaattggtccactgagatctctgcctccaaatgtgaattcctcagtgacagcacagcctgctcaaacttcatatttaagcactggacaagacactgtttccaatcctacttatatgaaccagaactctaacctacagtcagctactggtacaactgcttacacacagcaaatggggatgtctgtggatatgtcatcttatcagaacactacttccaatttgcctcaactggcaggctttccggtgacagttccagctcatccagttgcacagcagcacacaaattaccatcagcagcctctcctttagaaacaaatcaagcattttcttgaaagccttcataagtgtattattcagtccttgtgataccaacctgaaaatattaaaacttttttccctctcaactcaaaaggaccatgaataaataaagcacaaaaacctctcttattctacaaggccataaaaggtttttttttttttttttttttcagtccagtttgtttgaagtcaatcttttcatcagaggcagcttaaagatgctttcagttagttttgtcttactttcagatttctctacataaatctagatactcattaagtagccttatgacaaacagtatgagatacttatgacaaactcgctctgtcacccaggctggagtgcagtagcatgatcgacagagtgagtttgtcaaaagtatctcatacttataaacagtatgagataggaggattaaaatattattttaaagaaaccactgtttccccctaaaatgtcataagagcactgaagaacttgaaatatttttttcagagtttctcacacactttaaaagtctaacttttttgtgtgtaagcatttagcttgccagcatatttctttttggctccttaaattgcggttgtgtttgcagtattgtcacttttgctctcactgttatgttgaataataattagcatataattgtctacagaagcaagagcaatctggaaggaacaaaaatgttttctgtgattaacagtgaagaccttgtaaatgcagatgtgtgataaagcatttagtcagtcccccaaacagtcatgccaactgtgaaggaatgtcccacaaaacatttccattccctgaggaaaaacattttctttcctacatgtatctctggtatttagaattgtcactaataaccttttcaagtgattttggctattctctaatgaagatatggtccatttgtttttcttcctgcaatgtggtgtgcagagatgctgcatatcctttttatgggattgcgtgtgaatttgaaccatgagacattcctaataatttgttgtgagatataccaagcatggatgataagtgtgtttttagtggtgtgttgtttttttaaagaggtgattcaagtaccgttgctaagctgtcaacataccaagctgttgaaaaaattgaccatttctttcagaagtaattctcagcctgtggaataatagcaggtgaagacttcatagaaggcgacagatagattgggaggctattgaagcagtttttctgaagcctgcattttgagttagtttatagtgctaatagattctatataactgtgagagtttggtagtaaaccagtagggattgttttctctcctaaaaatttgcacactacttcattgtctaccaactttttacatattggaaaatagaaattgcaaatacatacatgtatggaaacatattcagattgggaaaaacaatggacattagtttttaaaaagttacgtggaagcaagatttctatatttgtttttttaaaggaagcagtcattctttctactaaatccatttcaagctagttctctgaaaattttgccatttatctacagaaatttgattataaatatgttcctttttcaaagaaactttattctagaacaaaatagtctatatggtacttgatctacatttaagtggaaaaattagcagtatttgaaagctcagtttatgtcattgtcttaacttcagatacaaataactgaacagaaagttttaacctttaatatctcatgttctgttttttattcagtattttcctttatgttaattcaattatatacttctgaatggcaccttactttttggaaacaaatcttctgttatttacaaaataataatttttaaaaaacatttaaaaaaaatccaaagctgctctcgataatagtcaacatttgcatatatatggaatttcttactttttttctcccaaactctatttaataaacttattttaatgtttgtgtatttcaaaaaaaaaaaaaaaaaa

SEQ ID NO: 1739 - DNA, 444 bp, Homo sapiens
ctttagtcaggaaggacgttggtgttgaggttagcatacgtatcaaggacagtaactaccatggctcccgaagttttgccaaaacctcggatgcgtggccttctggccaggcgtctgcgaaatcatatggctgtagcattcgtgctatccctgggggttgcagctttgtataagtttcgtgtggctgatcaaagaaagaaggcatacgcagatttctacagaaactacgatgtcatgaaagattttgaggagatgaggaaggctggtatctttcagagtgtaaagtaatcttggaatataaagaatttcttcaggttgaattacctagaagtttgtcactgacttgtgttcctgaactatgacacatgaatatgtgggctaagaaatagttcctcttgataaataaacaattaacaaatactttgaaaaaaaaaaaaaaaaaaa

SEQ ID NO: 1740 - DNA, 2971 bp, Homo sapiens
gcggagcagcgcagggagccaggcgggctgccggcgggtgtgaagaaaaaaatgacactccaatgggctgcagtggcaacctttctttatgccgaaataggactcattttaatcttctgcctaccttttattcctcctcagagatggcagaagattttttcatttaatgtctggggtaaaattgcaactttttggaacaaggctttccttaccattatcatcctattgattgttctatttctagatgctgtgagagaagtaaggaaatattcctcagttcataccattgagaagagctccaccagcagacctgatgcctatgaacacacacagatgaaactttttaggtctcaaagaaatctttacatttctggattttccctatttttttggctagttttgagacgtctggttacgcttattactcaactggcaaaagaactgtcaaacaaaggtgtacttaaaactcaagcagaaaatactaacaaggctgccaaaaaatttatggaagaaaacgaaaaactaaaaaggattttgaaaagccatggtaaagatgaagaatgtgttttggaagcagaaaataaaaaactagtagaagaccaggagaaactgaaaactgaattaaggaagacttcagatgccctttctaaggcacaaaatgatgtgatggaaatgaagatgcagtcagagagactttcgaaagaatatgatcaactcctgaaagaacactctgaacttcagcattccagttttggtgaatttttaagcaaaagaagccacaaaaatggcagcattggaaaacagactggttctagaaaaggatcgtttagaaagaggcaacaagaaaagactgtgaactttataaaagacacttgcaatatactgtgtcaaaatgataattttgttatgttagcctctagaaaatttaagttcagaaaaatgcactatgaccggttcgtaatttttttaatgccacacataggttgtattgtaatggcattatcaaaatatttgatgatgtttcagatatattgcaaagtctgtattccagctcttaagaaaaatataagcatgttaaataccatatttacatattgataatgtcattggtatatggtggctgtttaccaataaaaggaaaaaattcattaaccggttgcttccaaaattagaagttttaagttgcatgaaaccattaatagccttgaaagctttgataagttttcagtaataataacctatttaatcagatgatgatgtgtttgaaaatagtgttcaatatcagcaaatttgtacacagggaatgtaaataaggataactgatcagagttatccactgtatttataaggaagagtcggaaaaaacaatgaccttagttttttttaagcctgatgatactatggtttactctaataagatagctatattgataattatatttttgttactgtgcccttgcacattttggtctttttgttaatatttttattaataacacataattagtaaccactctactgtttcaagttaatctagtaatagagcttacatatatttgtataactgctataccactgaactgaatttattttacaacagtgtagaattcttgaaaagttaacgtagaaaatatccaaaaagcagtatttctagaaagtgtccaaaaagcagtatttctttcccttggttgtgagagtaactaattatataaatattacctcaaaaatacatacactggtatcacacagtctttctacaatgtttctgtattctgaaagctaaatattaagtactatttttccattcaaatattcatttagaatttcctttagaagatggcagtgattataatattaatatgatttcatttgttccagtgtttagacatgaaatcatcttccttgtctcatgaaaacctaaatataaaaaaaaggaaaatactggagtttttatttctcttgtctttgttacatcctctgtttattataattttagcaccaacttcacacctagctaatttttttcatcataaagtggatgaaatgagcaagtacctaaaaattttatttcagataaaagtcaggagttactgctaaaaaacagacatgtaggagacattcaacaggagtatgaaatgagagttagaccatatgggctgacaacaccataaataacaagaaaagggagtgctgaaataggagagaacagagcaaatgttagctcaaagtatagacttagaaatatcaaagtaagagctatctggataaatatatagatattgagtgcttggaatcctagcctactatgtgaaaattaagtctaatgtcagaataacttacagaaaaatagaaaatgcacagctttaaaatgggcagagttaaaatctattcccagctttatcacttatttagccatgctagcctaggcctctatttccttgtctccaaaatgagaataataaaatttaggtcaggattactatataaactaagataatacagtgattctcaaagttgttcagactgtatagtaaggagaaagtctggttgcactttgaagagcttgaagatttgaaagattcccaaaaaagcattttaaagtttacatttaagggaccttggacctcaaccctctcaagtttacaagtctgaaactttagacatcaaaagtttgagcagtttttccaaggcaacattgatagttagattcagggccaggctgtaagtctagaatttagatatcctgatcccccagataccgctcttctggttatacacagaccagctataatttgctaaacataaaatattgcagtgtattagccggctgtggctccagagtctgtgccctttaccaccgtgcccaactgtttcacatgctgtgtttggtagtttttcctagtactctccttaataatggtggtgtttagcaaattgtattacataaataaatatttatttcatggattga

SEQ ID NO: 1741 - DNA, 2429 bp, Homo sapiens
gcggagcagcgcagggagccaggcgggctgccggcgggtgtgaagaaaaaaatgacactccaatgggctgcagtggcaacctttctttatgccgaaataggactcattttaatcttctgcctaccttttattcctcctcagagatggcagaagattttttcatttaatgtctggggtaaaattgcaactttttggaacaaggctttccttaccattatcatcctattgattgttctatttctagatgctgtgagagaagtaaggaaatattcctcagttcataccattgagaagagctccaccagcagacctgatgcctatgaacacacacagatgaaactttttaggtctcaaagaaatctttacatttctggattttccctatttttttggctagttttgagacgtctggttacgcttattactcaactggcaaaagaactgtcaaacaaaggtgtacttaaaactcaagcagaaaatactaacaaggctgccaaaaaatttatggaagaaaacgaaaaactaaaaaggattttgaaaagccatggtaaagatgaagaatgtgttttggaagcagaaaataaaaaactagtagaagaccaggagaaactgaaaactgaattaaggaagacttcagatgccctttctaaggcacaaaatgatgtgatggaaatgaagatgcagtcagagagactttcgaaagaatatgatcaactcctgaaagaacactctgaacttcagaagcaaagggagatattaccacacagaagaggagaaagcacagtgaccacagaggcagagattggagtgatggagccgcagcaaaggaatgctgacagccaccagaagctggaggaggcaaagaacagattcttccccagagcctcttccagcaggagcatggccctacagataccgataaaactgatattggacttcctggcctccagaactatgggaataaatttattgtttcaagctatcaagtttgtgattatttgttactgctgccatagtaaattaatacaggagcatgcaggacagatctgtaatggcctgaactgaatttcaaggggtgtggaaaacagttactctttaacaccactccgtcttccccattagccatttggataagtcaaagatagccttagccatctcctatcttagttacttttctccttcaactgtattttgccattgtcgttgccattgcctctgcctaactgcaagccatcatcatctctcacatggactatgacgacctcctcatctccctgtatcttctctaatgcttctctcatatacatgctctcagcagccacctggtttaaaacaaaaacaaaaaaaacactaatcatgtcattccctgcttgtcttcccgttctttccaactgtcattccctgcttgtcttccaattctttccaactgcagttaagatcaaaccaccaagacctcaccaggctcccatctacttttcagcctcaactcagtccacctgctctgccaatcacacctgtttctttttgttgttctttccctaggatatagatcctggcatacctgcattctgattcttcttggaacaagccaaattctttcccctgtcagtacgtttgcatgtgtagtacatgttgcatcccaggcctgtctgccttcttaccctattttattttcatcatagcacttactaccatctgaaatgatctcatttatggtttgtctcctcagtgattaacacagttcctgcacacagtaaatcagtagttctcaacaggaagtgaagaggtcatcctgaggggaacatttagcaatacctagagacatttctggttgtcataaccaggggaatgctcctagtggatagaagtcagggaggctgttaaacccattccacaatgcacaggactggaacaaagaatgatctctcactcagaatgtcagtgttgccaaggtggagacatcctgcagtagatgcttgtggcagagggtactggttgtaccccagtatccattctttcattcacctgtgttaatacatgctccagttttgtatttttttttataaacagctgtcaagcataaagataacattttccatctccttgtatgtaagtggaaataggactgtcatgtggggccagtttcttttttttcttcctctgtcctgctgcttgaaacatatgctgctatcttagatcatgaggtcgaggccatgcaaagtggagcaacaaggagctgtgtccctgacgccataagcaccacacctgtcctgaattgctgtgaatgacaccagctaactacaatgcattgtctcaacatcctagacataataaaaagccataaatatgtttgtcctatgcagcacaaaacctttgtatctttgccttttatgttgggatcttaattaaaaattacatcctctactgtc

SEQ ID NO: 1742 - DNA, 2640 bp, Homo sapiens
gcggagcagcgcagggagccaggcgggctgccggcgggtgtgaagaaaaaaatgacactccaatgggctgcagtggcaacctttctttatgccgaaataggactcattttaatcttctgcctaccttttattcctcctcagagatggcagaagattttttcatttaatgtctggggtaaaattgcaactttttggaacaaggctttccttaccattatcatcctattgattgttctatttctagatgctgtgagagaagtaaggaaatattcctcagttcataccattgagaagagctccaccagcagacctgatgcctatgaacacacacagatgaaactttttaggtctcaaagaaatctttacatttctggattttccctatttttttggctagttttgagacgtctggttacgcttattactcaactggcaaaagaactgtcaaacaaaggtgtacttaaaactcaagcagaaaatactaacaaggctgccaaaaaatttatggaagaaaacgaaaaactaaaaaggattttgaaaagccatggtaaagatgaagaatgtgttttggaagcagaaaataaaaaactagtagaagaccaggagaaactgaaaactgaattaaggaagacttcagatgccctttctaaggcacaaaatgatgtgatggaaatgaagatgcagtcagagagactttcgaaagaatatgatcaactcctgaaagaacactctgaacttcaggtttttgctaaactacttaactacctccttatgaggaagtggtgagccagcctccaactcctcccccagcatacagtgacttccagctacgcagcagcagcagctcctgcctccacagtgaggcctggcagatggcagtcccccagcgccaatcccaccaggggatccaagggaatcccttgtctgagcccagcagaagcatcacaagacccccaagcatcgctgatcctgagccctctgacctaccaggtgaccgagtagccaccaaagccctggggatgcagcccagtggctctgtagccagcctgggagagctggacccaggggccttcctggacaaggaggcagaatgtaaggaggagctgctgaaagatgacagttctgaacatggcagcgcaccgcccaacagcaaagagaagatgctcaggagacattgccacttcactggtgacgcgggcattgaagtgcgtatgtcagggccaccatgatcatagccttaaagagttcaacatgctcatcgctgatgcactggatgggcccctggacttctgcgacagctgccatgtgcagcctcctggtgatgaggaggaaggcctcttccagccctccaaggagcaggcttgacagcctgggcacctgcacctgccacagctacctgcatgcctgctgctaaacatcatcaatgagcagtactctcccaactcccagagcagcagctcccgcagctagatcaggctctgccagcacccaagaacttggcaaagcaaccagggtaggggagaaccacgagagaagcattaaatgactttcagagaaagtggtacagccacttgattcctttttttttttttctttctcctctcctgcattttcctccatctccaggtacagtttggggtgtggatgcctctcgccctacaaaggcacaatgttgtggagggctgagaagttggttctgtttctcgttcctcataccccatccctatcccctttattctccctttaaagtcctatctcacctacctgtttgggtcagagagatgtgttttaaaggcccccaaggaaggaggctgggactgtgccctgagatgattcttggtgacgaagtggatttgtgctctgagtttagtttaagagaacgtcactgtgtctcagtcccggagaggcaacccatcttagacctgggtgaagaaggaagcctgcagaggcctaggctttgtcgcctgtggctcccagtgtctgcagagccagcattgagctaatcctgtgggaggatgagagctgatcggcagttgtatgataggttggtagggggcttgtgatctgtgaaattccaggtgatggatgcatccagtgtgcatcactaagaggccctttcccagtggcctctggctggctgcaggctggttccagtgtgaaagattatactgccttttcttttttttattttccttttgaaaacagacaacaaaagacaactgaaaataacttccccagtgagcaggcaagaattctcttctgaaaaatgacgtttgtagttctttcccaagttggccttcaaagagcctggctgcagttgagccagaaggagatgtcttgtgtgaaggctaaagtggaggctgtctctgaaatctccgtgagcaggtggccctaagccatggtggtggatagatgtgcagctttctgcatctctgccccttggtctgtgcccacaggtggccggcgtcagcctccatcccgagcacatgctccgcgggtctttatgtctcactgttcttcacacataggaggaaagagataggagactgaggaagggatggaccctgagaaagggcccctccagcctggctctcacacagtattttgtctttgattctgaataaatttttttttgtggtt

SEQ ID NO: 1743 - DNA, 2892 bp, Homo sapiens
gcggagcagcgcagggagccaggcgggctgccggcgggtgtgaagaaaaaaatgacactccaatgggctgcagtggcaacctttctttatgccgaaataggactcattttaatcttctgcctaccttttattcctcctcagagatggcagaagattttttcatttaatgtctggggtaaaattgcaactttttggaacaaggctttccttaccattatcatcctattgattgttctatttctagatgctgtgagagaagtaaggaaatattcctcagttcataccattgagaagagctccaccagcagacctgatgcctatgaacacacacagatgaaactttttaggtctcaaagaaatctttacatttctggattttccctatttttttggctagttttgagacgtctggttacgcttattactcaactggcaaaagaactgtcaaacaaaggtgtacttaaaactcaagcagaaaatactaacaaggctgccaaaaaatttatggaagaaaacgaaaaactaaaaaggattttgaaaagccatggtaaagatgaagaatgtgttttggaagcagaaaataaaaaactagtagaagaccaggagaaactgaaaactgaattaaggaagacttcagatgccctttctaaggcacaaaatgatgtgatggaaatgaagatgcagtcagagagactttcgaaagaatatgatcaactcctgaaagaacactctgaacttcaggatcgtttagaaagaggcaacaagaaaagactgtgaactttataaaagacacttgcaatatactgtgtcaaaatgataattttgttatgttagcctctagaaaatttaagttcagaaaaatgcactatgaccggttcgtaatttttttaatgccacacataggttgtattgtaatggcattatcaaaatatttgatgatgtttcagatatattgcaaagtctgtattccagctcttaagaaaaatataagcatgttaaataccatatttacatattgataatgtcattggtatatggtggctgtttaccaataaaaggaaaaaattcattaaccggttgcttccaaaattagaagttttaagttgcatgaaaccattaatagccttgaaagctttgataagttttcagtaataataacctatttaatcagatgatgatgtgtttgaaaatagtgttcaatatcagcaaatttgtacacagggaatgtaaataaggataactgatcagagttatccactgtatttataaggaagagtcggaaaaaacaatgaccttagttttttttaagcctgatgatactatggtttactctaataagatagctatattgataattatatttttgttactgtgcccttgcacattttggtctttttgttaatatttttattaataacacataattagtaaccactctactgtttcaagttaatctagtaatagagcttacatatatttgtataactgctataccactgaactgaatttattttacaacagtgtagaattcttgaaaagttaacgtagaaaatatccaaaaagcagtatttctagaaagtgtccaaaaagcagtatttctttcccttggttgtgagagtaactaattatataaatattacctcaaaaatacatacactggtatcacacagtctttctacaatgtttctgtattctgaaagctaaatattaagtactatttttccattcaaatattcatttagaatttcctttagaagatggcagtgattataatattaatatgatttcatttgttccagtgtttagacatgaaatcatcttccttgtctcatgaaaacctaaatataaaaaaaaggaaaatactggagtttttatttctcttgtctttgttacatcctctgtttattataattttagcaccaacttcacacctagctaatttttttcatcataaagtggatgaaatgagcaagtacctaaaaattttatttcagataaaagtcaggagttactgctaaaaaacagacatgtaggagacattcaacaggagtatgaaatgagagttagaccatatgggctgacaacaccataaataacaagaaaagggagtgctgaaataggagagaacagagcaaatgttagctcaaagtatagacttagaaatatcaaagtaagagctatctggataaatatatagatattgagtgcttggaatcctagcctactatgtgaaaattaagtctaatgtcagaataacttacagaaaaatagaaaatgcacagctttaaaatgggcagagttaaaatctattcccagctttatcacttatttagccatgctagcctaggcctctatttccttgtctccaaaatgagaataataaaatttaggtcaggattactatataaactaagataatacagtgattctcaaagttgttcagactgtatagtaaggagaaagtctggttgcactttgaagagcttgaagatttgaaagattcccaaaaaagcattttaaagtttacatttaagggaccttggacctcaaccctctcaagtttacaagtctgaaactttagacatcaaaagtttgagcagtttttccaaggcaacattgatagttagattcagggccaggctgtaagtctagaatttagatatcctgatcccccagataccgctcttctggttatacacagaccagctataatttgctaaacataaaatattgcagtgtattagccggctgtggctccagagtctgtgccctttaccaccgtgcccaactgtttcacatgctgtgtttggtagtttttcctagtactctccttaataatggtggtgtttagcaaattgtattacataaataaatatttatttcatggattga

SEQ ID NO: 1744 - DNA, 4519 bp, Homo sapiens
cagccagggccaccccaggggctataagagcaactagatttctggagcagctcggggatgggtgccatttgagcccagcttggctccccctcctggctggcctccttcctgcccttctgcctgcctgtgtctgctgagattctgcaaagaggaacgttggcaccatgtctctgctcaaccctgtcctgctgccccccaaggtgaaggcctatctgagccaaggggagcgcttcatcaaatgggatgatgaaactacagttgcctctccagttatcctccgtgtggatcctaagggctactacttatactggacgtatcaaagtaaggagatggagtttctggatatcaccagcatccgggatactcgctttgggaagtttgccaagatgcccaagagccagaagctccgggacgtcttcaacatggactttcctgataacagtttcctgctgaagacactcacggtggtgtccggcccggacatggtggacctcaccttccacaacttcgtctcctacaaggagaacgtgggcaaggcctgggctgaggacgtactggccctagtcaaacatccgctgacggccaacgcctcccgcagcaccttcctggacaagatccttgtgaagctcaagatgcagctcaactctgaagggaagattccggtgaagaactttttccagatgtttcctgctgaccgcaagcgggtggaagctgctctcagtgcctgccacctccccaaaggcaaaaatgacgccatcaatcctgaggacttcccagaacctgtctacaagagtttcctcatgagcctctgtcctcggccagaaatagatgagatcttcacttcttaccatgctaaggccaaaccctacatgacgaaggagcacctgaccaaattcatcaaccagaaacagcgggactcccggcttaactccctgctgttcccgccagcacggcctgaccaggtgcagggcctcatcgacaagtatgagcccagtggcatcaatgcacagaggggccagctgtcacctgaaggcatggtctggtttctctgtgggccagagaacagcgtgctggcccaggacaagctgctgctccaccacgacatgacgcagccactcaatcattacttcatcaactcgtcccacaacacctacctgacagccggccagttctcaggcctctcctcggctgagatgtaccgccaggtgctgctctctggctgccgttgcgtggagctagactgctggaaggggaaaccccctgacgaggagcccattatcacccatggcttcaccatgaccacagacatcttcttcaaagaagcaattgaggctattgcagaaagtgcctttaagacctccccctatcccatcatcctgtcgtttgagaaccatgtggactcaccccgccagcaggctaagatggctgagtattgccggacgatctttggggatatgctgctcacagagcccctggaaaagttcccactaaaaccaggtgtccccctgcccagccctgaggatctcaggggcaagatcctcatcaagaacaagaagaaccagttttctggccccacctcctccagtaaggataccggtggggaggctgagggcagcagcccacccagtgcccctgcagtgtgggctggcgaggaagggactgagctggaggaggaggaggtggaagaggaagaggaggaggagtcaggaaacctggatgaagaagagattaagaagatgcagtcggatgagggcacagcgggcctggaagtgacggcttatgaggagatgtccagcctagtcaattacatccagcccaccaagttcgtctcctttgagttctctgcccaaaagaaccgaagttatgtcatctcgtccttcacagagctcaaggcatatgacctgctctccaaggcctcggtgcagtttgtggactacaacaagcgccagatgagccgcatttaccccaagggaacccgcatggactcctccaactacatgccccagatgttctggaatgctggatgccagatggttgccctcaacttccagacgatggacttgcccatgcagcagaacatggcagtatttgagttcaacgggcagagcggctacctcctcaagcatgagttcatgcgccggccggacaagcagttcaaccccttctcagtggaccgcatcgacgtggtggtggccaccaccctttccattacggtgatctctgggcagttcctgtcagaacgcagcgtgcgcacctatgtagaagtggagctgtttggccttcctggggaccccaagaggcgctatcgaactaagctgtcacccagtactaactccatcaatcctgtctggaaggaggagccctttgtctttgagaagatcttgatgcctgagctggcctccctcagagtggctgtgatggaggaaggcaacaagtttcttggacaccgcatcatccccatcaatgccctaaattctgggtaccaccacctgtgcctgcacagtgagagcaacatgcccctcaccatgcctgcgctcttcatcttcctggagatgaaggactacatacctggtgcttgggcagatctcactgtggccctcgccaaccccattaagttcttcagtgcccatgacacgaagtctgtgaagctcaaggaggccatgggaggtctgcctgagaagcccttcccactggcgagtccagttgccagccaggtcaatggggcgttggccccaacgagcaatgggtcaccagcagccagggccggggccagggaagaggctatgaaagaagctgcggagccgcggaccgccagcctggaggagctccgggagctaaagggcgtggtgaagctgcagcggcggcacgagaaggagctgcgagagttggagcggcgcggagcgcggcgctgggaggagctgctgcagcggggcgcggcgcagctggcggagctcgggccaccgggcgtggggggcgtcggggcctgcaagctcggtcccggcaagggctctcgcaagaagaggagcctgccccgcgaggagagcgccggagccgcgccgggcgagggccctgagggcgtggacgggcgcgtgcgggagctgaaagacaggctggagctggagctgctgcggcagggcgaggagcagtacgagtgcgttctgaagcgcaaggagcagcacgtggccgagcaaatctccaaaatgatggagctggccagagagaaacaggcggcagagctgaaggccctgaaggagacgtcggagaacgacaccaaagagatgaagaaaaagctggagacaaagagactggagcggatccagggcatgaccaaagtcaccacagacaagatggcccaggagaggttgaagagagagattaacaactcccacatccaggaagtagtgcaggtgatcaagcagatgacggagaacttggagaggcaccaggagaagctggaggagaagcaggcggcttgcctggaacagatacgggagatggaaaagcagttccagaaggaggcgctggcagagtacgaggccaggatgaagggtctggaggcagaggtgaaggagtcggtgagggcctgcctcaggacctgctttccctccgaggccaaggacaagcctgagagggcctgcgagtgccccccagagctgtgtgagcaggacccactcatagcaaaggcagatgcccaggagagccgcctctgatgcccccatcccactgggacatttagcaaggaggttcagccccttctctgggatgtggttctattcccccaggaaaaaggagccccagccttctgaggctgtgggaacctgtggctgccttggacgctgcagccccctcctcaacggccaggccagagtctgagacaggacccaggcaccctcacggcagggcctctctggggcctagaagtcttctcaagctgacttcctacctccccctccatctctagataagtgtcatatatttgttgagggcaaaagactatggactggaaggcagaaagtgggatcctggccccactctgcctttcctattgagcaaccagctctgggctcagtttcctcacctggagggttggacccactcacctccactctagccccgaaccctcctgccccaggcttccaggccccatcaggcctgccctgagttggccttgtccactccttgaggcagatcctggcactacctcacagctccctggggacggccactccctggctgagggccctcccctcccctctgcctgtccggaacgggaggctgaaatggaaaagctgccttggccctgcttggctgagtcacaaggggcagtgggctcttgggtgctgttccaccctgaccctggctcacccctcttcctaggcctgggggcaggcagttcctaccatgtacccctctcaggctgcctgcctgacaaggtcagcatcatttgctctcctgaatttatgaggtttatttatttttctctttcctactcctattaaagaacctcgtcccagtgaaa

SEQ ID NO: 1745 - DNA, 3381 bp, Homo sapiens
gtcgtccgcggggcggggacgcggcggcggcggcggcggtggcggctgtgtgtcgccggagccgaagcgcgcaggcccgtcccggtggccggggagcgggcgggtgggggcgccatgtggttcatgtacctgctgagctggctgtcgctcttcatccaggtggccttcatcacgctggctgtcgcggctggactctattacctggcagaactgatagaagaatacacagtggccaccagcaggatcataaaatacatgatctggttctccaccgctgtactgattggcctctacgtctttgagcgcttccccaccagcatgattggagtgggcctattcaccaacctcgtctactttggcctcctccagaccttccccttcatcatgctgacctcgcctaacttcatcctgtcgtgtggactagtggtggtgaatcattacctagcatttcagttttttgcagaagaatattatcccttctcagaggtcctggcctatttcactttctgcctgtggataattccgtttgcgttttttgtgtcactttcggccggggagaacgtcctgccctctaccatgcagccaggagatgatgtcgtctccaattatttcaccaaaggcaagcggggcaaacgcttagggatcctggttgtcttctccttcatcaaagaggccattctacccagtcgtcagaagatatactgacccccatgcaggcaggatgtggggggcaagatcaggagagtcaggcccctgggcctctatgccaggtggggaccagaagtcgggaaggcacctaccacctgccctggctttcttcccctcaactctggagccccatccccaccctccttggggggctcagcttggctcagatctgatgcttcaagaggctgtaacctcagagggcaccaaggagggtggcagagcctgcttagccaggaggccgaggtccctcagtcctcccctgtcccttccaaggtgggtcaggaggttctggccccgctggggcaggcagggcagggtctgtgaagcttaagagcagatggtgacaagttctctgggcaggtggccatggggaggggccatggcttggcatgtccaacagaaatagtttttgctgttgaacggtgatttctgtccaagtgcagatttccgtttgaataaagcttcgcttctaggtggcactgtttgccttaataccctgacagttcatcttcctttcttcctgctaaccttctgctctggactggactcacttttctgctccagggactccttttctgggtttgggtcttgcccttcccaagggactgttcttgtggcccttaatgggaagggggcaggggtgaggagctgagcctgctcaaggagtgggaagtggggctataggcagcctctctgatgcactctcttccatctctttccccaaggctccgtgactgtcaaactgggagtaggagaggggacaatttaggactgggctagattttcagaagaacatctacaatatcctatttataaatcttcctctgggaaaaggagtggtttctggctgaatactatcttaggctcaaggagaaacaaaataaaaattagcttccaggcagcctgtttttaaagaaatgggactaatgggagaagctgtttgtcactctaagagcatccaagccctggcccgtctgtgcactcttggctcctggggagatatatctgccttctaagaaggcaggccaggtcttgggcacagacctgcatttgttgaccttgcactccaactatagtgccttgcaagtgctcaacagtacatattggaatgaagtccctatgagagccatttctggccatgttctatacctcaaagtgaggctggcaggtacagagatgaactgtacacatgtgatacatttaagccactggaaaaacccctgtgcttgaaaatatttcctctatatcatgcctggagttccatcatagcccttcatttccttggctttagcatttaccttctcttaagaataccagctttcccctttccctgagaggaagagcacatgttggtctcctcttagtgtgaacgagattgccaggcccttttctcctatgcacaccaggatagacaaggcaggggatactggcagcctgcatcatcctcccattgggctgacagctggccctactttcctccctctgctgcttggtccctcaccttgatgatgtggcttcgccccctccactctactgccagtgttctcccagggcttgctaaatccagcagacccctttcctgtcttactagatctgggcagcatttgacatggctgatcaccccttgcttcttggatggcacttccctggcacctctgtggctagttgtcctacctccctggctgttcctttcaggcttccgtgcaggcttctccacttgcccatgcacagtagggtctttcagggttctgctgtgggctccctagggaagcccatccatctggatggtttcaaggatggtgaggaatttagagttgacctccagccccaacatccttcctgatcacctgaaccacagttttgctgccctctaggtgcacagacaattcaggtccatggcccagatggtacttgctgtcttctgcaaacctgccccttctgggtacttcccttgaccccgagatcactcaggagccagacaggaaacttattctattcctgttttctctttctgcccaccacatccaatctctcaaaacggtcaggtctaccttaacatctcttgatttgagccactcccactgtcatcagctttcacctggattatcgtgacagcctcctactgcttctctatcatgtggccagagctatcttcctaaaatgcattgcatagttgatcaagtcactctctggcctaaaaccttccttggctccctgctgccctcaggataaagtctggacccctcagcatggcttgtgagactcatggtgtccttgtccctgctcacctctctggtctcatcacttgccttcttgcattctgggtcccagcctcctgtatccagagatgcagtggctctccattgccactctgattcctcctttcttttggtcacagagaaagggtactttctctgtcaaatctcaacttagacttgacttcctccaaggagctttggctatactctctcctcccgacccccaccctggcatactacacagatcactctgggctcacttgcctgcctaatggtcatctccccagtagactgtaagctccttgagggcaaggattgtgttggaatttttgtattaacagtgcctggcttggtgcctggcacctagaaagcactcaataaatgtttgtttaatgaatgaaaaaaaaaaaaaaaa

SEQ ID NO: 1746 - DNA, 3283 bp, Homo sapiens
cccgccagctcgcggagccgctctgccccgcgccctagcccgcgcctgcagcccgcccaggcggagtcagcccgcgctccgcccgccgcgatccgagctcggaggttcggactccgggctcgccgccccccgggccggctccgcgccccgcactcccggcgcccagcgccccgcgccccggcgggcggagcgcaccatgccgcagctggactccggcgggggcggcgcgggcggcggcgacgacctcggcgcgccggacgagctgctggccttccaggatgaaggcgaggagcaggacgacaagagccgcgacagcgccgccggtcccgagcgcgacctggccgagctcaagtcgtcgctcgtgaacgagtccgagggcgcggccggcggcgcagggatcccgggggtcccgggggccggcgccggggcccgcggcgaggccgaggctctcgggcgggaacacgctgcgcagagactcttcccggacaaacttccagagcccctggaggacggcctgaaggccccggagtgcaccagcggcatgtacaaagagaccgtctactccgccttcaatctgctcatgcattacccacccccctcgggagcagggcagcacccccagccgcagcccccgctgcacaaggccaatcagcccccccacggtgtcccccaactctctctctacgaacatttcaacagcccacatcccacccctgcacctgcggacatcagccagaagcaagttcacaggcctctgcagacccctgacctctctggcttctactccctgacctcaggcagcatggggcagctcccccacactgtgagctggttcacccacccatccttgatgctaggttctggtgtacctggtcacccagcagccatcccccacccggccattgtgcccccctcagggaagcaggagctgcagcccttcgaccgcaacctgaagacacaagcagagtccaaggcagagaaggaggccaagaagccaaccatcaagaagcccctcaatgccttcatgctgtacatgaaggagatgagagccaaggtcattgcagagtgcacacttaaggagagcgctgccatcaaccagatcctgggccgcaggtggcacgcgctgtcgcgagaagagcaggccaagtactatgagctggcccgcaaggagaggcagctgcacatgcagctatacccaggctggtcagcgcgggacaactacgggaagaagaagaggcggtcgagggaaaagcaccaagaatccaccacaggaggaaaaagaaatgcattcggtacttacccggagaaggccgctgccccagccccgttccttccgatgacagtgctctaggctgccccgggtccccagctccccaggactcaccctcataccatctgctgccccgcttccccacagaactgcttactagccctgcggagccggcacctacatccccaggtctctccactgctctcagcctcccaaccccagggcccccacaggccccccgcagcaccctgcagagcacacaggtacagcaacaggaatctcagagacaggtggcctagcaggcacaggacacctggccgcctccaggagcctaccccctgaaagtgacagagacccagatctcatggaaactggccaggggtcctgttaacgtcatctcagggtccagaccctgaagatttcagaggctgcaggacttctgcctgaacctggggtcatcgattcaaactgctccaagtggtgggaatcagatctgtcttgatgtgtcatctaattaagggaatcccttgtacctatggctgcctgcatctattctttgtaccatctgtcttgccagccagaagcctctgcctccctagcttttctgctataggtcagagatgggctgaactgagcctagctaccttctctacccatctcccccatcccccactgccacaccctccccattcagacacttcatggaccaagaatgagctggtttgtcaaacaacatgtgagcatggtcacaagcacaaagctcaagatgacagctcttctaaggaaatggagaagctctgtttataaaaacaaaaacaaaaccagctgctactcataagttggaccagaggaagccccttactatgatctcaggagcttgcaagaagcaggaaggggaatggaataggttaagtttaggcctatcaacctaagcaacagaaataatctgacactaccttatcaggcaaattggggaggggagggtgtatctagctctagttcaaattatttggaagtgttccctgagaaacccaccagcctaagaagctctggccccaggcttgtcactagcagctgcagtcaacagttcaaagaagtcatggcccaaatccagtgtgcacccctccccattcacagagcctttttcacaattccatttccagttcatctatggcagtccagccagctcctgggcagcttgagagggcaaacccaaaacctcatgacagccagagcctgtctttcagcattcagtccgcctggccggctccagtttccccatggggctgcgggacagaggaccattacaactagatcaaggagcccagaaaacctccagtagtggacaacaggttttcaccatagcctacgttaacccatttttgagccaagcttcaaccctcagccttgaaaaacaagtctttaatttaatttttgttttttgcctaaatccaaagaaaaagggctgccgggccaggcgcggtggctcacgcctgtaatcccagcactttggcaggccgaggcaggtggatcacctgacgtcagtagtttgagaccagcctggccaacatggtgaaaccctgtatctactaaaaatacaaaaattagccggacgtggtggtgcgcgcatgtaatcccagctactcgggaggctgaggcggaagaatcacttgaacccgggaggcggaggttccagtgagccgagatggcgctattgcactccagtctgggtaacagggagactgcatctcaaaaaaaaaaaaaaaaaaaaaaaagggctgtccatgtattcacacacccctcaaaaaaagcctttagttcctactttagccactggtttctcagaatccaaagatcacatattctagtgtaacactgcaagaagtcttgagaaaaagattattgtagtgttcaaaatatttttgtattgttaatgcatcatcatagaaaaacttttaaacatgagaataaagatactttttactgggtttgtttttcaaagcctgaaaaaaa

SEQ ID NO: 1747 - DNA, 2821 bp, Homo sapiens
gcccaggtgactgactaatccgccgccttcaggagacagaattggccaaggcctgaaggccccggagtgcaccagcggcatgtacaaagagaccgtctactccgccttcaatctgctcatgcattacccacccccctcgggagcagggcagcacccccagccgcagcccccgctgcacaaggccaatcagcccccccacggtgtcccccaactctctctctacgaacatttcaacagcccacatcccacccctgcacctgcggacatcagccagaagcaagttcacaggcctctgcagacccctgacctctctggcttctactccctgacctcaggcagcatggggcagctcccccacactgtgagctggttcacccacccatccttgatgctaggttctggtgtacctggtcacccagcagccatcccccacccggccattgtgcccccctcagggaagcaggagctgcagcccttcgaccgcaacctgaagacacaagcagagtccaaggcagagaaggaggccaagaagccaaccatcaagaagcccctcaatgccttcatgctgtacatgaaggagatgagagccaaggtcattgcagagtgcacacttaaggagagcgctgccatcaaccagatcctgggccgcaggtggcacgcgctgtcgcgagaagagcaggccaagtactatgagctggcccgcaaggagaggcagctgcacatgcagctatacccaggctggtcagcgcgggacaactacgggaagaagaagaggcggtcgagggaaaagcaccaagaatccaccacaggaggaaaaagaaatgcattcggtacttacccggagaaggccgctgccccagccccgttccttccgatgacagtgctctaggctgccccgggtccccagctccccaggactcaccctcataccatctgctgccccgcttccccacagaactgcttactagccctgcggagccggcacctacatccccaggtctctccactgctctcagcctcccaaccccagggcccccacaggccccccgcagcaccctgcagagcacacaggtacagcaacaggaatctcagagacaggtggcctagcaggcacaggacacctggccgcctccaggagcctaccccctgaaagtgacagagacccagatctcatggaaactggccaggggtcctgttaacgtcatctcagggtccagaccctgaagatttcagaggctgcaggacttctgcctgaacctggggtcatcgattcaaactgctccaagtggtgggaatcagatctgtcttgatgtgtcatctaattaagggaatcccttgtacctatggctgcctgcatctattctttgtaccatctgtcttgccagccagaagcctctgcctccctagcttttctgctataggtcagagatgggctgaactgagcctagctaccttctctacccatctcccccatcccccactgccacaccctccccattcagacacttcatggaccaagaatgagctggtttgtcaaacaacatgtgagcatggtcacaagcacaaagctcaagatgacagctcttctaaggaaatggagaagctctgtttataaaaacaaaaacaaaaccagctgctactcataagttggaccagaggaagccccttactatgatctcaggagcttgcaagaagcaggaaggggaatggaataggttaagtttaggcctatcaacctaagcaacagaaataatctgacactaccttatcaggcaaattggggaggggagggtgtatctagctctagttcaaattatttggaagtgttccctgagaaacccaccagcctaagaagctctggccccaggcttgtcactagcagctgcagtcaacagttcaaagaagtcatggcccaaatccagtgtgcacccctccccattcacagagcctttttcacaattccatttccagttcatctatggcagtccagccagctcctgggcagcttgagagggcaaacccaaaacctcatgacagccagagcctgtctttcagcattcagtccgcctggccggctccagtttccccatggggctgcgggacagaggaccattacaactagatcaaggagcccagaaaacctccagtagtggacaacaggttttcaccatagcctacgttaacccatttttgagccaagcttcaaccctcagccttgaaaaacaagtctttaatttaatttttgttttttgcctaaatccaaagaaaaagggctgccgggccaggcgcggtggctcacgcctgtaatcccagcactttggcaggccgaggcaggtggatcacctgacgtcagtagtttgagaccagcctggccaacatggtgaaaccctgtatctactaaaaatacaaaaattagccggacgtggtggtgcgcgcatgtaatcccagctactcgggaggctgaggcggaagaatcacttgaacccgggaggcggaggttccagtgagccgagatggcgctattgcactccagtctgggtaacagggagactgcatctcaaaaaaaaaaaaaaaaaaaaaaaagggctgtccatgtattcacacacccctcaaaaaaagcctttagttcctactttagccactggtttctcagaatccaaagatcacatattctagtgtaacactgcaagaagtcttgagaaaaagattattgtagtgttcaaaatatttttgtattgttaatgcatcatcatagaaaaacttttaaacatgagaataaagatactttttactgggtttgtttttcaaagcctgaaaaaaa

SEQ ID NO: 1748 - DNA, 1254 bp, Homo sapiens
gcccaggtgactgactaatccgccgccttcaggagacagaattggccaaggcctgaaggccccggagtgcaccagcggcatgtacaaagagaccgtctactccgccttcaatctgctcatgcattacccacccccctcgggagcagggcagcacccccagccgcagcccccgctgcacaaggccaatcagcccccccacggtgtcccccaactctctctctacgaacatttcaacagcccacatcccacccctgcacctgcggacatcagccagaagcaagttcacaggcctctgcagacccctgacctctctggcttctactccctgacctcaggcagcatggggcagctcccccacactgtgagctggttcacccacccatccttgatgctaggttctggtgtacctggtcacccagcagccatcccccacccggccattgtgcccccctcagggaagcaggagctgcagcccttcgaccgcaacctgaagacacaagcagagtccaaggcagagaaggaggccaagaagccaaccatcaagaagcccctcaatgccttcatgctgtacatgaaggagatgagagccaaggtcattgcagagtgcacacttaaggagagcgctgccatcaaccagatcctgggccgcaggtggcacgcgctgtcgcgagaagagcaggccaagtactatgagctggcccgcaaggagaggcagctgcacatgcagctatacccaggctggtcagcgcgggacaactacgggaagaagaagaggcggtcgagggaaaagcaccaagaatccaccacagagacaaactggcccagagaactcaaggatggtaatggacaagagtcactgtccatgtcttcttcctctagcccagcttgaggactgggatggctgggcaaggaagccataggcattgcggccccttgccttggtgcagatgtgagtcccacaaacacatctggagaagctcaaaggccgggactgggagatgactcccttggaagacaggagagatgactcccttggaagacagatgacagcccataggcctagtgacaaaaggcccctttccgaccttgtggctgttctgggaactgcacctgtcctaggtctgggccagaccaagcagaatggcagtctgaggacactgacttaccacccaagtcccaggaagagaggacaaggaatcagccaggcctgtgcaaaggcagcattttttggttgtggagtatgactatgaattc

SEQ ID NO: 1749 - DNA, 2917 bp, Homo sapiens
gcccaggtgactgactaatccgccgccttcaggagacagaattggccaaggcctgaaggccccggagtgcaccagcggcatgtacaaagagaccgtctactccgccttcaatctgctcatgcattacccacccccctcgggagcagggcagcacccccagccgcagcccccgctgcacaaggccaatcagcccccccacggtgtcccccaactctctctctacgaacatttcaacagcccacatcccacccctgcacctgcggacatcagccagaagcaagttcacaggcctctgcagacccctgacctctctggcttctactccctgacctcaggcagcatggggcagctcccccacactgtgagctggttcacccacccatccttgatgctaggttctggtgtacctggtcacccagcagccatcccccacccggccattgtgcccccctcagggaagcaggagctgcagcccttcgaccgcaacctgaagacacaagcagagtccaaggcagagaaggaggccaagaagccaaccatcaagaagcccctcaatgccttcatgctgtacatgaaggagatgagagccaaggtcattgcagagtgcacacttaaggagagcgctgccatcaaccagatcctgggccgcaggtggcacgcgctgtcgcgagaagagcaggccaagtactatgagctggcccgcaaggagaggcagctgcacatgcagctatacccaggctggtcagcgcgggacaactacgggaagaagaagaggcggtcgagggaaaagcaccaagaatccaccacagaccctggctcgcctaagaaatgccgtgctcgctttggcctcaaccagcagacggattggtgtggtccgtgcagataactctcttcactattcctaggaggaaaaagaaatgcattcggtacttacccggagaaggccgctgccccagccccgttccttccgatgacagtgctctaggctgccccgggtccccagctccccaggactcaccctcataccatctgctgccccgcttccccacagaactgcttactagccctgcggagccggcacctacatccccaggtctctccactgctctcagcctcccaaccccagggcccccacaggccccccgcagcaccctgcagagcacacaggtacagcaacaggaatctcagagacaggtggcctagcaggcacaggacacctggccgcctccaggagcctaccccctgaaagtgacagagacccagatctcatggaaactggccaggggtcctgttaacgtcatctcagggtccagaccctgaagatttcagaggctgcaggacttctgcctgaacctggggtcatcgattcaaactgctccaagtggtgggaatcagatctgtcttgatgtgtcatctaattaagggaatcccttgtacctatggctgcctgcatctattctttgtaccatctgtcttgccagccagaagcctctgcctccctagcttttctgctataggtcagagatgggctgaactgagcctagctaccttctctacccatctcccccatcccccactgccacaccctccccattcagacacttcatggaccaagaatgagctggtttgtcaaacaacatgtgagcatggtcacaagcacaaagctcaagatgacagctcttctaaggaaatggagaagctctgtttataaaaacaaaaacaaaaccagctgctactcataagttggaccagaggaagccccttactatgatctcaggagcttgcaagaagcaggaaggggaatggaataggttaagtttaggcctatcaacctaagcaacagaaataatctgacactaccttatcaggcaaattggggaggggagggtgtatctagctctagttcaaattatttggaagtgttccctgagaaacccaccagcctaagaagctctggccccaggcttgtcactagcagctgcagtcaacagttcaaagaagtcatggcccaaatccagtgtgcacccctccccattcacagagcctttttcacaattccatttccagttcatctatggcagtccagccagctcctgggcagcttgagagggcaaacccaaaacctcatgacagccagagcctgtctttcagcattcagtccgcctggccggctccagtttccccatggggctgcgggacagaggaccattacaactagatcaaggagcccagaaaacctccagtagtggacaacaggttttcaccatagcctacgttaacccatttttgagccaagcttcaaccctcagccttgaaaaacaagtctttaatttaatttttgttttttgcctaaatccaaagaaaaagggctgccgggccaggcgcggtggctcacgcctgtaatcccagcactttggcaggccgaggcaggtggatcacctgacgtcagtagtttgagaccagcctggccaacatggtgaaaccctgtatctactaaaaatacaaaaattagccggacgtggtggtgcgcgcatgtaatcccagctactcgggaggctgaggcggaagaatcacttgaacccgggaggcggaggttccagtgagccgagatggcgctattgcactccagtctgggtaacagggagactgcatctcaaaaaaaaaaaaaaaaaaaaaaaagggctgtccatgtattcacacacccctcaaaaaaagcctttagttcctactttagccactggtttctcagaatccaaagatcacatattctagtgtaacactgcaagaagtcttgagaaaaagattattgtagtgttcaaaatatttttgtattgttaatgcatcatcatagaaaaacttttaaacatgagaataaagatactttttactgggtttgtttttcaaagcctgaaaaaaa

SEQ ID NO: 1750 - DNA, 2944 bp, Homo sapiens
cctccaggtccttcccctaaaacttggcactgccgatactcccagcccgttccttcccaagtcaggaacttgcaggggaccccttggcaattctttttctctcaagagcagacagccttcagtcccagccgctgccagggctggtgtgtctgacccagctgtggtttttccaggcctgaaggccccggagtgcaccagcggcatgtacaaagagaccgtctactccgccttcaatctgctcatgcattacccacccccctcgggagcagggcagcacccccagccgcagcccccgctgcacaaggccaatcagcccccccacggtgtcccccaactctctctctacgaacatttcaacagcccacatcccacccctgcacctgcggacatcagccagaagcaagttcacaggcctctgcagacccctgacctctctggcttctactccctgacctcaggcagcatggggcagctcccccacactgtgagctggttcacccacccatccttgatgctaggttctggtgtacctggtcacccagcagccatcccccacccggccattgtgcccccctcagggaagcaggagctgcagcccttcgaccgcaacctgaagacacaagcagagtccaaggcagagaaggaggccaagaagccaaccatcaagaagcccctcaatgccttcatgctgtacatgaaggagatgagagccaaggtcattgcagagtgcacacttaaggagagcgctgccatcaaccagatcctgggccgcaggtggcacgcgctgtcgcgagaagagcaggccaagtactatgagctggcccgcaaggagaggcagctgcacatgcagctatacccaggctggtcagcgcgggacaactacgggaagaagaagaggcggtcgagggaaaagcaccaagaatccaccacaggaggaaaaagaaatgcattcggtacttacccggagaaggccgctgccccagccccgttccttccgatgacagtgctctaggctgccccgggtccccagctccccaggactcaccctcataccatctgctgccccgcttccccacagaactgcttactagccctgcggagccggcacctacatccccaggtctctccactgctctcagcctcccaaccccagggcccccacaggccccccgcagcaccctgcagagcacacaggtacagcaacaggaatctcagagacaggtggcctagcaggcacaggacacctggccgcctccaggagcctaccccctgaaagtgacagagacccagatctcatggaaactggccaggggtcctgttaacgtcatctcagggtccagaccctgaagatttcagaggctgcaggacttctgcctgaacctggggtcatcgattcaaactgctccaagtggtgggaatcagatctgtcttgatgtgtcatctaattaagggaatcccttgtacctatggctgcctgcatctattctttgtaccatctgtcttgccagccagaagcctctgcctccctagcttttctgctataggtcagagatgggctgaactgagcctagctaccttctctacccatctcccccatcccccactgccacaccctccccattcagacacttcatggaccaagaatgagctggtttgtcaaacaacatgtgagcatggtcacaagcacaaagctcaagatgacagctcttctaaggaaatggagaagctctgtttataaaaacaaaaacaaaaccagctgctactcataagttggaccagaggaagccccttactatgatctcaggagcttgcaagaagcaggaaggggaatggaataggttaagtttaggcctatcaacctaagcaacagaaataatctgacactaccttatcaggcaaattggggaggggagggtgtatctagctctagttcaaattatttggaagtgttccctgagaaacccaccagcctaagaagctctggccccaggcttgtcactagcagctgcagtcaacagttcaaagaagtcatggcccaaatccagtgtgcacccctccccattcacagagcctttttcacaattccatttccagttcatctatggcagtccagccagctcctgggcagcttgagagggcaaacccaaaacctcatgacagccagagcctgtctttcagcattcagtccgcctggccggctccagtttccccatggggctgcgggacagaggaccattacaactagatcaaggagcccagaaaacctccagtagtggacaacaggttttcaccatagcctacgttaacccatttttgagccaagcttcaaccctcagccttgaaaaacaagtctttaatttaatttttgttttttgcctaaatccaaagaaaaagggctgccgggccaggcgcggtggctcacgcctgtaatcccagcactttggcaggccgaggcaggtggatcacctgacgtcagtagtttgagaccagcctggccaacatggtgaaaccctgtatctactaaaaatacaaaaattagccggacgtggtggtgcgcgcatgtaatcccagctactcgggaggctgaggcggaagaatcacttgaacccgggaggcggaggttccagtgagccgagatggcgctattgcactccagtctgggtaacagggagactgcatctcaaaaaaaaaaaaaaaaaaaaaaaagggctgtccatgtattcacacacccctcaaaaaaagcctttagttcctactttagccactggtttctcagaatccaaagatcacatattctagtgtaacactgcaagaagtcttgagaaaaagattattgtagtgttcaaaatatttttgtattgttaatgcatcatcatagaaaaacttttaaacatgagaataaagatactttttactgggtttgtttttcaaagcctgaaaaaaa

SEQ ID NO: 1751 - DNA, 6159 bp, Homo sapiens
agaggaggaggatggctacatagaggactgctatgttccacaacggtctatatatgatacgatgaggataaatgagcaaattgaccaggggtcaaagcttaaccagacttcaaaaagcaccatggaaaagatggaaggaagtactatatccagcaatggtacattaggagcagcatctaatgtttttgaatctagagcaccagaaggtaagaagctggatgagaggataatatttgatgcactaaagctaagcagtgatgtgcagaagtcagcacctgtgccacccagaaggcggccaaatgcagaacgcaaagacaatgttaacaggagatcgtggaagtccttcatgccacccaacttcccagaatttgcagagaggatagaagcttctctcagtgaggtttcagaagctggtgcttcaaatccttccttgcaagagaagaaggagtccagttctgcattaacagaaagttctggtcatttggaccacagggaacctcagtcagagtcagtaactctggaacatgtgtccaaatccataggtattccagaggtgcaagattttaaaaacttaagtggagactgccaggactttagatttcagcagcacagtgcaaaccctcctcatgaattccagcctgtagaatcagaagctgtagcaacaagtggtaacacagatgtaatgcaggaatccagattctcaagtgcaacctggccgagggccacaaaaagtttagctaagggaggcttcagtgagaagcagcacccccttggggacacagcctgcactgtggaaatgccacctctctccccttgcctgagtgaagagctgttagatccagaattgcatgttctcataacccccagcctgagagagaaaacagagtctgagctaaagtttgaggaggatgagcgatggattatgatggaggctgagggagagtgggaggaagagaaactgtcagacagggaaaagacttttctgatggcagatgagaagaacagcctggcagatatttttgaagaaagagaacaagcaaacacagcagtggtggaggatggatccgattgcttagctgctgtcttgaggacttttggccacctatctcttggtcagatttgttgccctgatgacccacagccagccaaggaccagttggctactgttcccaaggatatacccctggattgcgattgtgttcttacaggtgaggatattctcggtgaggtggcaaacagaactgctcaggggttagagggacttgtttcagattcagcatgtactgtgggtactattgatgcagaacagctctctgacacagactcagtgcagatgtttcttgaacttgaaaaggagtgtttatgtgaagaaggagtaactcctctagttgagctacagaatcaaatctcttctgaagggctggctgcatcccaggatgcagaaaatttactcgtaattagtcatttttcaggggctgccttagaaaaggaacagcatttaggccttttacatgtaagggcaaaagattatgatactagattggattgtggatattttaataccctggattcttctcaggtgcctaatgctgtggaacttattgcccacgttgatatcatgagagacacttccactgttagcaaggaggaatgtgaaaaagtgccttttagccccaggactgcagaatttaagtccagacagccagctgatctggattcactggaaaagctggacccaggaggactgctgaactctgatcacagggtttctcatgaagaaaaattatcaggcttcattgcttctgagctggccaaagacaatggcagtttgtcccagggagactgcagtcaaactgaggggaatggtgaggagtgcattgagagggtcaccttcagttttgcttttaatcatgaactaacagatgttacctcaggacctgaagtagaggtgttatatgaatcaaatttactaacagatgaaattcatttggaaagtgggaatgtaactgttaatcaagaaaataacagtctgacatcaatgggaaatgtggtcacttgtgaattgtctgtggagaaagtttgtgatgaggatggtgaggcaaaagagctggattatcaagccacacttttggaggatcaagctccagcacatttccacagaaacttcccagagcaggtcttccaggatctccagaggaagtccccagagtcagagattctgagtctgcacctgctggttgaagaactgagacttaatccagatggagtggaaactgtgaatgatacaaagcctgagctgaatgtggcatcatcagagggaggggagatggaaaggagagattcagattcattcctaaatatttttccagagaaacaagttaccaaggctggtaatactgaaccagttttagaggaatggatacccgtcctccagagaccttcccggactgctgcagtacccactgtcaaagatgccctagatgctgcactgcccagcccagaggagggtacctcaattgctgcagtgcctgccccagagggaactgctgtagttgctgctttagtgccctttccacatgaggacatcctagttgcttcaatagtctccttagaggaggaggatgtcacagctgctgcagtatcagccccagagagggctactgtcccagctgttacagtatctgtccctgaagggactgctgcagttgctgcagtgtcctccccagaggagactgctccagctgttgcagcagccatcacacaggagggtatgtcagctgtcgcagggttctccccagagtgggctgctttagctattacagtacccatcacagaggaggatggtacaccagaagggcctgtcaccccagctaccacagtgcatgctccagaggagcctgatactgcagctgtcagagtgtccaccccagaggagcccgcctccccagctgctgcagtgcccaccccagaggagcccacctccccagctgctgcagtgcccaccccagaggagcccacctccccagctgctgcagtgccccccccagaggagcccacctccccagctgctgcagtgcccaccccagaggagcccacctccccagctgctgcagtgcccaccccagaggagcccacctccccagctgctgcagtgcccaccccagaggagcccacctccccagctgctgcagtgcccaccccagaggagcccacctccccagctgctgcagtgcccaccccagaggagcccacctccccagctgctgcagtgcccaccccagaggagcccgcctccccagctgctgcagtgcccaccccagaggagcccgcctccccagctgctgcagtgcccaccccagaggagcctgccttcccagctcctgcagtgcccaccccagaggaatccgcctccgcagctgttgcagtgcccacccccgaggaatctgcctccccagctgctgcagtgcccaccccagcagaatctgcctcctttgcagctgtggtggccaccctggaggaacccacttccccggcagcttcagtgcccacccctgcagctatggtggccaccctagaggaattcacttccccggcagcttcagtgcccacctctgaggagcctgcctccctagcagctgcagtgtccaacccagaggagcccacctccccagcagcagcagtgcccaccctagaggaacccacctcctcagcagctgcagtgctcaccccagaggaactcagttccccagcagcttcagtgcccacccccgaggagcctgcctccccagcagctgcagtgtccaacctagaggagcccgcctccccagcagcagcagtgcccaccccagaggtggctgccatccctgctgcttcagtgcccaccccagaggtgcctgccatcccagctgctgcagtgcctcctatggaggaagtttcccccattggtgtgcccttcctgggagtttctgcccacactgactcagtgcctatttcagaagaaggaacacctgttctagaggaggcttcctccactggaatgtggatcaaggaggaccttgattccctagtatttggcataaaagaggtgaccagcacagtgctacatgggaaagtgcctctggctgcaaccgctggattaaattcagatgaggtaattgtccattttgattctgggaagggtctaaagagtaaagtgagatttgcagggctgacctggtggtgatgagaaatggcacagatagttcttttgttctttttgggtctcccgggcttatagtttgtagtctttctgttcagtttttggggaaaatatactttaattttgtctggtgaaagactttataatttcatgcttcgttttttattcagataagccaatcccacggaaaacagggatataaacagttgttgatttacatttttaaaaagattattagcaggaaagggtcattctgtttttgaattatacagtgagcatgttcttgcctaaaccaagagacagtttattcattggtggtgtcaacatttaggtagaggccagagtgtgagctttggaatgagacctggggtgcttcctaaccactctgggaaaattagttagctattcttgagtttcctgtttcttcatttgttaaggcataactctgtgaggataaaatgagatacatttaaggtaccaagcgtataagattaccaatcactggccatatcctccccattcttttcaaataggtatgttggttggttgaaagaatttaccaaagtagattggagagaagcaataaagctaaatgattaagaacttttaaatgcaaatatgtgtttctgaaaaccagagctaggcataatgtttatgaaaaatagagatattttagtcatctttgtcaaactgcctttgtgtccttaagcaagtcattttcctttccaggacctcatttcttcattataaaacaagaaaattgggctaaatgtcctcttgggtctctcttggctctaagattctttttattttttttttttagatggagtctggctctgtcagtcaggctggagtgctagagtgcagtggtgcgatctcagctcactgcaagctccacctcccgggttcacgccattctcctgcctcagcctcccgagtagctgggactacaggcgcccgccactacgcccggcaattttttgtatatatatatatataattttttttttttttttttagtagagacgggtttcactgtgttagccaggatggtctcaatctcctgacctcatgatctgcccgcctcggcctcccagagtgctgggattacaggcgtgagccaccgcgcccagccggctctaagattcttaatgttagagaaccgaatgtgttaggaaacagttggaaacgatgttccacatccttgagcactcctagtccaaggaatttgagatcagcagctttccacagttaattacccaggtttgatttggtcagtggtaaagagtgcaggagttagaggtttaatctgaacacaagagatgactgagtgagaagattgttttgattttactgcgcccctaggactcaaaatagtgccttcttcatagcaggcatttgctgttgactgactgactgaatgcatgaatatcaatttcctagactatggatggatgctacaagaaagatgggttttctcattcacctcactgcagagcctttcagggcagccttaagtcagctagagcaccagctaaacatgcaggtcctgacaacaaaatcattttgattgcatgccataaactctttgattaagaggattgattaagataatctggccttgctgagtggtggtggttttaccttgagctttaccagttattttgtcaggtagcattccattaaattaggatgcatcatctttgagactgatggatttttgattcatttttccgagttttattgaatttggaatgacaccgagatcccaatagcctgtacaaagtgaagacagtaggtcaacaacagagccattcttgataatacagaatatttcacaccaggcacagtggctcacacctctaatcccaacatttgggaagccaagggaagaggattgcttgaggccaggagttcgagaacagcctaggcaacatagtaagaccccatctctgagaaaa

SEQ ID NO: 1752 - DNA, 3384 bp, Homo sapiens
ggtttgggcctggctctgtgactgaggcggcggcggtggcggccaagcgggatacgggcggcgggagctggggaacaggcatggacgtttccgggcaagagaccgactggcggagcaccgccttccggcagaagctggtcagtcaaatcgaggatgccatgaggaaagctggtgtggcacacagtaaatccagcaaggatatggagagccatgttttcctgaaggccaagacccgggacgaatacctttctctcgtggccaggctcattatccattttcgagacattcataacaagaaatctcaagcttccgtcagtgatcctatgaatgcactccagagcctgactggcggacctgctgcgggagccgctggaattggcatgcctcctcggggcccgggacagtctctgggcgggatgggtagccttggtgccatgggacagccaatgtctctctcagggcagccgcctcctgggacctcggggatggcccctcacagcatggctgtcgtgtctacggcaactccacagacccagctgcagctccagcaggtggcgctgcagcagcagcagcaacagcagcagttccagcagcagcagcaggcggcgctacagcagcagcagcagcagcagcaacagcagcagttccaggctcagcagagtgccatgcagcagcagttccaagcagtagtgcagcagcagcagcagctccagcagcagcagcagcagcagcagcatctaattaaattgcatcatcaaaatcagcaacagatacagcagcagcaacagcagctgcagcgaatagcacagctgcagctccaacaacagcaacagcagcagcagcagcagcagcagcagcagcagcaggctttgcaggcccagccaccaattcagcagccaccgatgcagcagccacagcctccgccctcccaggctctgccccagcagctgcagcagatgcatcacacacagcaccaccagccgccaccacagccccagcagcctccagttgctcagaaccaaccatcacaactcccgccacagtcgcagacccagcctttggtgtcacaggcgcaagctctccctggacaaatgttgtatacccaaccaccactgaaatttgtccgagctccgatggtggtgcagcagcccccagtgcagccccaggtgcagcagcagcagacagcagtacagacagctcaggctgcccagatggtggctcccggagtccagatgatcacggaagccttggcccaaggtgggatgcacataagagcccggttcccgcctaccaccgctgtgtccgccatcccgtcaagctccatccctttgggcagacagcccatggcacaggtcagccagagcagcctccccatgctgtcctcgccgtcaccgggccagcaggtgcagaccccgcagtcgatgccccctcccccccagccgtccccgcagcccggccagcccagctcacagcccaactccaacgtcagctctggccctgccccatctcccagtagcttcctgcccagcccctcaccgcagccctcccagagcccagtgacggcgcggaccccacagaacttcagtgtcccctcacctggacctttaaacacacctgtgaaccccagctctgtcatgagcccagctggctccagccaggctgaggagcagcagtacctggacaagctgaagcagctgtcgaagtacatcgagcccctgcgccgcatgatcaacaagatcgacaagaacgaagacagaaaaaaggacctgagtaagatgaagagccttctggacattctgacagacccctcgaagcggtgtcccctgaagaccttgcaaaagtgtgagatcgccctggagaaactcaagaatgacatggcggtgcccactcccccaccgcccccggtgccaccgaccaaacagcagtacctatgccagccgctcctggatgccgtcctggccaacatccgctcacctgtcttcaaccattccctgtaccgcacattcgttccagccatgaccgccattcacggcccacccatcacggccccagtggtgtgcacccggaagcgcaggcttgaggatgatgagcggcagagcatccccagtgtgctccagggtgaggtggccaggctggaccccaagttcctggtaaacctggacccttctcactgcagcaacaatggcactgtccacctgatctgcaagctggatgacaaggacctcccaagtgtgccaccactggagctcagtgtgcccgctgactatcctgcccaaagcccgctgtggatagaccggcagtggcagtacgacgccaaccccttcctccagtcggtgcaccgctgcatgacctccaggctgctgcagctcccggacaagcactcggtcaccgccttgctcaacacctgggcccagagcgtccaccaggcctgcctctcagccgcctagccaagactgcagggatggcccgcagcctcatcggggccaaggacacacgcctcctgtcagacacttctaggtgttggcttccttagagagcctggggttaggttagctttcctgcttttatcttctgccttggggacctgccaaacgaaatcccacacctgtacagaactgggataggcgcagtggagcgggttgcttggggggcgttggccgacttcttagagaaggccctccatgtgacttcctcccaggagccagatgcgatcctcaggctgctctcaccgtggcctgtccacggtccaggtccatctcagcagcgtgagggtgcactcagggtgttgttagagcgtctcgtgtgtgctagacgcacccctactcgttcctatagaacacagaggacataggaaacccttaaaacacacatgggattctctggtcacagttttgggttcaggctatgctgctttgggcaggtggagcaccccccgaggaagcctgcaagtccagggcacaggctgccttttggagggagggctggcccataggtgctgctggctccccgccaccagctgggcctcagccctcacggcattcctgctgagcaccgtggggcacccagggagcaggggcgtcagggatcctgctgccggcacccctgtgccgctggcatgagggccgtgtccccactgtgaaggatgaagagcaaggccctcaggacccgtgtcctcagagcaccacacactgagcacccagagacagcgggcctggcagcgggccgggccatgcagggagcgcctccctatgttgcctgccactctgggcaccggccagcaccctctggtgagaagaggtcccccctttttatgtgcactaccccaccatctgtgattataataaatttattattcctgtgtttgtcagttgttcaaaaaaaaaa

SEQ ID NO: 1753 - DNA, 3264 bp, Homo sapiens
ggtttgggcctggctctgtgactgaggcggcggcggtggcggccaagcgggatacgggcggcgggagctggggaacaggcatggacgtttccgggcaagagaccgactggcggagcaccgccttccggcagaagctggtcagtcaaatcgaggatgccatgaggaaagctggtgtggcacacagtaaatccagcaaggatatggagagccatgttttcctgaaggccaagacccgggacgaatacctttctctcgtggccaggctcattatccattttcgagacattcataacaagaaatctcaagcttccgtcagtgatcctatgaatgcactccagagcctgactggcggacctgctgcgggagccgctggaattggcatgcctcctcggggcccgggacagtctctgggcgggatgggtagccttggtgccatgggacagccaatgtctctctcagggcagccgcctcctgggacctcggggatggcccctcacagcatggctgtcgtgtctacggcaactccacagacccagctgcagctccagcaggtggcgctgcagcagcagcagcaacagcagcagttccagcagcagcagcaggcggcgctacagcagcagcagcagcagcagcaacagcagcagttccaggctcagcagagtgccatgcagcagcagttccaagcagtagtgcagcagcagcagcagctccagcagcagcagcagcagcagcagcatctaattaaattgcatcatcaaaatcagcaacagatacagcagcagcaacagcagctgcagcgaatagcacagctgcagctccaacaacagcaacagcagcagcagcagcagcagcagcagcagcagcaggctttgcaggcccagccaccaattcagcagccaccgatgcagcagccacagcctccgccctcccaggctctgccccagcagctgcagcagatgcatcacacacagcaccaccagccgccaccacagccccagcagcctccagttgctcagaaccaaccatcacaactcccgccacagtcgcagacccagcctttggtgtcacaggcgcaagctctccctggacaaatgttgtatacccaaccaccactgaaatttgtccgagctccgatggtggtgcagcagcccccagtgcagccccaggtgcagcagcagcagacagcagtacagacagctcaggctgcccagatggtggctcccggagtccaggtcagccagagcagcctccccatgctgtcctcgccgtcaccgggccagcaggtgcagaccccgcagtcgatgccccctcccccccagccgtccccgcagcccggccagcccagctcacagcccaactccaacgtcagctctggccctgccccatctcccagtagcttcctgcccagcccctcaccgcagccctcccagagcccagtgacggcgcggaccccacagaacttcagtgtcccctcacctggacctttaaacacacctgtgaaccccagctctgtcatgagcccagctggctccagccaggctgaggagcagcagtacctggacaagctgaagcagctgtcgaagtacatcgagcccctgcgccgcatgatcaacaagatcgacaagaacgaagacagaaaaaaggacctgagtaagatgaagagccttctggacattctgacagacccctcgaagcggtgtcccctgaagaccttgcaaaagtgtgagatcgccctggagaaactcaagaatgacatggcggtgcccactcccccaccgcccccggtgccaccgaccaaacagcagtacctatgccagccgctcctggatgccgtcctggccaacatccgctcacctgtcttcaaccattccctgtaccgcacattcgttccagccatgaccgccattcacggcccacccatcacggccccagtggtgtgcacccggaagcgcaggcttgaggatgatgagcggcagagcatccccagtgtgctccagggtgaggtggccaggctggaccccaagttcctggtaaacctggacccttctcactgcagcaacaatggcactgtccacctgatctgcaagctggatgacaaggacctcccaagtgtgccaccactggagctcagtgtgcccgctgactatcctgcccaaagcccgctgtggatagaccggcagtggcagtacgacgccaaccccttcctccagtcggtgcaccgctgcatgacctccaggctgctgcagctcccggacaagcactcggtcaccgccttgctcaacacctgggcccagagcgtccaccaggcctgcctctcagccgcctagccaagactgcagggatggcccgcagcctcatcggggccaaggacacacgcctcctgtcagacacttctaggtgttggcttccttagagagcctggggttaggttagctttcctgcttttatcttctgccttggggacctgccaaacgaaatcccacacctgtacagaactgggataggcgcagtggagcgggttgcttggggggcgttggccgacttcttagagaaggccctccatgtgacttcctcccaggagccagatgcgatcctcaggctgctctcaccgtggcctgtccacggtccaggtccatctcagcagcgtgagggtgcactcagggtgttgttagagcgtctcgtgtgtgctagacgcacccctactcgttcctatagaacacagaggacataggaaacccttaaaacacacatgggattctctggtcacagttttgggttcaggctatgctgctttgggcaggtggagcaccccccgaggaagcctgcaagtccagggcacaggctgccttttggagggagggctggcccataggtgctgctggctccccgccaccagctgggcctcagccctcacggcattcctgctgagcaccgtggggcacccagggagcaggggcgtcagggatcctgctgccggcacccctgtgccgctggcatgagggccgtgtccccactgtgaaggatgaagagcaaggccctcaggacccgtgtcctcagagcaccacacactgagcacccagagacagcgggcctggcagcgggccgggccatgcagggagcgcctccctatgttgcctgccactctgggcaccggccagcaccctctggtgagaagaggtcccccctttttatgtgcactaccccaccatctgtgattataataaatttattattcctgtgtttgtcagttgttcaaaaaaaaaa

SEQ ID NO: 1754 - DNA, 4005 bp, Homo sapiens
cggctgcggttcctggtgctgctcggcgcgcggccagctttcggaacggaacgctcggcgtcgcgggccccgcccggaaagtttgccgtggagtcgcgacctcttggcccgcgcggcccggcatgaagcggcgttgaggagctgctgccgccgcttgccgctgccgccgccgccgcctgaggaggagctgcagcaccctgggccacgccgatgactactgcaaactgtggcgcccacgacgagctcgacttcaaactcgtctttggcgaggacggggcgccggcgccgccgcccccgggctcgcggcctgcagatcttgagccagatgattgtgcatccatttacatctttaatgtagatccacctccatctactttaaccacaccactttgcttaccacatcatggattaccgtctcactcttctgttttgtcaccatcgtttcagctccaaagtcacaaaaactatgaaggaacttgtgagattcctgaatctaaatatagcccattaggtggtcccaaaccctttgagtgcccaagtattcaaattacatctatctctcctaactgtcatcaagaattagatgcacatgaagatgacctacagataaatgacccagaacgggaatttttggaaaggccttctagagatcatctctatcttcctcttgagccatcctaccgggagtcttctcttagtcctagtcctgccagcagcatctcttctaggagttggttctctgatgcatcttcttgtgaatcgctttcacatatttatgatgatgtggactcagagttgaatgaagctgcagcccgatttacccttggatcccctctgacttctcctggtggctctccagggggctgccctggagaagaaacttggcatcaacagtatggacttggacactcattatcacccaggcaatctccttgccactctcctagatccagtgtcactgatgagaattggctgagccccaggccagcctcaggaccctcatcaaggcccacatccccctgtgggaaacggaggcactccagtgctgaagtttgttatgctgggtccctttcaccccatcactcacctgttccttcacctggtcactcccccaggggaagtgtgacagaagatacgtggctcaatgcttctgtccatggtgggtcaggccttggccctgcagtttttccatttcagtactgtgtagagactgacatccctctcaaaacaaggaaaacttctgaagatcaagctgccatactaccaggaaaattagagctgtgttcagatgaccaagggagtttatcaccagcccgggagacttcaatagatgatggccttggatctcagtatcctttaaagaaagattcatgtggtgatcagtttctttcagttccttcaccctttacctggagcaaaccaaagcctggccacacccctatatttcgcacatcttcattacctccactagactggcctttaccagctcattttggacaatgtgaactgaaaatagaagtgcaacctaaaactcatcatcgagcccattatgaaactgaaggtagccgaggggcagtaaaagcatctactgggggacatcctgttgtgaagctcctgggctataacgaaaagccaataaatctacaaatgtttattgggacagcagatgatcgatatttacgacctcatgcattttaccaggtgcatcgaatcactgggaagacagtcgctactgcaagccaagagataataattgccagtacaaaagttctggaaattccacttcttcctgaaaataatatgtcagccagtattgattgtgcaggtattttgaaactccgcaattcagatatagaacttcgaaaaggagaaactgatattggcagaaagaatactagagtacgacttgtgtttcgtgtacacatcccacagcccagtggaaaagtcctttctctgcagatagcctctatacccgttgagtgctcccagcggtctgctcaagaacttcctcatattgagaagtacagtatcaacagttgttctgtaaatggaggtcatgaaatggttgtgactggatctaattttcttccagaatccaaaatcatttttcttgaaaaaggacaagatggacgacctcagtgggaggtagaagggaagataatcagggaaaaatgtcaaggggctcacattgtccttgaagttcctccatatcataacccagcagttacagctgcagtgcaggtgcacttttatctttgcaatggcaagaggaaaaaaagccagtctcaacgttttacttatacaccagttttgatgaagcaagaacacagagaagagattgatttgtcttcagttccatctttgcctgtgcctcatcctgctcagacccagaggccttcctctgattcagggtgttcacatgacagtgtactgtcaggacagagaagtttgatttgctccatcccacaaacatatgcatccatggtgacctcatcccatctgccacagttgcagtgtagagatgagagtgttagtaaagaacagcatatgattccttctccaattgtacaccagccttttcaagtcacaccaacacctcctgtggggtcttcctatcagcctatgcaaactaatgttgtgtacaatggaccaacttgtcttcctattaatgctgcctctagtcaagaatttgattcagttttgtttcagcaggatgcaactctttctggtttagtgaatcttggctgtcaaccactgtcatccataccatttcattcttcaaattcaggctcaacaggacatctcttagcccatacacctcattctgtgcataccctgcctcatctgcaatcaatgggatatcattgttcaaatacaggacaaagatctctttcttctccagtggctgaccagattacaggtcagccttcgtctcagttacaacctattacatatggtccttcacattcagggtctgctacaacagcttccccagcagcttctcatcccttggctagttcaccgctttctgggccaccatctcctcagcttcagcctatgccttaccaatctcctagctcaggaactgcctcatcaccgtctccagccaccagaatgcattctggacagcactcaactcaagcacaaagtacgggccaggggggtctttctgcaccttcatccttaatatgtcacagtttgtgtgatccagcgtcatttccacctgatggggcaactgtgagcattaaacctgaaccagaagatcgagagcctaactttgcaaccattggtctgcaggacatcactttagatgatgaccaatttatatctgacttggaacaccagccatcaggttcagcagagaaatggcctaaccacagtgtgctctcatgtccagctcctttctggagaatctagaggtgaacgagataattgggagagacatgtcccagatttctgtttcccaaggagcaggggtgagcaggcaggctcccctcccgagtcctgagtccctggatttaggaagatctgatgggctctaacagtgcttactgcagccttgtgtccaccaccaacttctcagcatgtttctctccttggaccttgggtttccaactctgcagccttcaggtctggggccaggagtgggacccaccatttgtggggaaagtagcattcctccacctcaggccttgggtagatttggcaaaagaacaggagcagcataggctgtttgagctttggggaaatgaactttgctttttatatttaactaggatacttttatatgatgggtgctttgagtgtgaatgcagcaggctctcttgtttccgaggtgctgcttttgcaggtgacctggttacttagctaggattggtgatttgtactgctttatggtcatttgaagggccctttagtttttatgataatttttaaaataggaacttttgataagaccttctagaagcaaaaaaaaaaaaaaaaaaaaaaaaaagaaaaaaaaag

SEQ ID NO: 1755 - DNA, 3990 bp, Homo sapiens
cggctgcggttcctggtgctgctcggcgcgcggccagctttcggaacggaacgctcggcgtcgcgggccccgcccggaaagtttgccgtggagtcgcgacctcttggcccgcgcggcccggcatgaagcggcgttgaggagctgctgccgccgcttgccgctgccgccgccgccgcctgaggaggagctgcagcaccctgggccacgccgatgactactgcaaactgtggcgcccacgacgagctcgacttcaaactcgtctttggcgaggacggggcgccggcgccgccgcccccgggctcgcggcctgcagatcttgagccagatgattgtgcatccatttacatctttaatgtagatccacctccatctactttaaccacaccactttgcttaccacatcatggattaccgtctcactcttctgttttgtcaccatcgtttcagctccaaagtcacaaaaactatgaaggaacttgtgagattcctgaatctaaatatagcccattaggtggtcccaaaccctttgagtgcccaagtattcaaattacatctatctctcctaactgtcatcaagaattagatgcacatgaagatgacctacagataaatgacccagaacgggaatttttggaaaggccttctagagatcatctctatcttcctcttgagccatcctaccgggagtcttctcttagtcctagtcctgccagcagcatctcttctaggagttggttctctgatgcatcttcttgtgaatcgctttcacatatttatgatgatgtggactcagagttgaatgaagctgcagcccgatttacccttggatcccctctgacttctcctggtggctctccagggggctgccctggagaagaaacttggcatcaacagtatggacttggacactcattatcacccaggcaatctccttgccactctcctagatccagtgtcactgatgagaattggctgagccccaggccagcctcaggaccctcatcaaggcccacatccccctgtgggaaacggaggcactccagtgctgaagtttgttatgctgggtccctttcaccccatcactcacctgttccttcacctggtcactcccccaggggaagtgtgacagaagatacgtggctcaatgcttctgtccatggtgggtcaggccttggccctgcagtttttccatttcagtactgtgtagagactgacatccctctcaaaacaaggaaaacttctgaagatcaagctgccatactaccaggaaaattagagctgtgttcagatgaccaagggagtttatcaccagcccgggagacttcaatagatgatggccttggatctcagtatcctttaaagaaagattcatgtggtgatcagtttctttcagttccttcaccctttacctggagcaaaccaaagcctggccacacccctatatttcgcacatcttcattacctccactagactggcctttaccagctcattttggacaatgtgaactgaaaatagaagtgcaacctaaaactcatcatcgagcccattatgaaactgaaggtagccgaggggcagtaaaagcatctactgggggacatcctgttgtgaagctcctgggctataacgaaaagccaataaatctacaaatgtttattgggacagcagatgatcgatatttacgacctcatgcattttaccaggtgcatcgaatcactgggaagacagtcgctactgcaagccaagagataataattgccagtacaaaagttctggaaattccacttcttcctgaaaataatatgtcagccagtattgattgtgcaggtattttgaaactccgcaattcagatatagaacttcgaaaaggagaaactgatattggcagaaagaatactagagtacgacttgtgtttcgtgtacacatcccacagcccagtggaaaagtcctttctctgcagatagcctctatacccgttgagtgctcccagcggtctgctcaagaacttcctcatattgagaagtacagtatcaacagttgttctgtaaatggaggtcatgaaatggttgtgactggatctaattttcttccagaatccaaaatcatttttcttgaaaaaggacaagatggacgacctcagtgggaggtagaagggaagataatcagggaaaaatgtcaaggggctcacattgtccttgaagttcctccatatcataacccagcagttacagctgcagtgcaggtgcacttttatctttgcaatggcaagaggaaaaaaagccagtctcaacgttttacttatacaccagttttgatgaagcaagaacacagagaagagattgatttgtcttcagttccatctttgcctgtgcctcatcctgctcagacccagaggccttcctctgattcagggtgttcacatgacagtgtactgtcaggacagagaagtttgatttgctccatcccacaaacatatgcatccatggtgacctcatcccatctgccacagttgcagtgtagagatgagagtgttagtaaagaacagcatatgattccttctccaattgtacaccagccttttcaagtcacaccaacacctcctgtggggtcttcctatcagcctatgcaaactaatgttgtgtacaatggaccaacttgtcttcctattaatgctgcctctagtcaagaatttgattcagttttgtttcagcaggatgcaactctttctggtttagtgaatcttggctgtcaaccactgtcatccataccatttcattcttcaaattcaggctcaacaggacatctcttagcccatacacctcattctgtgcataccctgcctcatctgcaatcaatgggatatcattgttcaaatacaggacaaagatctctttcttctccagtggctgaccagattacaggtcagccttcgtctcagttacaacctattacatatggtccttcacattcagggtctgctacaacagcttccccagcagcttctcatcccttggctagttcaccgctttctgggccaccatctcctcagcttcagcctatgccttaccaatctcctagctcaggaactgcctcatcaccgtctccagccaccagaatgcattctggacagcactcaactcaagcacaaagtacgggccaggggggtctttctgcaccttcatccttaatatgtcacagtttgtgtgatccagcgtcatttccacctgatggggcaactgtgagcattaaacctgaaccagaagatcgagagcctaactttgcaaccattggtctgcaggacatcactttagatgatgatttgtttaccagtaataattttgacttgcttcagttgagacctacgttttggccagtcccagcaggaagatatctgaggaatctagagtgaacgagataattgggagagacatgtcccagatttctgtttcccaaggagcaggggtgagcaggcaggctcccctcccgagtcctgagtccctggatttaggaagatctgatgggctctaacagtgcttactgcagccttgtgtccaccaccaacttctcagcatgtttctctccttggaccttgggtttccaactctgcagccttcaggtctggggccaggagtgggacccaccatttgtggggaaagtagcattcctccacctcaggccttgggtagatttggcaaaagaacaggagcagcataggctgtttgagctttggggaaatgaactttgctttttatatttaactaggatacttttatatgatgggtgctttgagtgtgaatgcagcaggctctcttgtttccgaggtgctgcttttgcaggtgacctggttacttagctaggattggtgatttgtactgctttatggtcatttgaagggccctttagtttttatgataatttttaaaataggaacttttgataagaccttctagaagcaaaaaaaaaaaaaaaaaaaaaaaaaagaaaaaaaaag

SEQ ID NO: 1756 - DNA, 3769 bp, Homo sapiens
cggctgcggttcctggtgctgctcggcgcgcggccagctttcggaacggaacgctcggcgtcgcgggccccgcccggaaagtttgccgtggagtcgcgacctcttggcccgcgcggcccggcatgaagcggcgttgaggagctgctgccgccgcttgccgctgccgccgccgccgcctgaggaggagctgcagcaccctgggccacgccgatgactactgcaaactgtggcgcccacgacgagctcgacttcaaactcgtctttggcgaggacggggcgccggcgccgccgcccccgggctcgcggcctgcagatcttgagccagatgattgtgcatccatttacatctttaatgtagatccacctccatctactttaaccacaccactttgcttaccacatcatggattaccgtctcactcttctgttttgtcaccatcgtttcagctccaaagtcacaaaaactatgaaggaacttgtgagattcctgaatctaaatatagcccattaggtggtcccaaaccctttgagtgcccaagtattcaaattacatctatctctcctaactgtcatcaagaattagatgcacatgaagatgacctacagataaatgacccagaacgggaatttttggaaaggccttctagagatcatctctatcttcctcttgagccatcctaccgggagtcttctcttagtcctagtcctgccagcagcatctcttctaggagttggttctctgatgcatcttcttgtgaatcgctttcacatatttatgatgatgtggactcagagttgaatgaagctgcagcccgatttacccttggatcccctctgacttctcctggtggctctccagggggctgccctggagaagaaacttggcatcaacagtatggacttggacactcattatcacccaggcaatctccttgccactctcctagatccagtgtcactgatgagaattggctgagccccaggccagcctcaggaccctcatcaaggcccacatccccctgtgggaaacggaggcactccagtgctgaagtttgttatgctgggtccctttcaccccatcactcacctgttccttcacctggtcactcccccaggggaagtgtgacagaagatacgtggctcaatgcttctgtccatggtgggtcaggccttggccctgcagtttttccatttcagtactgtgtagagactgacatccctctcaaaacaaggaaaacttctgaagatcaagctgccatactaccaggaaaattagagctgtgttcagatgaccaagggagtttatcaccagcccgggagacttcaatagatgatggccttggatctcagtatcctttaaagaaagattcatgtggtgatcagtttctttcagttccttcaccctttacctggagcaaaccaaagcctggccacacccctatatttcgcacatcttcattacctccactagactggcctttaccagctcattttggacaatgtgaactgaaaatagaagtgcaacctaaaactcatcatcgagcccattatgaaactgaaggtagccgaggggcagtaaaagcatctactgggggacatcctgttgtgaagctcctgggctataacgaaaagccaataaatctacaaatgtttattgggacagcagatgatcgatatttacgacctcatgcattttaccaggtgcatcgaatcactgggaagacagtcgctactgcaagccaagagataataattgccagtacaaaagttctggaaattccacttcttcctgaaaataatatgtcagccagtattgattgtgcaggtattttgaaactccgcaattcagatatagaacttcgaaaaggagaaactgatattggcagaaagaatactagagtacgacttgtgtttcgtgtacacatcccacagcccagtggaaaagtcctttctctgcagatagcctctatacccgttgagtgctcccagcggtctgctcaagaacttcctcatattgagaagtacagtatcaacagttgttctgtaaatggaggtcatgaaatggttgtgactggatctaattttcttccagaatccaaaatcatttttcttgaaaaaggacaagatggacgacctcagtgggaggtagaagggaagataatcagggaaaaatgtcaaggggctcacattgtccttgaagttcctccatatcataacccagcagttacagctgcagtgcaggtgcacttttatctttgcaatggcaagaggaaaaaaagccagtctcaacgttttacttatacaccagttttgatgaagcaagaacacagagaagagattgatttgtcttcagttccatctttgcctgtgcctcatcctgctcagacccagaggccttcctctgattcagggtgttcacatgacagtgtactgtcaggacagagaagtttgatttgctccatcccacaaacatatgcatccatggtgacctcatcccatctgccacagttgcagtgtagagatgagagtgttagtaaagaacagcatatgattccttctccaattgtacaccagccttttcaagtcacaccaacacctcctgtggggtcttcctatcagcctatgcaaactaatgttgtgtacaatggaccaacttgtcttcctattaatgctgcctctagtcaagaatttgattcagttttgtttcagcaggatgcaactctttctggtttagtgaatcttggctgtcaaccactgtcatccataccatttcattcttcaaattcaggctcaacaggacatctcttagcccatacacctcattctgtgcataccctgcctcatctgcaatcaatgggatatcattgttcaaatacaggacaaagatctctttcttctccagtggctgaccagattacaggtcagccttcgtctcagttacaacctattacatatggtccttcacattcagggtctgctacaacagcttccccagcagcttctcatcccttggctagttcaccgctttctgggccaccatctcctcagcttcagcctatgccttaccaatctcctagctcaggaactgcctcatcaccgtctccagccaccagaatgcattctggacagcactcaactcaagcacaaagtacgggccaggggggtctttctgcaccttcatccttaatatgtcacagtttgtgtgatccagcgtcatttccacctgatggggcaactgtgagcattaaacctgaaccagaagatcgagagcctaactttgcaaccattggtctgcaggacatcactttagatgatggtaagttcatctctgatatgttcttgaagtagtgaagattcagggactttattctcccaagtgtcatgaaaaagtttctatggattgcttattggcatatggttgggcttttaaataagttgttattagaaatatatgttaatatataactttgccaggtaccacggctcacgcctgtatcccagcactttggaaggctgaggcgggtggatcacaaggtcaggagttcaagaccagcctggccaacatggtgtaacgctgtctctactaaaaatacaaaaaattagccaggcatggtggtgtgtgactataatcccagctactcgggaggctgagacaggagaatcacttgaacccgggaggtggcagttgcagggagctaagatcgcgccattgcactccagcctgggcggcagagcaagactccgtctcgggaaaaaaaaaaaaaaaaaa

SEQ ID NO: 1757 - DNA, 3901 bp, Homo sapiens
cggctgcggttcctggtgctgctcggcgcgcggccagctttcggaacggaacgctcggcgtcgcgggccccgcccggaaagtttgccgtggagtcgcgacctcttggcccgcgcggcccggcatgaagcggcgttgaggagctgctgccgccgcttgccgctgccgccgccgccgcctgaggaggagctgcagcaccctgggccacgccgatgactactgcaaactgtggcgcccacgacgagctcgacttcaaactcgtctttggcgaggacggggcgccggcgccgccgcccccgggctcgcggcctgcagatcttgagccagatgattgtgcatccatttacatctttaatgtagatccacctccatctactttaaccacaccactttgcttaccacatcatggattaccgtctcactcttctgttttgtcaccatcgtttcagctccaaagtcacaaaaactatgaaggaacttgtgagattcctgaatctaaatatagcccattaggtggtcccaaaccctttgagtgcccaagtattcaaattacatctatctctcctaactgtcatcaagaattagatgcacatgaagatgacctacagataaatgacccagaacgggaatttttggaaaggccttctagagatcatctctatcttcctcttgagccatcctaccgggagtcttctcttagtcctagtcctgccagcagcatctcttctaggagttggttctctgatgcatcttcttgtgaatcgctttcacatatttatgatgatgtggactcagagttgaatgaagctgcagcccgatttacccttggatcccctctgacttctcctggtggctctccagggggctgccctggagaagaaacttggcatcaacagtatggacttggacactcattatcacccaggcaatctccttgccactctcctagatccagtgtcactgatgagaattggctgagccccaggccagcctcaggaccctcatcaaggcccacatccccctgtgggaaacggaggcactccagtgctgaagtttgttatgctgggtccctttcaccccatcactcacctgttccttcacctggtcactcccccaggggaagtgtgacagaagatacgtggctcaatgcttctgtccatggtgggtcaggccttggccctgcagtttttccatttcagtactgtgtagagactgacatccctctcaaaacaaggaaaacttctgaagatcaagctgccatactaccaggaaaattagagctgtgttcagatgaccaagggagtttatcaccagcccgggagacttcaatagatgatggccttggatctcagtatcctttaaagaaagattcatgtggtgatcagtttctttcagttccttcaccctttacctggagcaaaccaaagcctggccacacccctatatttcgcacatcttcattacctccactagactggcctttaccagctcattttggacaatgtgaactgaaaatagaagtgcaacctaaaactcatcatcgagcccattatgaaactgaaggtagccgaggggcagtaaaagcatctactgggggacatcctgttgtgaagctcctgggctataacgaaaagccaataaatctacaaatgtttattgggacagcagatgatcgatatttacgacctcatgcattttaccaggtgcatcgaatcactgggaagacagtcgctactgcaagccaagagataataattgccagtacaaaagttctggaaattccacttcttcctgaaaataatatgtcagccagtattgattgtgcaggtattttgaaactccgcaattcagatatagaacttcgaaaaggagaaactgatattggcagaaagaatactagagtacgacttgtgtttcgtgtacacatcccacagcccagtggaaaagtcctttctctgcagatagcctctatacccgttgagtgctcccagcggtctgctcaagaacttcctcatattgagaagtacagtatcaacagttgttctgtaaatggaggtcatgaaatggttgtgactggatctaattttcttccagaatccaaaatcatttttcttgaaaaaggacaagatggacgacctcagtgggaggtagaagggaagataatcagggaaaaatgtcaaggggctcacattgtccttgaagttcctccatatcataacccagcagttacagctgcagtgcaggtgcacttttatctttgcaatggcaagaggaaaaaaagccagtctcaacgttttacttatacaccagttttgatgaagcaagaacacagagaagagattgatttgtcttcagttccatctttgcctgtgcctcatcctgctcagacccagaggccttcctctgattcagggtgttcacatgacagtgtactgtcaggacagagaagtttgatttgctccatcccacaaacatatgcatccatggtgacctcatcccatctgccacagttgcagtgtagagatgagagtgttagtaaagaacagcatatgattccttctccaattgtacaccagccttttcaagtcacaccaacacctcctgtggggtcttcctatcagcctatgcaaactaatgttgtgtacaatggaccaacttgtcttcctattaatgctgcctctagtcaagaatttgattcagttttgtttcagcaggatgcaactctttctggtttagtgaatcttggctgtcaaccactgtcatccataccatttcattcttcaaattcaggctcaacaggacatctcttagcccatacacctcattctgtgcataccctgcctcatctgcaatcaatgggatatcattgttcaaatacaggacaaagatctctttcttctccagtggctgaccagattacaggtcagccttcgtctcagttacaacctattacatatggtccttcacattcagggtctgctacaacagcttccccagcagcttctcatcccttggctagttcaccgctttctgggccaccatctcctcagcttcagcctatgccttaccaatctcctagctcaggaactgcctcatcaccgtctccagccaccagaatgcattctggacagcactcaactcaagcacaaagtacgggccaggggggtctttctgcaccttcatccttaatatgtcacagtttgtgtgatccagcgtcatttccacctgatggggcaactgtgagcattaaacctgaaccagaagatcgagagcctaactttgcaaccattggtctgcaggacatcactttagatgatgtgaacgagataattgggagagacatgtcccagatttctgtttcccaaggagcaggggtgagcaggcaggctcccctcccgagtcctgagtccctggatttaggaagatctgatgggctctaacagtgcttactgcagccttgtgtccaccaccaacttctcagcatgtttctctccttggaccttgggtttccaactctgcagccttcaggtctggggccaggagtgggacccaccatttgtggggaaagtagcattcctccacctcaggccttgggtagatttggcaaaagaacaggagcagcataggctgtttgagctttggggaaatgaactttgctttttatatttaactaggatacttttatatgatgggtgctttgagtgtgaatgcagcaggctctcttgtttccgaggtgctgcttttgcaggtgacctggttacttagctaggattggtgatttgtactgctttatggtcatttgaagggccctttagtttttatgataatttttaaaataggaacttttgataagaccttctagaagcaaaaaaaaaaaaaaaaaaaaaaaaaagaaaaaaaaag

SEQ ID NO: 1758 - DNA, 2795 bp, Homo sapiens
attttcgattccactctcttccgtttctgtcgctgcagtcgtccgcgggactccggccggttgccggccccaggcggtgcttctccccaccaccgcccagctcagctcagcccagcccagcccactctgcccttagaggcccttctccccaaagacgcactccagaagtctcgccctcgtgcggctgaggagcctgggatcccagacctgaacaagtgaaacccccgcccctgaagaatgggtaagacgttttcccagctgggctcttggcgggaggatgagaacaagtcaatcctgtcctccaaaccagccattggcagcaaggctgtcaactactccagcaccggtagcagcaagtctttttgttcctgtgtgccttgtgaaggaactgctgatgccagcttcgtgacttgtcccacctgccagggcagtggcaagattccccaagagctggagaagcagttggtggctctcattccctatggggaccagaggctgaagcccaagcacacgaagctctttgtgttcctggccgtgctcatctgcctggtgacctcctccttcatcgtctttttcctgtttccccggtccgtcattgtgcagcctgcaggcctcaactcctccacagtggcctttgatgaggctgatatctacctcaacataacgaatatcttaaacatctccaatggcaactactaccccattatggtgacacagctgaccctcgaggttctgcacctgtccctcgtggtggggcaggtttccaacaaccttctcctacacattggccctttggccagtgaacagatgttttacgcagtagctaccaagatacgggatgaaaacacatacaaaatctgtacctggctggaaatcaaagtccaccatgtgcttttgcacatccagggcaccctgacctgttcatacctgagccattcagagcagctggtctttcagagctatgaatatgtggactgccgaggaaacgcatctgtgccccaccagctgacccctcacccaccatgacctgtctgctgtccctgtactccaggcacctgcaaccctggtctatatctcccacaactccctggtgactaaggaaggactacagaggctttgccaaaggagaagccctgcctcatcacacccttacctcccaccccctcagcacaggaagcttgctttgaagttaacttcatacacacacactcatatcctccagtttcccccagattctttcaggggctgccatcagattctgcccttggttagttttttgttttttttttggtagagacagagtctcactgttggtccaggttggttttgaactcctgggctcaagcgatcctcccttcttggcctcccaaagcacttggattacagatgtgagcctgtgcctggctggtctttcttgaggaaaatctgacctggcattttcttgaggcaccttagattccctggagtggcacctggcctttctgtactgagcacctggtcagtctgaagggggcatttcaccccagctccatcagggctggcagtcccgtctgaatgtggagagagctgtagttttatctggcttttaaaacatggacctgccggctgggcgcagtggcttacacctgtaatcccagtactttgggaggccgaagtgggtggatcgcttgagggcaggagttcgtgaccagcctggtcaacatggtgaaaccttgtctctactaaaaatacaaaaattagctgggtgtggtggcatgcgcctgtaatcccggctactcgggaggctgaggcagcagaatcacttgaaaccggaaggcagaggttgcagtgagccaagatcgtgcaactgcactccagcctgggcaaaagagcaaaactttgtctcaaaaaaagactcttttcaagttttctaccctctgataagaaaatttggggatatccagtgccatctccaaggactttcaggggatcatagatgcttttctgtgcctatctgctttgaccatgtgaaaaagtgatagtctgcttctctctggtaacttgtctgccacccatctgatagtaagattagccaaggccctttagccctctgtcctttctggttattgactgtccctggttcctaggaagacagagttgttctccagctaaagcgtctcctctctataaagtagttttactattcttttcatagcaggagccaaaatagtagaggaggggagagaggcacctggcactctgcgggcctgcacaggaaaaacagagccaaagacagaatcattgtataagatatttattaaaggagagcctctaagtccacatcctgagcccatgtgagtggacacaggtaggtaaaacggtgggtccagctgctgtcatctgaaagccttcaggagatgaagctatcagtatccagctgaaggctgctgggttctgttccaccaccaccttagcaccagggccctctctggtcccagaggcctcatctctccttgggctttgacaatgtggagcagcacatcagcagggactggtctagaccctccctttcctgtcacttagctggagctaagctccagataacccctaggttcccactggctcctagtagaaatagtttctgtactttagcagaacaggaaggatatttgttcattaaaggtggcttggtcttacagctgggtgcagtggtatatacctgtagtcccagctactcaggaagctgaggtgagaggatctctagagcccaggaattcaagtttaacatgagcagcaacattagcaagaccccgttt

SEQ ID NO: 1759 - DNA, 2150 bp, Homo sapiens
ctcaggttcccggtgcttcgcgcgtctgccgttgtcacaggccagggaggtggcaccaccaggcgaagcttggcgagattgtgtcgtcaagcgcgtacgggcgccaattggccgggcgatgtggcgtggactggcgctggcgcgagcgattggctgcgcggcccgggggcggggccagtgggcggtgcgcgccgcagactgtgctcaaagcgggcgccatccgggaccggcggttgtctgtggccggaggctgatcagtgttctagaacagatcagacattttgtaatgatgcctgaaataaacactaaccacctcgacaagcaacaggttcaactcctggcagagatgtgtatccttattgatgaaaatgacaataaaattggagctgagaccaagaagaattgtcacctgaacgagaacattgagaaaggattattgcatcgagcttttagtgtcttcttattcaacaccgaaaataagcttctgctacagcaaagatcagatgctaagattacctttccaggttgttttacgaatacgtgttgtagtcatccattaagcaatccagccgagcttgaggaaagtgacgcccttggagtgaggcgagcagcacagagacggctgaaagctgagctaggaattcccttggaagaggttcctccagaagaaattaattatttaacacgaattcactacaaagctcagtctgatggtatctggggtgaacatgaaattgattacattttgttggtgaggaagaatgtaactttgaatccagatcccaatgagattaaaagctattgttatgtgtcaaaggaagaactaaaagaacttctgaaaaaagcagccagtggtgaaattaagataacgccatggtttaaaattattgcagcgacttttctctttaaatggtgggataacttaaatcatttgaatcagtttgttgaccatgagaaaatatacagaatgtgaatatgtaggtaaatgattacagaaaaatttatctgcttaacaaacttagaatgactttttccttttaaatttagttctatcattaatttatcattaaatttagttctatcatttggtactatcattaatgtattatatacactgatactttaaaacttgtgtggaaaaaactaacttataattttgtatcacacaccctggatatgtgttctgtttctaagcgacatttgtgagagattattgtaaaatgagagcgagcaaataaaacttaatttaatctttgcagatacatacttatgggaaatttgaacaaatgagtgaaactctgtttttagtaggctgtgataaacatttccggagcacttgcagaggacttgctatttgccaggtgctttatgtatcattaaatttttctcatagttcagaaaaatgtgcaaaggaaactattgtctcgctccttcaaaacagtcttaattaactttcatattagcagattaaactagcagagcaggttcaagggaaattaaatgatatggaccctaatttgtatcattctgagttgattgtgtggtttattcattctggaaacatgttgatacttacagtcagccactgcttttgataagtgatattgattaggttgaatcttcttgtaaatagtatttaccagttagcaaagtctgtgttttcagaattacagtgagcacagaggtgttcataaaatgggaattgagtcccactcggtaagagttgcttaaacttgacactgttgacatttgggctggataaaacccctgtggtggggtctgtgctgtgcattgcaggatggtgagcagcgtccctctcatgtgacacccacagttatgccggatgttgccagatgcccctaggggacagagtcaacccccaactgaggaccactgtcctacagagtcaggaaatattgtagggagaaaaaaataacaacaacaaaggcctgtgttaatgttaaatagatgagattatggaatgtgtatattaatgttaaaaattgtaccttgatcaatgtactttttataaacttgccatagatatctcagatttgaaacctcaagacagatttattattcttaaatgctgtatgataatgaagaaaaataaaaatttatttcttgcaaagttaaaaaaaaaaaaaaaa

SEQ ID NO: 1760 - DNA, 5521 bp, Homo sapiens
cgccccgcatcgtgcccggccccgtcgcggagatcccggacgaccgtcgcgggttgatggtcgcattccagatgtaaacagcttcagaagcctgacggtcatatggtagaatcactgtggactgagacccacctttctagacctgaagcccaggaggaggaagaggaggctggttggtaccatgggcataatgctctgaatcctagtctctcacctagtatgtgagcagtccctgcagatggcccatttggagatcttgacaaagcctcttctgtttccaatggggtttttggcgcattctcacagacttagatgaaactgtgatggccaccgcagggggcaggtgctgacatcgtccccagccctgtggctgttcatccggacatcatttccaacctcaatatctaaatgccacagtgctcttggagcaagttgggctggggaccactgttgccttttaagaccataaaaccatgggaaacgcagaaagtcaacatgtagagcacgagttttatggagaaaagcatgccagcctggggcgcaacgacacttcccgctccctgcgcctctcgcacaagacgcggaggaccaggcacgcttcctcggggaaggtgatccacaggaactccgaagtgagcacccgatccagcagcacccccagcatcccccagtccctggctgaaaatggcctggagcccttctcccaagatggtaccctagaagacttcgggagccccatctgggtggaccgagtggacatgggcttgagacctgtgtcttacactgactcttctgtcactcccagcgtagacagcagcatcgtcctcacagcagcctctgtgcagagcatgccagacactgaggagagcaggctttacggggatgacgctacatatttggctgagggaggcaggaggcagcattcctatacatccaatgggcccactttcatggagacggcgagctttaagaagaaacgctccaaatctgcagacatctggcgggaggacagcctggaattctcactctctgatctgagccaagaacatttaacaagcaacgaagaaatcttgggttccgccgaagagaaggactgcgaggaggctcgggggatggaaacgcgggcgagtccgcggcagctcagcacctgtcagagagccaattccttgggtgacttgtatgctcagaaaaactctggagtgacagcaaacatggggccggggagcaaatttgcaggctactgtcggaatttggtgtctgatattcccaatcttgcaaaccataagatgccaccagctgctgctgaagagactcctccgtacagtaattataacacacttccctgtaggaaatctcactgtctctctgaaggtgccaccaacccacaaattagccatagcaacagcatgcaaggcagaagagctaaaacaactcaggatgttaatgcaggcgagggcagtgagtttgcagacagtgggattgaaggggccactaccgacacggacctcctgtccaggcgatctaatgccaccaactccagctactcacccaccacaggccgggcctttgtgggcagcgacagcggcagcagctccaccggggatgcggctcgtcagggggtgtacgagaacttccggcgggagctggagatgagcaccaccaacagcgagagcctggaggaggccggctctgcgcacagcgatgagcagagcagcggcaccctgagctctccgggccagtcggacatcctgctgaccgccgcacagggcacggtgcgcaaggccggcgccctggccgtcaagaacttcctggtgcacaagaagaacaagaaggtggagtcagccacccggaggaagtggaagcactactgggtgtccctgaaaggatgcacgctatttttctacgagagcgacggcaggtctgggatagaccacaacagcatccccaaacacgccgtctgggtggagaacagcattgtgcaggctgtgcctgagcaccccaagaaggactttgtcttctgcctcagcaattccctgggtgatgccttcctttttcagaccactagccagacggagcttgaaaactggatcaccgccatccactctgcctgcgccactgcggtcgcgaggcaccaccacaaggaagacacgctccgactcctgaaatcagagatcaaaaaactggaacagaagattgacatggatgaaaagatgaagaaaatgggtgaaatgcagctgtcttcagtcactgactcaaagaaaaagaaaacaatattagatcagatctttgtctgggagcaaaatctcgagcagttccaaatggacctgtttcgtttccgctgttatttagccagccttcagggtggggagctgccaaaccccaaaaggcttctcgcttttgcaagtcgaccaacgaaagtggccatgggccgccttggaatcttttcggtatcatcgtttcatgccctggtggcagcacgcactggtgaaactggagtgagaagacgtactcaggccatgtccagatccgcgagcaagcgaaggagcaggttttcttctctgtggggtctggatactacctccaaaaagaagcagggacggccaagcatcaatcaggtgtttggagagggaaccgaagctgtaaagaaatctttagagggaatatttgatgacattgttccagatggcaagagggagaaagaagtggtcttacctaacgttcaccagcacaaccctgactgcgacatttgggtccacgagtatttcactccatcctggttctgtctgcccaataatcagcctgccctgacggtcgtccggccaggcgacactgcacgggacaccctggagctgatttgcaagacacatcaactggatcattctgctcattacctgcgcctgaaatttctaatagaaaacaaaatgcagctctatgttccacagcccgaggaagacatctatgagctgctgtacaaagaaattgaaatctgtccaaaagtcactcacagcatccacattgagaagtcagatacagctgctgatacttacgggttttcactttcttctgtggaagaagatggtattcgaaggctgtacgtgaatagtgtgaaggaaaccggtttagcttccaagaaaggcctgaaagcaggagatgagattcttgagatcaataatcgtgctgctgacgccctgaactcttctatgctcaaagatttcctctcacaaccctcgctgggcctcctggtgaggacctaccccgagctggaggaaggagtggagctgctggaaagcccgccccaccgagtggacggccctgccgaccttgacgagagccccctcgcctttctcaccagcaacccagggcacagcctttgcagcgagcagggcagcagtgctgagaccgctccagaggagaccgaggggccagacttggaatcctcagatgagactgatcacagcagcaagagtacagaacaggtggccgcattttgccgcagtttgcatgagatgaacccctctgaccagaacccatctcctcaggactccacggggcctcagctggcgaccatgagacaactctcggatgcagataacgtgcgcaaggtgatctgcgagctcctggagacggagcgcacctacgtgaaggatttaaactgtcttatggagagatacctaaagcctcttcaaaaagaaacttttctcacccaggatgagcttgacgtgctttttggaaatttaacggaaatggtagagtttcaagtagaattccttaaaactctagaagatggagtgagactggtacctgatttggaaaagcttgagaaggttgatcaatttaagaaagtgctgttctctctggggggatcattcctgtattatgctgaccgcttcaagctctacagtgccttctgcgccatccacacaaaagttcccaaggtcctggtgaaagccaagacagacacggctttcaaggcattcttggatgcccagaacccgaagcagcagcactcatccacgctggagtcgtacctcatcaagcccatccagaggatcctcaagtacccacttctgctcagggagctgttcgccctgaccgatgcggagagcgaggagcactaccacctggacgtggccatcaagaccatgaacaaggttgccagtcacatcaatgagatgcagaaaatccatgaagagtttggggctgtgtttgaccagctgattgctgaacagactggtgagaaaaaagaggttgcagatctgagcatgggagacctgcttttgcacactaccgtgatctggctgaacccgccggcctcgctgggcaagtggaaaaaggaaccagagttggcagcattcgtcttcaaaactgctgtggtccttgtgtataaagatggttccaaacagaagaagaaacttgtaggatctcacaggctttccatttatgaggactgggaccccttcagatttcgacacatgatccccacggaagcgctgcaggttcgagctttggcgagtgcagatgcagaggcaaatgccgtgtgtgaaattgtccatgtaaaatccgagtctgaagggaggccggagagggtctttcacttgtgctgcagctccccagagagccgaaaggatttcctaaaggctgtgcattcaatcctgcgtgataagcacagaagacagctcctcaaaaccgagagccttccctcatcccagcaatatgtcccttttggaggcaaaagattgtgtgcactgaagggggccaggccggccatgagcagggcagtgtctgccccaagcaagtctcttgggaggaggaggcggcggctggctcgaaacaggtttaccattgattctgatgccgtctccgcaagcagcccggagaaagagtcccagcagccccccggtggtggggacactgaccgatgggtagaggagcagtttgatcttgctcagtatgaggagcaagatgacatcaaggagacagacatcctcagtgacgatgatgagttctgtgagtccgtgaagggtgcctcagtggacagagacctgcaggagcggcttcaggccacctccatcagtcagcgggaaagaggccggaaaaccctggatagtcacgcgtcccgcatggcacagctcaagaagcaagctgccctgtcggggatcaatggaggcctggagagcgcaagcgaggaagtcatttgggttaggcgtgaagactttgccccctccaggaaactgaacactgagatctgactgcgtcacctgccccgtagagaatgtgtgtagatacttcctgccctaactctgcccaccctcctgtaccgtcgacaagaatgtccccttaggtcgcgctcttgcacacacggttttggcagctgacttggttctgaagccatgtagccacccaactttgtcattttcaacaacatcagaaagaattgatcagaatcccaaataaaacccaaaagtgtctaatgtattcattcattagctaactaaaagcccaaaaaagacaagacacccag

SEQ ID NO: 1761 - DNA, 4163 bp, Homo sapiens
ccgcagtccttagcttcccggggacaggaaaccttcaagaccgagctgccacggccgcctccccgcccgccccccattctacgcgcctgcccacaccctcctcccctccttccagcgcctttcggtggagcactgcggcactcagcccgagctgccgttttcccctcgcggggaacgctgtgacccccccgcaggagcggcggggcggggtgggggggcccgggagaagatggcgacgccgggaagcgaaccccaacctttcgtcccggccctttcggtagctactctgcacccacttcatcatccccaccaccaccaccaccaccatcagcaccacggaggaaccggcgcccccggcggggcgggtggtggcggcggtggcagcgggggcttcaacctgcccttgaaccggggtctggagcgcgcgcttgaggaggcggccaactccggggggctgaacctgagcgccaggaaattgaaggaatttccccgtaccgcagcccccgggcatgacctctcggacacggtgcaggcagacttatctaaaaacagactggttgaagttccaatggaattgtgccattttgtatcactggaaattcttaatctgtatcacaactgtatcagagtcattcctgaggccatcgttaatctgcagatgctgacttacctgaacttgagtcgaaatcagctgtccgccctgcctgcctgcctgtgtggtctgcctctcaaagtcttaatcgcaagtaacaacaaacttggatcattaccagaagagataggtcagctcaaacagttaatggagctggatgtcagctgcaacgagatcacagcgttgccccagcagataggtcagttgaaatctctacgagaactgaatgtcagaagaaattaccttaaagttttaccacaagaactagtagatcttcccttggtaaagtttgacttttcctgcaacaaagtgctcgtgattccaatttgttttagagagatgaagcagctgcaagtgttactacttgagaataaccctctgcagtctcctccagcacagatttgcacaaagggcaaagttcacatatttaagtatctgagcatacaagcatgccagattaagacagctgactccctttatctccacaccatggagaggccacatttacaccagcacgtggaagatggcaagaaggattctgattcgggagttggaagtgataatggagataagcgattatctgccaccgagccttctgacgaagacactgttagcctcaatgtgccaatgtcaaacatcatggaagaagaacagatcatcaaggaggactcgtgccatcgccttagccccgttaaaggggaatttcatcaggaatttcaaccggagccttcccttttgggtgacagcaccaactcaggagaagaaagagaccagtttactgatagagcagatggtctccattcggaatttatgaactataaggcaagggcagaagactgtgaagagctgttacggatagaagaggatgtgcactggcaaactgagggcataataagttcatccaaagatcaggacatggatatagcaatgatcgagcagctgagagaagcagtagatttgctgcaagatcccaatggattaagcacagatattacagagagaagtgttttaaacctatatcctatgggatcagcagaagccttagaattacaagattctgcactgaatggtcaaatacagctggagacatctccggtgtgtgaggtgcaaagtgatctaacattacagagtaacgggagccagtattctccaaatgagattagagagaactcccctgcagtctctcctaccacaaacagcacagctccatttggcctgaagcctcgatcagtgtttctaagacctcagagaaatttggaatctatagacccgcagtttacaatccggaggaaaatggagcagatgagagaagagaaagagctggtggaacaacttcgtgagagcattgagatgagattgaaggtcagtctacacgaagacctgggggcagccctcatggatggtgtcgtcctctgccatctggtcaaccacatccgcccacggtcggttgcaagcatccatgtcccatcaccagcggttcccaaacttagcatggccaaatgcagaagaaatgtggaaaactttttggaagcgtgccgaaaattaggagtaccagaggctgacctctgctctccgtgtgacatcctgcagttggattttcgtcacattcgaaagactgttgacactctgctggcactcggggagaaagccccaccaccaacttctgccctccgctccagggaccttataggcttctgtcttgtccatattctctttatagtgctggtctatatcacttaccactggaatgctctgtccgcataacgtctgcacgtgcatccaaacgctgtgctctgtcgccctcaacctttgcagggtccttcctacctttgagcctttgccttgcaaacttccatccctgtcatgtcttcagttatctctcgagttttgaagctgaacagtagcaaatcagattttccagaagcacaaactttgtagaatacagtttagtataattcctctcacttactgaaatacaacgacgacgactgcaaagtgtatgcacaccgcatgcttcctcatccacatagtgccagcagcagtgccacgcagttcctcctctccctcccggtgagctgctgccctgggcagaggggaggagaattccaggacaagagtgtcaaggacagggatttagcatatggaagtctttcctttgggtcagtattgaactagaattctaattcgggactgggcaattgagctgtataggggccaccttgcagggaggacagaaaactaacattttggcccaacttgatctatacaaaactttaataataccactactgaccaagttggacgtgtacacgtactcacactgccttgatggccattcgattggattcctcccaaatttcctaaaaagggagccgcgaagggcgctgggcagtgtggccgccaacttccaccccggcaagcccctctgtcctatgcagaagggcgctccagggaaggaagtgtcgttgctgttagagcctcacgtggaggagtcacttaaacaccagttttttactgcttaattccttgttaggtcttctcttgaggctcttagaaaagcgttttccagagagatttctatttttgaacaatggaacggatcactgcttttttgccacatcacatagtaactgccggtccagaatgtgacggattcgactctattcattttcaaataaagccatgagccgtggaacattcttggtcctggtgcttgggttatgatggcaggagtcaagaagaagattactttcattctagaagaatgtagtttctctaattatttgaaatgttcatttagcctttgattttcactgatattaactagcaaactgctttaagtcagctcaaaggattatatagtaactatatctgcatttggagcaatgtgatcagtttgcatttaaaaggaaaaaaaagaattttatcttagccagaatgtccctggattcaggggtgtctttgtataatatgagagggccttgttccaaggtcaaggcagcctccttattttacatgctgtttgccaaatcttgtttcttagcttggggagatgatggacttagcttcctcaagataaatttctagtttattaagatgcaaacagctctcatagatggctactacgaagaaaatcttatttttctgaacattttcatgaatccaggggacttgaaaatatggaagacccacatagttagaagaatatatttataaagattccttgctgctaagtcagatcagatttgctaacaggaagcattctttacatgacagtatcttgagttatgtgagttttttttcctcctgactttgtgttgattggtgaaatgcagggtatgtggaagttatctaattaacctcagttgtatatgaataacccacagatgtactgaattacttttggtgctatcttgtactcttcaatctgtaacacaataaaatccctttgtacgatgtctaatgagcaccctgagccataaattgcttaataaacacattttgggtgatt

SEQ ID NO: 1762 - DNA, 2997 bp, Homo sapiens
gcacgggaaacgcgggcgtaggtgaccggcggctttctcagttttggtggagacgggcgcatgtgggcgctttgctcgctgctgcggtccgcggccggacgcaccatgtcgcagggacgcaccatatcgcaggcacccgcccgccgcgagcggccgcgcaaggacccgctgcggcacctgcgcacgcgagagaagcgcggaccgtcggggtgctccggcggcccaaacaccgtgtacctgcaggtggtggcagcgggtagccgggactcgggcgccgcgctctacgtcttctccgagttcaaccggtatctcttcaactgtggagaaggcgttcagagactcatgcaggagcacaagttaaaggttgctcgcctggacaacatattcctgacacgaatgcactggtctaatgttgggggcttaagtggaatgattcttactttaaaggaaaccgggcttccaaagtgtgtactttctggacctccacaactggaaaaatacctcgaagcaatcaaaatattttctggtccattgaaaggaatagaactggctgtgcggccccactctgccccagaatacgaggatgaaaccatgacagtttaccagatccccatacacagtgaacagaggaggggaaagcaccaaccatggcagagtccagaaaggcctctcagcaggctcagtccagagcgatcttcagactccgagttgaatgaaaatgagccacaccttccacatggtgttagccagagaagaggggtcagggactcttccctggtcgtagctttcatctgtaagcttcacttaaagagaggaaacttcttggtgctcaaagcaaaggagatgggcctcccagttgggacagctgccatcgctcccatcattgctgctgtcaaggacgggaaaagcatcactcatgaaggaagagagattttggctgaagagctgtgtactcctccagatcctggtgctgcttttgtggtggtagaatgtccagatgaaagcttcattcaacccatctgtgagaatgccacctttcagaggtaccaaggaaaggcagatgcccccgtggccttggtggttcacatggccccagcatctgtgcttgtggacagcaggtaccagcagtggatggagaggtttgggcctgacacccagcacttggtcctgaatgagaactgtgcctcagttcacaaccttcgcagccacaagattcaaacccagctcaacctcatccacccggacatcttccccctgctcaccagtttccgctgtaagaaggagggccccaccctcagtgtgcccatggttcagggtgaatgcctcctcaagtaccagctccgtcccaggagggagtggcagagggatgccattattacttgcaatcctgaggaattcatagttgaggcgctgcagcttcccaacttccagcagagcgtgcaggagtacaggaggagtgcgcaggacggcccagccccagcagagaaaagaagtcagtacccagaaatcatcttccttggaacagggtctgccatcccgatgaagattcgaaatgtcagtgccacacttgtcaacataagccccgacacgtctctgctactggactgtggtgagggcacgtttgggcagctgtgccgtcattacggagaccaggtggacagggtcctgggcaccctggctgctgtgtttgtgtcccacctgcacgcagatcaccacacgggcttgccaagtatcttgctgcagagagaacgcgccttggcatctttgggaaagccgcttcaccctttgctggtggttgcccccaaccagctcaaagcctggctccagcagtaccacaaccagtgccaggaggtcctgcaccacatcagtatgattcctgccaaatgccttcaggaaggggctgagatctccagtcctgcagtggaaagattgatcagttcgctgttgcgaacatgtgatttggaagagtttcagacctgtctggtgcggcactgcaagcatgcgtttggctgtgcgctggtgcacacctctggctggaaagtggtctattccggggacaccatgccctgcgaggctctggtccggatggggaaagatgccaccctcctgatacatgaagccaccctggaagatggtttggaagaggaagcagtggaaaagacacacagcacaacgtcccaagccatcagcgtggggatgcggatgaacgcggagttcattatgctgaaccacttcagccagcgctatgccaaggtccccctcttcagccccaacttcagcgagaaagtgggagttgcctttgaccacatgaaggtctgctttggagactttccaacaatgcccaagctgattcccccactgaaagccctgtttgctggcgacatcgaggagatggaggagcgcagggagaagcgggagctgcggcaggtgcgggcggccctcctgtccagggagctggcaggcggcctggaggatggggagcctcagcagaagcgggcccacacagaggagccacaggccaagaaggtcagagcccagtgaagatctgggagaccctgaactcagaaggctgtgtgtcttctgccccacgcacgcacccgtatctgccctccttgctggtagaagctgaagagcacggtcccccaggaggcagctcaggataggtggtatggagctgtgccgaggcttgggctcccacataagcactagtctatagatgcctcttaggactggtgcctggcacagccgcgggccaggaggctgccacacggaagcaagcagatgaactaatttcatttcaaggcagtttttaaagaagtcatggaaacagacggcggcacctttcctctaatccagcaaagtgattccctgcacaccagagacaagcagagtaacaggatcagtgggtctaagtgtccgagacttaacgaaaatagtatttcagctgcaataaagattgagtttgcaaaaaaaaaaaaaaaaaaaaaaaaaaaaaaa

SEQ ID NO: 1763 - DNA, 5359 bp, Homo sapiens
cccggccagctgagcccatcacagatgtggcagtcatcgctagggcactgggcgaggaagtgccccagggctacacatgcatccaggcttctgctgggggccaccccttggaactcagtgctggacttctgggtggaactcaacccgtcatctgctaccgcaggggccgtgacaagccccccctcgttgagctgggggtgttgtatgaggggaaggaacgtcccaagcctggcttccaagtgcttgacacgacaccctacagccactcagcaaacctggcccctccaggccccgggcacccccgcacctacctcacttaccggcgggcagcagagggggcagggctgcatgccctgggcatcactgacctctgcctggtgctgcccagtaagggcgagggcactcctcatacttactgccggctgccccgcaacctcaaccctggcatgtggggcccagcagtgtacctgtgctataaggtgggcctggcgaaggccaacacgctggtgtacgaggcaggtgagtggcccctttatccctccaatcctgtgaccctacatccctttgccctggtgcctcttggcaggcaccttaagtgtccccagagtttactttctctttgctactcgggccttctctgggatcccttggttcatttcccttggagtctgatggaccctgctccttttgggtacccccaactatgctgggggtgcagagctgctgggccgctacccggaggaggacaatgaggcgttcccgctgcccgagtcagtgcccgtcttctgcctgcccatgggggccactatcgagtgctggcctgcccagaccaagtaccccgtgcccgtcttctccacctttgtgctcacgggtgcagctggtgataaggtgtatggtgccgccctgcagttctacgaggcgttcccaagggccaggctatcagagcgacaggcacgggcactgggcctgctgagcgccgtggagcggggtcgggcactggggggcagagctgtgcgcagccggcgtgccatcgctgtgctgtcccgctggcctgccttccctgccttccgcgccttcctcaccttcctttaccgctactccgtctcaggcccccaccgcctacccttggaagcgcacatctcccacttcattcacaacgttcccttcccttccccacagagaccccgcatcctagtgcagatgtctccctatgacaacttgctcctctgtcagcctgtatcctcacccctgcccctcagtggtgccagcttcctgcagctgctgcagagcctgggccctgagctggctatcacactgctgctggctgtgctcacagagcacaagctgctagtccactcgctgcggccagacctgctcaccagcgtctgtgaggccctcgtctcgatgatcttcccactgcactggcagtgcccctacattcctctgtgcccgctggtgctggcagatgtgctgagtgccccagtgcccttcattgtgggtatccactccagctactttgatctgcatgacccgcctgctgatgtcatctgtgtagaccttgataccaacacgctcttccagactgaggaaaagaagctcctctcccctcggaccctgccccgcagaccctacaaggttctgctggccacactgacaaacctgtaccagcagctggaccagacatacactggacctgaggaggaagcatccctggagttcctactgacagactacgaggcagtgtgtggccgcagggcccggctggagcgcgaagtccaaggagccttcctccgcttcatggcctgtctgctcaagggctaccgggtcttcctgcgcccactcacccaggccccctccgagggagctcgtgatgttgacaaccttttcttcctgcagggcttcctcaaatcccgggaacgctccagccacaaactttactctcagctgctgcacacacagatgttctcacagttcattgaggagtgctcttttggctctgctcgccatgctgcccttgaattctttgactcttgtgttgaaaaggtccacccagagcaggagaagcctgagccgacacccttagtggagctagaggagctgtcaggaagtgagctcactgtctttatcacacctcccgaggagcctgccttaccagagggcagtgaatccactccccagtactgctatgatggattcccagagctacgggctgagttgtttgagtctcttcaagagcaacctggggccctgcctgtgccaggcccttcccgtagcgcccccagcagtcctgctcctcgccgtaccaaacaggagatgaaagttgcacagcggatggcacagaagtcagcagctgtgcctgagctgtgggcccggtgcctgctggggcactgctatgggctgtggttcctgtgtctgcctgcctatgtgcggtcggcaccctcccgagtgcaggcactgcacacagcctaccatgtgctgcgccagatggagagcggcaaggtggtgctccctgatgaggtgtgttaccgggtactgatgcagctctgctcacactatgggcagcctgtgctgtctgtgcgggtcatgctggagatgcgtcaggcaggcattgtgcccaacaccatcacctatggctactacaataaggctgtgttggaaagcaagtggccgtctggcacaccaggtgggcgtctgcgctgggccaagctccggaatgttgtcctgggggctgctcagttccgccagcccttgagagaacggcaacagcagcagcagcagcaacagcagcagcagcagcagcagcagcaggagcaggtgtcagcacatcaagaggcaggcagctcccaggcagagccctatttggagcgcccttcccctactcgccctcttcagcgccagactacttgggctgggcgaagtctgagagacccagcctcaccccctggacgcctggtgaagagtggtagcctgggcagtgcccgaggggcacagcccactgtggaggccggtgtggcccacatgatagaggccttgggggtcctggaaccccggggatcacctgtgccctggcacgatggaagtctctcagacctgagcctgacaggggaggagccgctccctggaggcagcccagggggctcaggctcagccctgagtgcccagtccactgaggccctggaagggctaagtgggcggggacccaaggctggtgggcgacaggatgaggcaggcaccccccgacgagggctgggtgcccgcctccaacagctgctcactccttcccgccactcccctgcctcccgcattcccccacctgagctgcctcctgacctgccacccccagcccgccgcagccccatggacagtcttctgcacccccgggagcgccctggatccactgcctccgagagctcagcctctctgggcagtgagtgggacctctcagaatcttctctcagcaacctgagtcttcgccgttcctcagagcgcctcagtgacacccctggatccttccagtcaccttccctggaaattctgctgtccagctgctccctgtgccgtgcctgtgattcgctggtgtatgatgaggaaatcatggctggctgggcacctgatgactctaacctcaacacaacctgccccttctgcgcctgcccctttgtgcccctgctcagtgtccagacccttgattcccggcccagtgtccccagccccaaatctgctggtgccagtggcagcaaagatgctcctgtccctggtggtcctggccctgtgctcagtgaccgaaggctctgccttgctctggatgagccccagctctgcaacgggcacatggggggagcctcccggcgggttgagagtggggcatgggcatacctgagccccctggtgctgcgtaaggagctggagtcgctggtagagaacgagggcagtgaggtgctggcgttgcctgaactgccctctgcccaccccatcatcttctggaaccttttgtggtatttccaacggctacgcctgcccagtattctaccaggcctggtgctggcctcctgtgatgggccttcgcactcccaggccccatctccttggctaacccctgatccagcctctgttcaggtacggctgctgtgggatgtactgacccctgaccccaatagctgcccacctctctatgtgctctggagggtccacagccagatcccccagcgggtggtatggccaggccctgtacctgcatcccttagtttggcactgttggagtcagtgctgcgccatgttggactcaatgaagtgcacaaggctgtggggctcctgctggaaactctagggcccccacccactggcctgcacctgcagaggggaatctaccgtgagatattattcctgacaatggctgctctgggcaaggaccacgtggacatagtggccttcgataagaagtacaagtctgcctttaacaagctggccagcagcatgggcaaggaggagctgaggcaccggcgggcgcagatgcccactcccaaggccattgactgccgaaaatgttttggagcacctccagaatgctagagaccttaagcttccctctccagcctagggtggggaagtgaggaagaagggattctagagttaaactgcttccctgttgccttcatggagttgggaacaggctgggaaggatgcccagtcaaaggctccaagcgaggacaacaggaagagggatccactgttaccaaaagtcctgattcccccatcaccaacctacccagtttgttcgtgctgatgttgggggagatctggggggagttggtacagctctgttcttcccttgtcctataccgggaactcccctccagggtacccacagatctgcattgccctggtcattttagaagtttttgttttaaaaaacaactggaaagatgcagagctactgagcctttgccctgaatgggaggtagggatgtcattctccaccaataatggtccctcttccctgacgttgctgaaggagcccaaggctctccatgcctttctacctaagtgtttgtattttattttaaattatttattctggagccacagcccccttgcttatgaggttcttatggagagtgagaaagggaagggaaatagggcaccatggtccggtggtttgtagttccttcaaagtcaggcactgggagctagaggagtctcaagctccccttaggaagaactggtgccccctccagtcctaatttttcttgcctgccccgccttggggaatgcctcacccacccaggtcctgacctgtgcaataaggattgttccctgcgaagttttgttggatgtaaatatagtaaaagctgcttctgtc

SEQ ID NO: 1764 - DNA, 1414 bp, Homo sapiens
tgctcaccagcgtctgtgaggccctcgtctcggtgagtgccgccccgcctggcccatcttccccagaaccatggttctttctggtgcccctatccctgcctggactcttcccttttccttccttgtggaggatcctcagcccctttccctgggcacagcctgcaggaacacatagcttccatcaggagctcttctctagagcctacttccaacagcctctctcaacaggcaccaactccccaaggccaatgccctctctttctctctcctgtgcctcccactgctgcctcaaccccctgttcactggttctcactgcctggtgcttcagatgatcttcccactgcactggcagtgcccctacattcctctgtgcccgctggtgctggcagatgtgctgagtgccccagtgcccttcattgtgggtatccactccagctactttgatctgcatgacccgcctgctgatgtcatctgtgtagaccttgataccaacacgctcttccagactgaggaaaagaagctcctctcccctcggaccctgccccgcagaccctacaaggttctgctggccacactgacaaacctgtaccagcagctggaccagagtgagaagcctgggtggggagggaggctgggaactgtcattgccctcaaacctccagtttgcagaggtctgtggggagctagacatttcttaaggaggtgagtgaagttaggattgcatttggtggaactgagggagattccaattccaactgaagctagaaggaagggcagacagtattcctgaacatgtgggaaatatcaagcttgaacctgttagttgaaggtaatactttagttgctactggtgcaaggtctgccagaggctggaggtggagatggaggcatgagagcagagttgagggtaacactatgggagccagccctgactcttaggctgccctggcctccagcatacactggacctgaggaggaagcatccctggagttcctactgacagactacgaggcagtgtgtggccgcagggcccggctggagcgcgaagtccaaggagccttcctccgcttcatggcctgtctgctcaagggctaccgggtcttcctgcgcccactcacccaggccccctccgagggagctcgtgatgttgacaaccttttcttcctgcagggtatagagggcctgtctctgcttggagatgtatcatgggaggaggtggcgaggggctgggctctgtcagaaaggcggaggggactgggagccactccattgtttattccttcactaggcaaatgtttttatgggcacccgctttgagccatttaactcttctggtcttgggggggaatcagggtacaaagatgaaaccagctgtggtcctgccctctggagccccaggcttggggtagcca

SEQ ID NO: 1765 - DNA, 4566 bp, Homo sapiens
ttgtggggaggggagctttaatgaccaaggacatggtaggtgctgggcaggtgggtgcagctgttgaggtttatgcaggctgggtccaggtggtggctgtgcctggcatctggggaagggtccccagggtatcctggtgaccctttccccacctcggcattgcctgcagtggtgccagcttcctgcagctgctgcagagcctgggccctgagctggctatcacactgctgctggctgtgctcacagagcacaagctgctagtccactcgctgcggccagacctgctcaccagcgtctgtgaggccctcgtctcggtgagtgccgccccgcctggcccatcttccccagaaccatggttctttctggtgcccctatccctgcctggactcttcccttttccttccttgtggaggatcctcagcccctttccctgggcacagcctgcaggaacacatagcttccatcaggagctcttctctagagcctacttccaacagcctctctcaacaggcaccaactccccaaggccaatgccctctctttctctctcctgtgcctcccactgctgcctcaaccccctgttcactggttctcactgcctggtgcttcagatgatcttcccactgcactggcagtgcccctacattcctctgtgcccgctggtgctggcagatgtgctgagtgccccagtgcccttcattgtgggtatccactccagctactttgatctgcatgacccgcctgctgatgtcatctgtgtagaccttgataccaacacgctcttccagactgaggaaaagaagctcctctcccctcggaccctgccccgcagaccctacaaggttctgctggccacactgacaaacctgtaccagcagctggaccagacatacactggacctgaggaggaagcatccctggagttcctactgacagactacgaggcagtgtgtggccgcagggcccggctggagcgcgaagtccaaggagccttcctccgcttcatggcctgtctgctcaagggctaccgggtcttcctgcgcccactcacccaggccccctccgagggagctcgtgatgttgacaaccttttcttcctgcagggcttcctcaaatcccgggaacgctccagccacaaactttactctcagctgctgcacacacagatgttctcacagttcattgaggagtgctcttttggctctgctcgccatgctgcccttgaattctttgactcttgtgttgaaaaggtccacccagagcaggagaagcctgagccgacacccttagtggagctagaggagctgtcaggaagtgagctcactgtctttatcacacctcccgaggagcctgccttaccagagggcagtgaatccactccccagtactgctatgatggattcccagagctacgggctgagttgtttgagtctcttcaagagcaacctggggccctgcctgtgccaggcccttcccgtagcgcccccagcagtcctgctcctcgccgtaccaaacaggagatgaaagttgcacagcggatggcacagaagtcagcagctgtgcctgagctgtgggcccggtgcctgctggggcactgctatgggctgtggttcctgtgtctgcctgcctatgtgcggtcggcaccctcccgagtgcaggcactgcacacagcctaccatgtgctgcgccagatggagagcggcaaggtggtgctccctgatgaggtgtgttaccgggtactgatgcagctctgctcacactatgggcagcctgtgctgtctgtgcgggtcatgctggagatgcgtcaggcaggcattgtgcccaacaccatcacctatggctactacaataaggctgtgttggaaagcaagtggccgtctggcacaccaggtgggcgtctgcgctgggccaagctccggaatgttgtcctgggggctgctcagttccgccagcccttgagagaacggcaacagcagcagcagcagcaacagcagcagcagcagcagcagcagcaggagcaggtgtcagcacatcaagaggcaggcagctcccaggcagagccctatttggagcgcccttcccctactcgccctcttcagcgccagactacttgggctgggcgaagtctgagagacccagcctcaccccctggacgcctggtgaagagtggtagcctgggcagtgcccgaggggcacagcccactgtggaggccggtgtggcccacatgatagaggccttgggggtcctggaaccccggggatcacctgtgccctggcacgatggaagtctctcagacctgagcctgacaggggaggagccgctccctggaggcagcccagggggctcaggctcagccctgagtgcccagtccactgaggccctggaagggctaagtgggcggggacccaaggctggtgggcgacaggatgaggcaggcaccccccgacgagggctgggtgcccgcctccaacagctgctcactccttcccgccactcccctgcctcccgcattcccccacctgagctgcctcctgacctgccacccccagcccgccgcagccccatggacagtcttctgcacccccgggagcgccctggatccactgcctccgagagctcagcctctctgggcagtgagtgggacctctcagaatcttctctcagcaacctgagtcttcgccgttcctcagagcgcctcagtgacacccctggatccttccagtcaccttccctggaaattctgctgtccagctgctccctgtgccgtgcctgtgattcgctggtgtatgatgaggaaatcatggctggctgggcacctgatgactctaacctcaacacaacctgccccttctgcgcctgcccctttgtgcccctgctcagtgtccagacccttgattcccggcccagtgtccccagccccaaatctgctggtgccagtggcagcaaagatgctcctgtccctggtggtcctggccctgtgctcagtgaccgaaggctctgccttgctctggatgagccccagctctgcaacgggcacatggggggagcctcccggcgggttgagagtggggcatgggcatacctgagccccctggtgctgcgtaaggagctggagtcgctggtagagaacgagggcagtgaggtgctggcgttgcctgaactgccctctgcccaccccatcatcttctggaaccttttgtggtatttccaacggctacgcctgcccagtattctaccaggcctggtgctggcctcctgtgatgggccttcgcactcccaggccccatctccttggctaacccctgatccagcctctgttcaggtacggctgctgtgggatgtactgacccctgaccccaatagctgcccacctctctatgtgctctggagggtccacagccagatcccccagcgggtggtatggccaggccctgtacctgcatcccttagtttggcactgttggagtcagtgctgcgccatgttggactcaatgaagtgcacaaggctgtggggctcctgctggaaactctagggcccccacccactggcctgcacctgcagaggggaatctaccgtgagatattattcctgacaatggctgctctgggcaaggaccacgtggacatagtggccttcgataagaagtacaagtctgcctttaacaagctggccagcagcatgggcaaggaggagctgaggcaccggcgggcgcagatgcccactcccaaggccattgactgccgaaaatgttttggagcacctccagaatgctagagaccttaagcttccctctccagcctagggtggggaagtgaggaagaagggattctagagttaaactgcttccctgttgccttcatggagttgggaacaggctgggaaggatgcccagtcaaaggctccaagcgaggacaacaggaagagggatccactgttaccaaaagtcctgattcccccatcaccaacctacccagtttgttcgtgctgatgttgggggagatctggggggagttggtacagctctgttcttcccttgtcctataccgggaactcccctccagggtacccacagatctgcattgccctggtcattttagaagtttttgttttaaaaaacaactggaaagatgcagagctactgagcctttgccctgaatgggaggtagggatgtcattctccaccaataatggtccctcttccctgacgttgctgaaggagcccaaggctctccatgcctttctacctaagtgtttgtattttattttaaattatttattctggagccacagcccccttgcttatgaggttcttatggagagtgagaaagggaagggaaatagggcaccatggtccggtggtttgtagttccttcaaagtcaggcactgggagctagaggagtctcaagctccccttaggaagaactggtgccccctccagtcctaatttttcttgcctgccccgccttggggaatgcctcacccacccaggtcctgacctgtgcaataaggattgttccctgcgaagttttgttggatgtaaatatagtaaaagctgcttctgtc

SEQ ID NO: 1766 - DNA, 1467 bp, Homo sapiens
cccaggccccatctccttggctaacccctgatccagcctctgttcaggtacggctgctgtgggatgtactgacccctgaccccaatagctgcccacctctctatgtgctctggagggtccacagtgagtctggtatttggcctgggtggggagggtgggtcccatacccagagggctcagtgattctggtggccttctttcctttcatccaggccagatcccccagcgggtggtatggccaggccctgtacctgcatcccttagtttggcactgttggagtcagtgctgcgccatgttggactcaatgaagtgcacaaggctgtggggctcctgctggaaactctagggcccccacccactggcctgcacctgcagaggtatggtgctaccatctgggtgatccctggtctgtccggggctccacaccccttttctctcactcatacacttctgcctccactaaaggggaatctaccgtgagatattattcctgacaatggctgctctgggcaaggaccacgtggacatagtggccttcgataagaagtacaagtctgcctttaacaagctggccagcagcatgggcaaggaggagctgaggcaccggcgggcgcagatgcccactcccaaggccattgactgccgaaaatgttttggagcacctccagaatgctagagaccttaagcttccctctccagcctagggtggggaagtgaggaagaagggattctagagttaaactgcttccctgttgccttcatggagttgggaacaggctgggaaggatgcccagtcaaaggctccaagcgaggacaacaggaagagggatccactgttaccaaaagtcctgattcccccatcaccaacctacccagtttgttcgtgctgatgttgggggagatctggggggagttggtacagctctgttcttcccttgtcctataccgggaactcccctccagggtacccacagatctgcattgccctggtcattttagaagtttttgttttaaaaaacaactggaaagatgcagagctactgagcctttgccctgaatgggaggtagggatgtcattctccaccaataatggtccctcttccctgacgttgctgaaggagcccaaggctctccatgcctttctacctaagtgtttgtattttattttaaattatttattctggagccacagcccccttgcttatgaggttcttatggagagtgagaaagggaagggaaatagggcaccatggtccggtggtttgtagttccttcaaagtcaggcactgggagctagaggagtctcaagctccccttaggaagaactggtgccccctccagtcctaatttttcttgcctgccccgccttggggaatgcctcacccacccaggtcctgacctgtgcaataaggattgttccctgcgaagttttgttggatgtaaatatagtaaaagctgcttctgtc

SEQ ID NO: 1767 - DNA, 1704 bp, Homo sapiens
gctcctgtccctggtggtcctggccctgtgctcagtgaccgaaggctctgccttgctctggatgagccccagctctgcaacgggcacatggggggagcctcccggcgggttgagagtggggcatgggcatacctgagccccctggtgctgcgtaaggagctggagtcgctggtagagaacgagggcagtgaggtgctggcgttgcctgaactgccctctgcccaccccatcatcttctggaaccttttgtggtatttccaacggctacgcctgcccagtattctaccaggcctggtgctggcctcctgtgatgggccttcgcactcccaggccccatctccttggctaacccctgatccagcctctgttcaggtacggctgctgtgggatgtactgacccctgaccccaatagctgcccacctctctatgtgctctggagggtccacagtgagtctggtatttggcctgggtggggagggtgggtcccatacccagagggctcagtgattctggtggccttctttcctttcatccaggccagatcccccagcgggtggtatggccaggccctgtacctgcatcccttagtttggcactgttggagtcagtgctgcgccatgttggactcaatgaagtgcacaaggctgtggggctcctgctggaaactctagggcccccacccactggcctgcacctgcagaggggaatctaccgtgagatattattcctgacaatggctgctctgggcaaggaccacgtggacatagtggccttcgataagaagtacaagtctgcctttaacaagctggccagcagcatgggcaaggaggagctgaggcaccggcgggcgcagatgcccactcccaaggccattgactgccgaaaatgttttggagcacctccagaatgctagagaccttaagcttccctctccagcctagggtggggaagtgaggaagaagggattctagagttaaactgcttccctgttgccttcatggagttgggaacaggctgggaaggatgcccagtcaaaggctccaagcgaggacaacaggaagagggatccactgttaccaaaagtcctgattcccccatcaccaacctacccagtttgttcgtgctgatgttgggggagatctggggggagttggtacagctctgttcttcccttgtcctataccgggaactcccctccagggtacccacagatctgcattgccctggtcattttagaagtttttgttttaaaaaacaactggaaagatgcagagctactgagcctttgccctgaatgggaggtagggatgtcattctccaccaataatggtccctcttccctgacgttgctgaaggagcccaaggctctccatgcctttctacctaagtgtttgtattttattttaaattatttattctggagccacagcccccttgcttatgaggttcttatggagagtgagaaagggaagggaaatagggcaccatggtccggtggtttgtagttccttcaaagtcaggcactgggagctagaggagtctcaagctccccttaggaagaactggtgccccctccagtcctaatttttcttgcctgccccgccttggggaatgcctcacccacccaggtcctgacctgtgcaataaggattgttccctgcgaagttttgttggatgtaaatatagtaaaagctgcttctgtc

SEQ ID NO: 1768 - DNA, 5108 bp, Homo sapiens
tgcttggcacataagcaaccctgtataaacattagttgctattatcactgtcattatcatcatcatcatcacctccgtcttctgagcactctgggaatccaggggctggccatgtcttctagggcacctgcccatgctcaagggccagcctctctgcacggggctccaggcagggctgcagcctgtgaagtacagcatcccttctcctccttagagcacagacccttcctcagagaaggtgctacttcttcccacaccactttagggtctgtcctggtggctcatgcctttaatcccagcattttgggaggctgaggcaggcagatcacttgcgcccaggagtttgtgactagcctgggcaatgtggcaaaaccttgtctttacaaaaagtacaaaacaatcagtcgggcttggtggtgcgtcccagctacttgagactgaggtgggagaatcgcttgagcccaggaggccgagtctgcagtgagccaagattgcgccactgcactccagcctgggtgacagagcgagaccgtcataaataaataaataaatagataagtaagaaagacctggcattgtactcaccctgatgtgtcccctgtcctacctaggagatgaaagttgcacagcggatggcacagaagtcagcagctgtgcctgagctgtgggcccggtgcctgctggggcactgctatgggctgtggttcctgtgtctgcctgcctatgtgcggtcggcaccctcccgagtgcaggcactgcacacagcctaccatgtgctgcgccagatggagagcggcaaggtggtgctccctgatgaggtaggcaatctatgtgaccatgctcatacccaggcccagtgagccttgtgcagctggagagggctgtgagagggaaacttggtggagactaaggaaagaagttgcagagccccagagctgggcagattatctataaacattcgtcgagtgaataagcatgttcagggtttagcagtgaagactgtagggtggcagggtcagcagaaagggtgggtggctctgaggtagccccaggacctgccaggggccagtgatgtctgtgagaattggggaggcaggaagagggtgcttgctgagactttggttttggttgagagtgagtctcccattgtcctgtgcctctcctggcccaggtgtgttaccgggtactgatgcagctctgctcacactatgggcagcctgtgctgtctgtgcgggtcatgctggagatgcgtcaggcaggcattgtgcccaacaccatcacctatggctactacaataaggtacctactttggggtgaggggtgggatggcagctgtgccagggtgtgtgaggggaggctgctgctgctcccctcgctccttggagattgggctggtactgtttgcctaggtcctggaaccactgtcatccacattgcactcctgtggtgccttagcacctacagtttctcagacgaggctgctttgattcccactcatgacagccctgcctacaactaatagtgtcagccgctaagccaggcacgggtccatacgcatcacacattttacatcattttatcttcacgacagccctatgaggtgggatgatcattatccccatcttatagaagaggagatgaggttgtagagagttagtaactcgtccaaggtcccgcagcaaagaagttaaggagtgagaatatgggcacagggctgggtgcagtggctcatgcctgtaatctcagcactttgggaggctgaggcaggcagatcacctgagatcaggagttcgagaccagcctggccaacatggtgaaaccctgtctctattaaaaatacagaaattagcttggtgtggtggtgggtgcctgtagtcccagctacttgggaggctgaggcaagagaatcacttgaacccgggaggcagaggttgcagtgagccaagattgcgccactgcgctccagcctgggcgacagagcaagactccgtctcgaaaaaaaagaaaaaagaatatgggcagaggcatatccatatctcccgaattcaggcccttagccatgatactaaactgcctcctgttttttagatgaggagactaatgaccaaataaatgaaatgatttcttcagagccatatattttatatttctaagcagcaaggtctgggtacaaattttctccactgcctctgggttcttctaggccccttgggaggcagctgctgcctactgtctcttctgggctcttgttcctggctgagccattggccggacagtcctagacaggatgtctgcaggggaagggcggtccctggggctccaagacagggagtgggtatgaggcagggttagggtgtcgaggtaggccatcctgatgggcactgtgcttggtaggctgtgttggaaagcaagtggccgtctggcacaccaggtgggcgtctgcgctgggccaagctccggaatgttgtcctgggggctgctcagttccgccagcccttgagagaacggcaacagcagcagcagcagcaacagcagcagcagcagcagcagcagcaggagcaggtgtcagcacatcaagaggcaggcagctcccaggcagagccctatttggagcgcccttcccctactcgccctcttcagcgccagactacttgggctgggcgaagtctgagagacccagcctcaccccctggacgcctggtgaagagtggtagcctgggcagtgcccgaggggcacagcccactgtggaggccggtgtggcccacatgatagaggccttgggggtcctggaaccccggggatcacctgtgccctggcacgatggaagtctctcagacctgagcctgacaggggaggagccgctccctggaggcagcccagggggctcaggctcagccctgagtgcccagtccactgaggccctggaagggctaagtgggcggggacccaaggctggtgggcgacaggatgaggcaggcaccccccgacgagggctgggtgcccgcctccaacagctgctcactccttcccgccactcccctgcctcccgcattcccccacctgagctgcctcctgacctgccacccccagcccgccgcagccccatggacagtcttctgcacccccgggagcgccctggatccactgcctccgagagctcagcctctctgggcagtgagtgggacctctcagaatcttctctcagcaacctgagtcttcgccgttcctcagagcgcctcagtgacacccctggatccttccagtcaccttccctggaaattctgctgtccagctgctccctgtgccgtgcctgtgattcgctggtgtatgatgaggaaatcatggctggctgggcacctgatgactctaacctcaacacaacctgccccttctgcgcctgcccctttgtgcccctgctcagtgtccagacccttgattcccggcccagtgtccccagccccaaatctgctggtgccagtggcagcaaagatgctcctgtccctggtggtcctggccctgtgctcagtgaccgaaggctctgccttgctctggatgagccccagctctgcaacgggcacatggggggagcctcccggcgggttgagagtggggcatgggcatacctgagccccctggtgctgcgtaaggagctggagtcgctggtagagaacgagggcagtgaggtgctggcgttgcctgaactgccctctgcccaccccatcatcttctggaaccttttgtggtatttccaacggctacgcctgcccagtattctaccaggcctggtgctggcctcctgtgatgggccttcgcactcccaggccccatctccttggctaacccctgatccagcctctgttcaggtacggctgctgtgggatgtactgacccctgaccccaatagctgcccacctctctatgtgctctggagggtccacagccagatcccccagcgggtggtatggccaggccctgtacctgcatcccttagtttggcactgttggagtcagtgctgcgccatgttggactcaatgaagtgcacaaggctgtggggctcctgctggaaactctagggcccccacccactggcctgcacctgcagaggggaatctaccgtgagatattattcctgacaatggctgctctgggcaaggaccacgtggacatagtggccttcgataagaagtacaagtctgcctttaacaagctggccagcagcatgggcaaggaggagctgaggcaccggcgggcgcagatgcccactcccaaggccattgactgccgaaaatgttttggagcacctccagaatgctagagaccttaagcttccctctccagcctagggtggggaagtgaggaagaagggattctagagttaaactgcttccctgttgccttcatggagttgggaacaggctgggaaggatgcccagtcaaaggctccaagcgaggacaacaggaagagggatccactgttaccaaaagtcctgattcccccatcaccaacctacccagtttgttcgtgctgatgttgggggagatctggggggagttggtacagctctgttcttcccttgtcctataccgggaactcccctccagggtacccacagatctgcattgccctggtcattttagaagtttttgttttaaaaaacaactggaaagatgcagagctactgagcctttgccctgaatgggaggtagggatgtcattctccaccaataatggtccctcttccctgacgttgctgaaggagcccaaggctctccatgcctttctacctaagtgtttgtattttattttaaattatttattctggagccacagcccccttgcttatgaggttcttatggagagtgagaaagggaagggaaatagggcaccatggtccggtggtttgtagttccttcaaagtcaggcactgggagctagaggagtctcaagctccccttaggaagaactggtgccccctccagtcctaatttttcttgcctgccccgccttggggaatgcctcacccacccaggtcctgacctgtgcaataaggattgttccctgcgaagttttgttggatgtaaatatagtaaaagctgcttctgtc

SEQ ID NO: 1769 - DNA, 5359 bp, Homo sapiens; identical to SEQ ID NO: 1763

SEQ ID NO: 1770 - DNA, 1414 bp, Homo sapiens; identical to SEQ ID NO: 1764

SEQ ID NO: 1771 - DNA, 4566 bp, Homo sapiens; identical to SEQ ID NO: 1765

SEQ ID NO: 1772 - DNA, 1467 bp, Homo sapiens; identical to SEQ ID NO: 1766

SEQ ID NO: 1773 - DNA, 1704 bp, Homo sapiens; identical to SEQ ID NO: 1767

SEQ ID NO: 1774 - DNA, 5108 bp, Homo sapiens; identical to SEQ ID NO: 1768

SEQ ID NO: 1775 - DNA, 855 bp, Homo sapiens
gaggcccggctgcagacctctcccgagaggggaataatccgtgccggccggttccgccatggagccaggtgcaggtcacctcgacggtcaccgcgcggggagcccaagccttcgtcaggctctgtgcgacggaagcgcagtgatgttttccagtaaagaacgcggacgttgcaccgtgatcaattttgtccctttggaggcgccgttacggtccacgccccgctcgcgtcaagtgactgaggcctgtggtggagaaggacgtgccgtgccgctgggttctgagccggagtggtcggtgggtgggatggaggcgaccttggagcagcacttggaagacacaatgaagaatccctccattgttggagtcctgtgcacagattcacaaggacttaatctgggttgccgcgggaccctgtcagatgagcatgctggagtgatatctgttctagcccagcaagcagctaagctaacctctgaccccactgatattcctgtggtgtgtctagaatcagataatgggaacattatgatccagaaacacgatggcatcacggtggcagtgcacaaaatggcctcttgatgctcatatctgttcttcagcagcctgtcataggaactggatcctacctatgttaattaccttatagaactactaaagttccagtagttaggccattcatttaatgtgcattaggcacttttctgtttatttaagagtcaattgctttctaatgctctatggaccgactatcaagatattagtaagaaaggatcatgttttgaagcagcaggtccaggtcactttgtatatagaattttgctgtattcaataaatctgtttggaggaaaaaaaaa

SEQ ID NO: 1776 - DNA, 2217 bp, Homo sapiens
ccctacctcatagatatgtaggacatccccgggcccggaatgcggctctctgaccctctctgtgccctcccccgccccccgaaccaggcttggcgggcggaggcgccagcggatgtctcatgcaaggatcgtctctgtggctaagcctcactttccgctccgcccgggtgctctctagagcccggtttttcgagtggcagtctccagggctgccgaatacagcagcgatggagaacggcaccgggccctacggagaagaacgtccacgtgaagtccaggagacgacagtcaccgagggggctgccaaaatcgcctttcccagtgccaacgaggtcttttataacccggtgcaggaattcaatcgggacctgacatgtgctgtgatcaccgagtttgctcgcattcagcttggggccaaaggaatccagatcaaggttccaggagagaaggacacgcaaaaagtggtcgtggacttgtcagagcaagaggaggaaaaggttgaactgaaagagagtgaaaacctggcctcaggagaccaacctcgcacagcggccgtgggggagatctgtgaggaaggcctgcatgtgctggaaggcctggcagcttcaggcctacgttccattcgatttgccctagaggtgcctgggctcagatctgtggttgcaaacgatgcctccacccgggctgtggatctcatacgccggaatgtccagctcaatgacgtggcccacctggtacagccgagccaagcagatgcccggatgctgatgtaccagcaccagagggtgtcggagaggtttgacgtcatcgatctggacccctatggcagcccagccaccttcctggatgcagctgtgcaggctgtgagtgaaggagggttgctgtgtgtgacctgcacagacatggcggtgttggcggggaacagcggggagacgtgctacagcaagtacggggccatggccctcaagagccgggcctgccacgagatggccctgagaatcgtcctgcacagcctggacctccgcgccaactgctaccagcgcttcgtggtgccgctgctcagcatcagcgctgacttctacgtgcgtgtttttgtccgtgtcttcaccggccaggccaaggtcaaggcctcagccagcaagcaggcgctggtgttccagtgtgtgggctgcggggccttccaccttcagcgtctcggcaaagcgtcaggagtccccagcggccgggccaagttctctgcagcctgtggtccccctgtgacccccgagtgtgaacactgtgggcaacgacaccagcttggtggccccatgtgggcagagcccatccatgacctggattttgtgggccgtgtcctggaggctgtgagcgctaaccccggccgcttccacacctcggagcggatccgaggggtcctgagcgtcatcactgaggagctcccggacgtgcctctgtactacaccctggaccagctgagcagcaccatccactgcaacacaccaagcctcctgcagttgcggtcggccctcctccacgctgacttccgggtctcactctcccacgcctgtaagaacgctgtgaagacggatgcccctgcctctgccctctgggacatcatgcgttgctgggagaaggaatgtccggtgaaacgggagcgactatcagagactagcccagcgttccgcattctcagtgtggagcccaggctgcaggccaacttcaccatccgggaagatgccaaccccagctcccgacagcgaggactcaagcgcttccaggctaacccggaggccaactggggtccccggcctcgtgcccggccagggggcaaggcggccgacgaagctatggaggagagacgcaggctgcttcagaacaagcggaaggagccgccggaagatgtggcccagcgggctgcccggctcaagacatttccttgcaagaggtttaaggagggcacctgtcaacgcggggaccagtgctgctactcccacagccccccgacacccagggtttctgctgatgctgcccctgactgtccagagacctccaaccagaccccccctggacctggggctgccgctgggccaggcatagactgaaccaataaagagatgtcacgtcaccttctcccgaaaaaaaaaaaaaaaaaaaaaaaaaaaaaaaaaaaaaaaaaaaaaaaaaaaaaaaaaaaaaaaaaaaaaaaaaaaaaaaaaaaaa

SEQ ID NO: 1777 - DNA, 1586 bp, Homo sapiens
gaggacaggtttgtgcgctggacgcaagcaccaggcgcagcctcgctcgccgacacccggccagaacgtgttacgagtcagtttttagtgaaaaaacattgagctaggagccaagacccatctcttcactattttggtattgtgcaagtcatcttacctctctggatctcagttgtctcatctgtaaaaaggagataaaaattatttacctgcctgaacatgaggtggaggaccatcctgctacagtattgctttctcttgattacatgtttacttactgctcttgaagctgtgcctattgacatagacaagacaaaagtacaaaatattcaccctgtggaaagtgcgaagatagaaccaccagatactggactttattatgatgaatatctcaagcaagtgattgatgtgctggaaacagataaacacttcagagaaaagctccagaaagcagacatagaggaaataaagagtgggaggctaagcaaagaactggatttagtaagtcaccatgtgaggacaaaacttgatgaactgaaaaggcaagaagtaggaaggttaagaatgttaattaaagctaagttggattcccttcaagatataggcatggaccaccaagctcttctaaaacaatttgatcacctaaaccacctgaatcctgacaagtttgaatccacagatttagatatgctaatcaaagcggcaacaagtgatctggaacactatgacaagactcgtcatgaagaatttaaaaaatatgaaatgatgaaggaacatgaaaggagagaatatttaaaaacattgaatgaagaaaagagaaaagaagaagagtctaaatttgaagaaatgaagaaaaagcatgaaaatcaccctaaagttaatcacccaggaagcaaagatcaactaaaagaggtatgggaagagactgatggattggatcctaatgactttgaccccaagacatttttcaaattacatgatgtcaatagtgatggattcctggatgaacaagaattagaagccctatttactaaagagttggagaaagtatatgaccctaaaaatgaagaggatgatatggtagaaatggaagaagaaaggcttagaatgagggaacatgtaatgaatgaggttgatactaacaaagacagattggtgactctggaggagtttttgaaagccacagaaaaaaaagaattcttggagccagatagctgggagacattagatcagcaacagttcttcacagaggaagaactaaaagaatatgaaaatattattgctttacaagaaaatgaacttaagaagaaggcagatgagcttcagaaacaaaaagaagagctacaacgtcagcatgatcaactggaggctcagaagctggaatatcatcaggtcatacagcagatggaacaaaaaaaattacaacaaggaattcctccatcagggccagctggagaattgaagtttgagccacacatttaaagtctgaagtccaccagaacttggaagaaagctgttaactcaacatctatttcatctttttagctcccttcccttttctctgctcaataaatattttaaaagca

SEQ ID NO: 1778 - DNA, 7121 bp, Homo sapiens
atgacaactggcttgtctgatcagcaggtggtctgtgaccttgatcacagggcagtggaagccctattgcaggcagttaggaagaggatggcaggggcctcgcccgcggtcccccatgagcgcgcccggctgaccggcggggcggccgcggtggagcccgcgtgccgcgggggcggcggggccatggcctcgctggacctgccgtaccgctgcccccgctgcggggagcacaagcgcttccggagcctgtcgtcgctgcgcgcgcacctggagtacagccacacctacgagacgctctacatcctctccaagaccaacagcatctgcgacggcgccgccgccgccgcggccgccgccgccgctgcctcggggttcccgctggctcccgagcccgccgccctgctggccgtgcccggcgcccggcgagaggtcttcgagagcacttccttccagggcaaggagcaggcggccgggccgtcgcccgcggcgccgcacctgctgcaccaccaccatcaccacgctcccctcgcccacttccccggcgacctggtgcccgctagcctgccctgtgaggagttggccgagccgggccttgtgcccgccgcagcagcgcgctatgcgctgcgcgagatcgagatcccgctgggggagctgttcgcccgcaagtccgtggcgtcctcggcgtgctcgacgccgccgcctggccccggccccggcccttgccccgggcctgcctccgcttcgcccgcgtccccctcacccgctgatgtggcctacgaagagggcctggcgcgcctcaagatccgcgcgctggagaagctggaggtggaccggcggctggagcggctgagcgaggaggtggagcagaagatcgcgggccaggtgggccggctgcaggccgagctggagcgcaaggcggccgaactggagactgcgcggcaggagagtgcgaggctcgggcgcgagaaggaggagctggaggagcgcgcgtctgagctctcccgccaggtggacgtgagcgtagagctgctggcctcactcaagcaggacctggtgcacaaggaacaggagctgagccgcaagcagcaggaggtggtgcagatcgaccagttcctgaaggagacggcggcgcgggaggccagcgccaagctgcggctgcagcagttcattgaggagctccttgagcgggctgaccgtgccgagcggcagctgcaggtcatcagcagcagctgtggcagcacgcccagcgccagcctgggccgtggaggtgggggcggtggtgctggacccaatgcccggggcccaggcagaatgcgagaacaccacgtgggcccggccgtgcctaacacatatgcagtgtcacggcatggctcctctccgagcacaggggcctccagccgtgtgccagccgcatcccagagctcaggctgctatgacagtgacagtctggagctgcccaggccagaggagggggcccctgaggacagtggccctgggggcttgggcacacgggcccaggctgccaacgggggctcagagcggtcccagccccctcgcagctcaggcctgcggcgccaggccatccagaactggcagcgcagaccccgccgacacagcactgagggggaagagggtgatgtctccgacgttggctcccgaaccactgagtcagaggctgagggcccgttggatgcgccccgccccgggcctgctatggctgggccattgagcagctgccggctctcagcccgccccgagggaggcagtgggcggggtcggcgagcagagagggtcagcccctcacgctccaatgaggtcatcagcccagagatcctgaagatgcgagctgccctcttctgcatcttcacctacctggacacgcgcacactgctgcatgctgccgaggtctgccgggactggcgcttcgtggcccgccaccccgcagtctggacaagggtgctgcttgagaatgcccgtgtctgctccaagttcctggcaatgctggctcagtggtgcacccaggcccactctctgacgctgcagaacttgaagccccggcagcggggaaagaaggagagcaaggaggagtatgcccggagcacccggggctgcctggaagctgggctggagtccctgctgaaggcagctggggggaacctgctgatcctgcgcatctcccactgtccaaacatcctcaccgaccgctcgctctggctggccagctgctactgccgtgccctgcaggctgtcacgtacaggagtgccacagaccccgtgggccatgaggtcatttgggccctgggcgcaggctgcagagagatcgtctccctccaagtggcaccacttcacccctgccagcagcccacacgcttcagtaaccgctgcctgcagatgattggtcgctgttggccccacctgcgggccctgggggtcgggggtgccggctgtggggtgcagggcctggcatcactcgcgagaaactgcatgcggctgcaggtcctggagcttgaccacgtgtcagagatcacccaggaggtggcagcagaggtctgccgggaaggcctgaagggactggagatgctggtgctcacggcgactcccgtcacccctaaggccctactgcacttcaacagcatctgccggaacctcaagtccattgtggtccagattgggattgcggattatttcaaagagcccagcagccctgaggcccagaagctgtttgaggacatggtgacaaaactccaggctctgcgacggaggcccggcttctctaagattctgcacatcaaggtggaaggcggctgctaacccgggtagggggcggcagggcccctgccagccccacaccagggcactctctttggacctcagagggaccctggtttggactagacctttggaggccgagtgttatccctggcttctggagggggactgtcaagtctcctgtcctcctcctggagcagcagagcaacaggcctgacccagggcactgcctccccagtacaggggcttggacagaagctgccctccgacccccaccctaccccggctggagtagcctctggcacagccagtgaggagctgtcaccaccagcgcctggtgtcatcacctggaggatctgcaataaccacccagtggctcctcagctgttctggctggcctctccttcctgaggcccagcctcctggtcaggagcatctggggccccaagccaatgggggctccacaaggcagctcagacttggcaaggagggctcttctcctcaaccttgctgcagccttctgggggcaccccttcagacagcctgcccaggctgtggatccacatttcctgggggtaccacagccagacctaggggcctgggcacgtggtcagccaaaagctgggggcagcagtacagtggggtagtgggggtgggtttggaaaggaaacagtcacccagaacttctccccaggatgagaccacccttccaaggtgggggattgccagggggagaaaacttatttattgctgtaagacaggacccctcctcccaacctcataccccaccgcacaccagagctaaattcaaagctgaaaggcgcacgtttctatacctacattcattcctgagggaccctccagagggtcaaggtcccagccccaggcagccctgtcacagtgagaagtagttcctgtccttaaggaatttccttctaatccaggtgcttgggcaggaacccgatggccttcgggtcaccaaggctgtctgggagggaggcacagggccgccctctgtgctgaggccgtggaggaagccaggaggagggtggcttgctttgcttccttgtctaattagcttgcttgaagatgtggccttggcagggagccagacccatggggccaaggaagaggaagagcatcctcaatagactcactcccccttccttggtctccacgggccccgtggactgagggctgcattggggtcttctgcctaggggaagtgctggacctgagctggagccacttggcttagaagccacaggattcacttttcactggcctttgcagtccccaaaggatcaggtctcagaaccaaggctccaaaggctgaggtctccccagttcctcctctcagaactcccacagtagctcagaggccgggggtcctgccaactttcatttggaaagttctttcgaacatctaaactagatctatcttagggtttctttctctcctagataggatcagctcccagccctagccattaggctgctggtcctggcgggggatggggtcccctcgttacccagtccttcccagggacccaacttcctaacacaacctggcttggacatgaagaccctcccccaggttaccttgtaaagagtcctccagagctgggatcccatgggcgcagcagcacacccagctcccatggcgtcactccctagctctgtcccagcttttgctatcattgctgacttttcctcctgtggctcattctgtccctgccctttgaaaacctaaaataccaagggtgtcatgctggcaactccctgcccagtcctgcacaaagccttggctgtgtgtggcaccccttgcctcctaccccagagcagctggctccattggcttctccctgcaccagccctgtcctcaggggtcaggaaaaagcagcacagctttctttcctctcctccagaggcctggaagggaggtggaggtccagtaagggcctggctgccttggatttcttggtcctgccttgccaactgcaccctgtagctcctgctccctgtgaccccagaaccagaggtgctgccttccctgtctcctagacaaagcacaaagggatgccctgcttggcttgagcctgcccaactgaaggattttctctgccccagggaccttccatccctgaatacaaggctctaggcaacttctctctgggtggtacacactagaatgcctggcattagccctagaaaggaggttggggtgtatgggtagtgagctagggtgggagaaaggtggtgctgaaaggacagatgctagttgtagtttcactcactcattcattcattagtgcaacagtactgagcaccacctgcactagaggcagaggggtgaacaagatacccttctgcctggggggacgtccacttcccatgggtttggctatttccaggaaagcccctcagtcctccaccctgttctggctgtgtgtgaaggatgtgtgtgagcaggcccaatcctttgcagcaagaatgagaggtcagagtattccattgcacacgcaccctggggctgacagacttgtgccccctagccttcatgcatgcccaagcactggcagctttgcagcccctgccccaccagccccttgacgctcttcttttgttctctcctcggggatgagctctgctgctgagtagggagcttttgcttgctgggaggctctatgcatggatttttttggtgaccatacagctagggctgaggatgggaacagggacagagggcctggctatccctagaagcacttcatccatctttacccacccaaacgggatcccttcacatctcatacccagtaagatgcaagaaaggaatatctgagagcaagcagccctgctccaggggccccaggtatgtgtagaggcccagtgggggtggccacttggtgtttctaccaccccctgccatccagtctggccccagtacctacctgggaggttggtgtacttggcttaagtacttcatgctttattcaggctgcttccccacagcaccggcaggaaatgaaggtgcacttatatgcatccctgcaggaataaagagtgggtggcctgcccagcccagcaccacagcctttccccagccaggagagaccacctaaggatcaaggcagctcctgttttcttggttctgtgacactcgagtctgagccagcccctcaggaattgcctcaaaagagaaaaacaaaaaaaagtcctccttcccaaggcctgctactccaaggtttggctccatcccttgcctttgggtcctgcctatttccccactcctggtctcttatctttggggccaccagtggggagtcacccgggccccaatccctctaaggcgctaagttgaaggaggccttcccagagtgactattggtgccaaagtcccagttcctgttggacttggggtaaaaacaggagatggtgagtgggtgtaaggcccaaatgcccagagaagttaactcgaacccatgggacctgtcccagcctgtcagtccctgatgagtgtaacttccttcccctgggggcctggcccttctctccaacccagtggccatgctttctcacccagccttgtgcccggcctgcatttctgtatatattgctgtgtattgtgtgtatgtatgtattcctggacaagtgtgttcatctgcagcccttgcctgaggataaggtttaggattgggtaaagatcagaataccagggccagctaaggcaacgactccctccccaaacccttgggacctcagccagtcccaaggctgccctgacaatcaggcaggctccccaccgtgaggccaagcctcctctgccactgccagcatggcccaagggaggcttggccttgggcttgccagcctcagctctgccctgacaagggtcttgtatccagggcagaggcctgaggtgacccaggcttgctttgtggctgatgccagcaggcttggttctagtgggcaccactggtgggcaacctccataactggcccttaggccctaccttcctacacagctaggctataatgggcctgagtgagagggtagcttccccagccccaagcacaggcagaggggtggagagcaatttttggttttatttttgtttctgaagtggtgcctgtacctccagcccccagggggccttccctggccacacttctctgccccacccaggcatcgccatcccagcactttgctccatgtcacccgtaagatgccctttgctgaatgtacctgagtgtatgtatttaaaaggactcacatgggcatcagagaatttatggctctgtatccaataaaaaagatggtgaaactggtctatctgccccagagaggt

SEQ ID NO: 1779 - DNA, 2345 bp, Homo sapiens
ctcgagacgcagccgccgtcggccgagcgcccggctagaagcgacaccagacggagcctccggagttcctccgcccccacctcgccgggtcctggagccgcagtcctcccagctgccctcctcgtggccatggagtgtccacacctgagctccagcgtctgcattgctccggactcagccaagttccccaacggctccccgtcgtcctggtgctgcagcgtgtgccggtccaacaaaagcccttgggtctgtttgacttgttcaagtgtccactgtggaaggtatgtgaatggccatgcaaaaaaacattatgaagatgcacaagtacctttaaccaaccataagaaatcagaaaagcaagataaagttcagcacacagtatgtatggattgcagtagctacagtacatactgttatcgctgtgatgattttgtggttaatgacaccaagctgggactggtacagaaagtcagagaacacttacagaacttggaaaactcagctttcacagctgacaggcataagaaaagaaaacttttggaaaactcaacactaaacagcaagttattaaaagtaaatggaagcaccactgccatttgtgccacaggccttcggaatttggggaacacatgtttcatgaatgccatccttcagtcactcagtaacattgagcagttttgctgttatttcaaagaactgcccgccgtggagttaaggaatgggaaaacagcaggaaggcggacataccacaccaggagccaaggggataacaatgtgtctttggtagaagagtttagaaagacactctgtgctttatggcaaggcagccagactgcatttagcccagagtccttattttatgttgtttggaagattatgccaaactttaggggctatcaacagcaggacgcccatgaattcatgcgctaccttttggaccacctacacttggaacttcagggcggtttcaacggtgtttcccgctcagcaattctgcaggagaattctactctgtctgcaagtaacaagtgttgcataaatggagcatctactgttgtcacggctatattcggaggcattctccaaaatgaggttaactgcctcatatgtgggacagaatctagaaagtttgatccattcctagacctttcattagatattccaagtcagttcagaagtaagcgctctaagaatcaagaaaatggaccagtttgttcgttacgagattgtcttcgcagttttaccgacttagaagaacttgatgagacagagttatatatgtgccataaatgcaaaaagaaacaaaagtccacaaaaaagttttggattcaaaaactacccaaggtgctatgcttacatttgaaaagatttcattggacagcatatttaagaaataaagttgatacatacgtagaatttccactgagaggcctagacatgaaatgctacttactagagcctgagaacagtggcccggagagctgcctgtatgacctcgccgctgtggtggtgcaccatggttccggggttggttctggacattacacagcatacgcaactcacgaaggccgctggttccacttcaatgacagtactgtaacactgactgacgaggagactgtggtgaaggcgaaggcctacatccttttctacgtggaacaccaggccaaagctggatcggataaactttaatacctcctccaaatcatcattcaccaaccataccagagaaacatttccagttttccacaaatacttgatacaagatttaatttcattatgcacttttcaatttcctattttggatttagttttgtcaatggtagtgacttactgaacatgggcaccaactaattttgttgttgttctaccagaaaacctcagcagatgttttgatttgctgctttagttgtaataattcaatttttataggtagttgtaagaacttagtcttatttgacttttttattttatgttaatgttttcagttctcactttgaggcacatttacatcaatgcttttgttcctctcacatgctgaaagcaagatgtgttccttattgtgaagagcgacacaactgcctgctgcctttccacagctataatggacatcaggttgactctaaatcaaggatcatgtgtgcacaatacttgtggcccacaaaatttcacaatgactgctgaggaatcattctttttgcctgtaaaatataacaaagggcatcattaagtagaccaggtaattactgcttgtctctcaaggctgctgtctttatcagcactaactaaataaatttgttggttcagttgtacttgtcctgcaaatacaaaaaaaaaaaaaaaaa

SEQ ID NO: 1780 - DNA, 9895 bp, Homo sapiens
gggaggtggctgccgggtgggaggtgtgtgcgcgtgtgccgcgccgtagggagcggcgggtcgcgccgccggctgtcagctagctccgcgccgccgcccgatggcgcgaggaggcgcgcgggcccagccccggggggccggccgcgggtgagcccctcggcctgccgcccgcgagcatgtcacctccagccgccgccgccgcagcctccgccagccgcgcccgcgcccccgcctcccgcagccgcagccgctgcctcgggcattggcccccagacccccgcctctgatccacgcccagaccctagctccagagggccatggccggccagggggactgctgcgtcaaggtggccgtcaggatccggccccagctgtcgaaggagaagattgagggctgtcacatctgtacctctgttaccccgggagagccccaggtcctgctggggaaggacaaggccttcacctatgactttgtcttcgacctggacacctggcaagaacagatctattccacctgtgtgagcaagctcatcgagggctgcttcgagggctataatgccacggtgctggcctatgggcagacgggggccgggaagacgtacaccatgggcactggctttgacatggcaacgtcggaggaggagcagggcatcatcccgagggccatcgcacacctctttgggggcattgccgagcgcaagcgccgggcacaggagcagggcgtggctggacctgagttcaaagtcagcgcccagtttctggagctctacaacgaggagatccttgacctgtttgacagcacccgtgaccctgacacccgccaccgcaggtccaacatcaagatccacgaggacgcaaacggtggcatctacaccactggcgtcacttctcgcctcatccactcccaggaggagctgatccagtgcctgaagcagggggccctgtcccgcaccacagccagcacccagatgaacgtgcagagctcacgctcccacgccatcttcaccatccacctgtgccagatgcgcatgtgcacccagcccgacctggtgaatgaggcggtgactgggcttcctgatggtacacctccctcgagtgagtatgagacactcactgctaagtttcactttgtggacctggccggctcagagcggctgaagcggacaggggctactggcgagcgggccaaggagggcatctccatcaactgtggcctgctggccttgggcaatgtgatcagcgccttaggggaccagagcaagaaggtggtgcacgttccctacagggactccaagctcactcggctcctccaggattcgctggggggcaacagccagaccatcatgatcgcctgtgtgagcccctcagaccgagatttcatggagaccctcaacacactcaaatatgccaatcgggcccgcaacatcaagaacaaggtggtagtgaaccaggacaagaccagccagcaaatcagtgcactgcgggctgagattgctcggctgcagatggagctgatggagtataaggcgggcaagcgagtgataggagaggatggcgctgagggctatagtgatctgttccgagagaatgccatgctacagaaggagaatggggccctgcggctgcgggtgaaagccatgcaggaggccatcgatgccatcaacaaccgcgtcacccagctcatgagccaggaggccaacctgctgctagccaaggccggcgatggcaatgaggccattggtgcgctgatccagaactacatccgggagatcgaggagctacggactaagcttctagagagtgaagccatgaacgagtccctgcgccgcagcctctcacgggcctcggctaggagcccctactccctgggtgcttctccagccgccccggccttcgggggcagccctgccagctccatggaggatgcctcggaggtgatccgcagggccaagcaggacctggagcggctaaagaagaaggaggtcaggcagcggaggaagagccccgagaaggaagccttcaaaaagagggcaaaactccaacaggagaacagcgaggagacggatgagaacgaggcggaggaggaggaggaagagcgagacgagagtggctgtgaggaggaggaagggcgcgaggatgaagatgaggactcgggcagtgaagagagcctggtggactcagactcagaccccgaggagaaggaggtgaacttccaggcggacctggccgacctgacttgtgagatcgaaatcaagcagaagctgatcgacgagctggagaacagccagcggcggttgcagacgctcaagcaccagtatgaggaaaagctgattctgctgcagaacaagatccgagacacacagctggagcgcgaccgtgtgctgcagaacctcagcaccatggagtgctatactgaggagaaggccaacaagatcaaggcagactatgagaagaggctgcgggagatgaaccgggacctgcagaagctgcaggccgcccagaaagagcacgcccggctgcttaagaaccagtcgcgctacgagagggagctgaagaagctacaggccgaggtggctgagatgaagaaggccaaggtggccctgatgaagcagatgcgtgaggagcaacagcggcggcggctagtggagaccaagaggaaccgggagatcgcacagctcaagaaggagcagcggcgacaggagtttcagatccgagctctggagtcccagaagcggcagcaggagatggtcctgaggaggaagacccaggaggtttctgcactgaggcgcctggccaagcccatgtctgagcgggtggcagggcgtgcaggactaaagccacccatgctggactctggggctgaggtgtcggccagcactacctcatctgaggctgaatcaggggcccgctctgtctccagcatcgtgcgccagtggaaccgcaaaatcaaccacttcttgggggaccatcctgcgcccactgtcaatggcacccgtcctgcccgaaagaagttccagaagaagggggccagccagagcttcagtaaggcggcaaggctcaagtggcagtccctggagcgacggatcattgacatcgtcatgcagagaatgaccattgtcaacctggaggctgacatggagcggctcatcaagaaaagggaggagctgttcctcctgcaggaggcactgcggaggaagcgggagcggctgcaggctgagagccccgaggaagagaaggggctgcaggagctggctgaggagatcgaggtgctggcagccaacattgactacatcaatgacggcatcaccgactgccaggccaccatcgtgcagctggaggagaccaaggaggagctggactccacagacacatccgtggtcatcagctcctgctccctggctgaagcccgcctcctgctagacaacttcctcaaggcatccattgacaaggggctgcaagtggcacaaaaggaagcccagatccggctgttggagggccgactgaggcagacggatatggcaggctcctcccagaaccatctgctcctggacgccctgcgtgagaaggctgaagctcaccccgagctgcaggccctcatctacaatgtgcagcaggagaatggctacgccagcacagatgaggagatctcagagttctctgagggcagcttctcccagtcattcaccatgaaaggctccaccagccatgacgatttcaagttcaagagcgagcccaaactgtctgcccaaatgaaagctgtgtcggctgagtgcctgggccccccactggatatctccaccaagaacatcaccaagtccctggcctccctcgttgagatcaaagaggacggagtgggcttctctgtccgagacccctattaccgggacagggtctcgcgcaccgtcagtctgcctacccggggcagcactttccctaggcaatctcgagccacagagacgtccccgctgacgagaaggaagtcctacgaccgagggcagcccattaggtccacagatgtgggattcacacccccatcatcccctcccactcggccccgcaatgaccgcaatgtcttctctcgtctcaccagtaatcagagccaggggtcagcgctggacaagggcatcatctccccggttggaggagccaagggtgcacggacggccccactgcagtgtgtctccatggccgaaggccacaccaagcccatcctctgcctggatgccacagatgagttgctattcacagggtccaaagaccgaagctgcaagatgtggaacttggttacgggacaggagatcgcagctctaaagggccaccccaacaacgtggtctccatcaagtactgcagccactcggggcttgtgttctccgtgtccacctcctacatcaaggtgtgggacatccgggactcagccaagtgcattcggactctcacgtcctcgggccaggtgatctcaggggatgcctgtgccgccacatccacccgtgccatcaccagtgctcagggcgagcatcagatcaaccagatcgccctcagcccttcgggcaccatgctgtacgccgcctcgggcaatgccgtccgcatctgggagcttagcaggttccagcctgtcggcaagctgactggccacatcggccctgtgatgtgcctgacggtcacccagacggccagccagcatgacctcgtggtgactggctccaaggaccactacgttaagatgttcgagctgggcgagtgtgtgacgggcaccatcggccccactcacaacttcgagcccccgcactacgatggcatcgagtgtctcgccatccagggagacatcctgttcagtggctcccgagataacggcatcaagaagtgggacctagaccagcaggagctcatccagcaaatccccaatgcgcacaaggactgggtgtgcgccctggccttcatcccgggccgccccatgctgctcagcgcctgccgtgcgggtgtcatcaaggtctggaacgtggacaacttcacacccatcggtgagatcaagggccacgacagtcccatcaatgccatctgcaccaatgccaagcatatcttcacagcctccagtgactgccgggtaaagttgtggaattacgtccctggactcaccccctgccttcctcgccgagtcctggccataaagggccgcgccaccaccctgccctgaccctccccaactctccctgtctcctctttcattcttcccctctttccttttccctctctttccccacttcgatctgagctgcttcttaacggtatgagattattttactccttcttcttcctttcccttcctgtcctgcctggcctagagaggtgccctgcctgtccctcctgcacccaccgtccttttccaagcatgaacagtgggacaggccccaggagatgggtgccagggagcagaagggggagccttcaggcctggacaaaacgaaacacccccccaaaaaaagaaaacccatgacaaagctcccctgggggcctctgagtgcacaggcctctccatctgcccagcaccccaccacctgcagtccacctccccgtaagccatgcttgcctcccagccccaaccacatttggggagtttggggaatccagttcatcctctacttttgggggcagccagccaagcccactgcaagagctgaccggcacccctccactttgtcctccaccccagtgacctgacggtgaagttctggagtgtccggcggttaccccacagcggcccaccctaggagtgaggtcagagggatgcccccggaccctcgaccccagcagcctggacaccatggaagggaagctgtgacccggccgatggggccagctgctctggggacagagggcgtggccccctctcctgccctcctccctctcccttggccttcccacaggacactgttccctcatccctcccctgcctctcaggagcctctgggtgagagagaggctggggaggaaattaagctgtgaagccaaagggcattatcccttcttgttcccctcctggcagtcgtggccacattgtctcctgctgaaccggctctgcccctttctcaggcctttggcccagtggtggagccctgtggggaggtgcagcagcctggccccatcccacccttccgaggagctggcctccccgcttctcccagcccagcctctagagccactgcacctgcctctgagcccaaaaagataagtcctcaggtagctaaggaaaccaggtgtgggcggctgggccttgcagctaacccttaaccctctggcaacccgcagatagccccaactggccccaacagttccctggggtcccttttggatggggccaaggtggagctgctagaaagattcctttggggagatggtcagaaatacttcagttatttattattttgttatttttattttttgctgttgcctcctggaaacggacttgaagtttcttcccctatattctttccctcagctcttgggggccagaaatcccaaagggagtccgctgccccggccctccagggccgcctcctctgtttgctttgcagaggagggaactgctccttcgactctgcagctcaggcctgtccccgacacagcccccagggagtcttctagctacccctggcctctaggccgcctgacgctcagtgccttcctccgttccggggcctggcacccgtgccgggcagccttacaccagccatgcccgcggcaccacatgtgtcttctcactcgcgaggtcttgtgcccagcgcccccgggaaggcgggggcgctcaccccacagcccaggccccggggttctgccccacagtcctgcgtgggccacgtaggaagcagcgtgggggctgtgtctgctgggaggtggcttggatggggaggacagcccggcaccctgacccccgcccctccccagccctgcagtcccccactgggccggggagtctctccagcttctctctctctggttattcaggagacacattttcggccttaaaactggcatggagcgcaggccctcccttgcagaaaattatcaaggaagagggagttggcagagtttctctgccccggggctggggacgcggagctccggggaaattgttaaatcagtgttctggcgccccctgttgggggaactctggaattacaggagtgggccttgggggggactgagctccatccctctcccccgccccacccccacccaaagttgcccaccctgtttttccgttgcatcgctggtcttgtgcttcccgcttcagtctgggagccaagagccagccccacctcccttcagaggacgcagtgacttttggactttccagaggtggttctgtgtttctgcccttggctcctctccgtcttgggctggggcacttggagccctctccatgtggcgcccagtgttggggggaggcaggctccagtggaggctgagtgaggcctggtcccttccccgtgccctcctcggagctgccacagaggctaagacggctgtcctgctggtgctggccctgctggatgtggtattgaagtctggggcagctgatagcaggaaggagacccccttggatgctggtctcctgggacctgaacagtctgtcagcaatggctggaaatccttcttcctctggccaccccgggggtgccgggcaacccccttagctctaagatgtggccacaaatctcttcccactcctccccgccaacctgaacagaaagttttgaccttgcaacctgtaagaaagaatccgtccgcatgactgtttacaagcgatagaaacacgtaagactctgtccccttgagctcccacccccgggccggggatgccccacctggggtgactgcactgtagctgcaaggcgtgttcttgcacgaagtgtgatcttatggccctgcgagaggtgctcatcatcatgcccattttctgctgtttctgatgggtcagctacctcacggcggggtcagctctgctgtcctggcaagtgtcattgactctctaaacttgaagtccttcaggagccctgagcccaacatccatgagacaccccgagttgtgcttcatgagagttggattctctgcccactctttcagggatgtccaaggtccatgttagggggcaggcccccagctccactcactgcacaagcaccctaaatgttggaagcacaaaatggttgtgatttgagcacaatggcagggtcccgcaggcagacttgacaggcccaggcccgggaggatccccccacgttggctctgtccaaagtgagattgggggtgcctgtgtctgggacagggggctgcccttgctcagaccaggccttggctcatggcttgtcctaattctgggactcgtcatcttacttcttgcccttctgtgcccatcttaagactggaggctgagccttgtcaggcccagccacatctttacgccatgggaccaggagtaaagcgctctctaaaccccgcaccccaaatctctaaacgcctgagttcaggctgagtcctagccctagtgagcctgaagagcttggactgattcccagtctcctgggtcaagccccactttgtgctttcgaagcttatgagcgggttccctggatagaaggagtcttccatccccactgcccttgggcctcttcagcatagtcctgtgccagggccctgtcctcactatcagtcagttcagtatttgctttcacgtgagtggcggactcttctgaagcagccagaactctcaaaggcagcgcatggagttgccttgcgagatttccaaggaaggaggaaagattaacaggcggagcctggcacacccaagcctttgaggtggtcagagtgccaccttcagccccttgggaagggacagcggtgggtctgggagtggcctcaccctggattcagcctaggaatctcttcaccctcagctgtccagccctgctgcctgtctggggatgtgtggcctgggcagagggcagtttaaagcacaaaaccacatggggaaaacacaaggttgcggggactttctcatgtgcctgatgtggtggagggagacaccagcaggtggctgcagtgacgttagggaacataacacttctttgccctgctagctctcagctctggggggcatcccccgatgtggtctgggctgggagcaggcatatcccctggttgttgcctgtgcctggtctgttcaccatcgtgtttgtgtgggcagagcctgccctgcaggagcagtgactttcttcccactgtgtgtcccggacctgtggtatgtgtccctttgccatcccaaacaggcaactgcttgctgctctccttgcttggcatagcctcctggtcagtggccaatgccccacaggccttcctgggcctggccctcctctcctgactcccagatccttccctgccctcttgtgtgcaaggacagattttgcagggaaagttctgtttcttctttgatacctttgttctgtcccctgccccatccccagcactcatgatcttgaagcccctatcacactctagttcagtcctgtgaaccatgtcctgagggccttgcagggaagtaggaaatagaaactcctccacaaagagccgaggatcagagaagacccctgagatgaatcagggccctgccctgcccaccaactcttttctagcaatcatgtcctgcccaggctgcaggcttcattaggctcctgctgtcctccatgatgtgactagcacaaggtgtatatatgttttgtacctctgccgatggctgtacatagtgtatgaaagttatttaagccccatgttgtacatttctgttcctagattggatgtgtgtgttctaagaagttgtcataaataaaacctgaatgacc

SEQ ID NO: 1781 - DNA, 581 bp, Homo sapiens
ccgagaggtggttacattcgttgaaggacaccagctgcggaatttgcggctttggcagacccagctgagtcactgtcactgcctaccaatctcgaccggacctcgaccggctcgtctgtgctgccaatcgactcggcgtggcgtcggtcgtggtagataggcggtcatgcatacgaattttcagctcttgttctggtgaccttttgaatacgtcttgtctataaaagaaattcatgcctttgtaaaatacacagattgaaatcatggcaggtccagaaagtgatgcgcaataccagttcactggtattaaaaaatatttcaactcttatactctcacaggtagaatgaactgtgtactggccacatatggaagcattgcattgattgtcttatatttcaagttaaggtccaaaaaaactccagctgtgaaagcaacataaatggattttaaactgtctacggttcttaacctcatctgttaagttcccatgcctggagaagctaatgccaactcatcatgtgataattcaatttgtacaataaattatgaacccaaaaaaaaaaaaaaaaaaaaaaaaaaa

SEQ ID NO: 1782 - DNA, 818 bp, Homo sapiens
ccacgcgtccggcggggagccgggagcacggtggagcggtggagggcgtcactgggtttcggcgtctggcaagcggttcagctgtctgctccctagcagccggccttcgggtcgggcgtctccgccggctactgccgcttcagttctcccggtgtggccacgagtcgggttgcactgctgtgatccatcctcatctcctaaagatgcatcctgacttatctccacacttgcacactgaagaatgcaacgtcttgattaacttgcttaaggaatgtcacaaaaatcacaacattctgaaattttttggttattgtaatgatgttgatcgggagttgagaaaatgcctgaagaatgagtacgtagaaaacaggaccaagagcagggagcatggcattgcaatgcgaaagaaactttttaatcctccagaggaatccgaaaaataaattgtattttcactcgatgccttggctgagagaagacctaaagactctgggttgatacctgaaagaatcctgtcttatttggtctccataatcctttgaatggaaagtgacctgtgagagattgaaccatggagaaatatgaaaaccctggattctgagtatttgttgggcagggcgtttagtactgtctcccctttaccagcaaacctgacttcaccatgtttattccctttgcctacaaccagttaatatctgagtaacttatctccttcaatataataatttaaataaaaaaaaaaaaaaaaaaaaaaaaaaaaaaaaaaaaaaaaaaaaaaaaaaaaaaaaaaaaaaaaaaaaaaaaaaaaaaaaaaaaaa

SEQ ID NO: 1783 - DNA, 5097 bp, Homo sapiens
ctgcaggaaggagagaggaagaggagcagaagggggcagcagcggacgccgctaacggcctccctcggcgctgacaggctgggccggcgcccggctcgcttgggtgttcgcgtcgccacttcggcttctcggccggtcgggcccctcggcccgggcttgcggcgcgcgtcggggctgagggctgctgcggcgcagggagaggcctggtcctcgctgccgagggatgtgagtgggagctgagcccacactggagggcccccgagggcccagcctggaggtcgttcagagccgtgcccgccccggggcttcgcagaccttgacccgccgggtaggagccgcccctgcgggctcgagggcgcgctctggtcgcccgatctgtgtagccggtttcagaagcaggcaacaggaacaagatgtgaactgtttctcttctgcagaaaaagaggctcttcctcctcctcccgcgacggcaaatgttctgaaaaagactctgcatgggaatggcctgccttacgatgacagaaatggagggaacatccacctcttctatatatcagaatggtgatatttctggaaatgccaattctatgaagcaaatagatccagttcttcaggtgtatctttaccattcccttgggaaatctgaggcagattatctgacctttccatctggggagtatgttgcagaagaaatctgtattgctgcttctaaagcttgtggtatcacacctgtgtatcataatatgtttgctttaatgagtgaaacagaaaggatctggtatccacccaaccatgtcttccatatagatgagtcaaccaggcataatgtactctacagaataagattttactttcctcgttggtattgcagtggcagcaacagagcctatcggcatggaatatctcgaggtgctgaagctcctcttcttgatgactttgtcatgtcttacctctttgctcagtggcggcatgattttgtgcacggatggataaaagtacctgtgactcatgaaacacaggaagaatgtcttgggatggcagtgttagatatgatgagaatagccaaagaaaacgatcaaaccccactggccatctataactctatcagctacaagacattcttaccaaaatgtattcgagcaaagatccaagactatcatattttgacaaggaagcgaataaggtacagatttcgcagatttattcagcaattcagccaatgcaaagccactgccagaaacttgaaacttaagtatcttataaatctggaaactctgcagtctgccttctacacagagaaatttgaagtaaaagaacctggaagtggtccttcaggtgaggagatttttgcaaccattataataactggaaacggtggaattcagtggtcaagagggaaacataaagaaagtgagacactgacagaacaggatttacagttatattgcgattttcctaatattattgatgtcagtattaagcaagcaaaccaagagggttcaaatgaaagccgagttgtaactatccataagcaagatggtaaaaatctggaaattgaacttagctcattaagggaagctttgtctttcgtgtcattaattgatggatattatagattaactgcagatgcacatcattacctctgtaaagaagtagcacctccagccgtgcttgaaaatatacaaagcaactgtcatggcccaatttcgatggattttgccattagtaaactgaagaaagcaggtaatcagactggactgtatgtacttcgatgcagtcctaaggactttaataaatattttttgacttttgctgtcgagcgagaaaatgtcattgaatataaacactgtttgattacaaaaaatgagaatgaagagtacaacctcagtgggacaaagaagaacttcagcagtcttaaagatcttttgaattgttaccagatggaaactgttcgctcagacaatataattttccagtttactaaatgctgtcccccaaagccaaaagataaatcaaaccttctagtcttcagaacgaatggtgtttctgatgtaccaacctcaccaacattacagaggcctactcatatgaaccaaatggtgtttcacaaaatcagaaatgaagatttgatatttaatgaaagccttggccaaggcacttttacaaagatttttaaaggcgtacgaagagaagtaggagactacggtcaactgcatgaaacagaagttcttttaaaagttctggataaagcacacagaaactattcagagtctttctttgaagcagcaagtatgatgagcaagctttctcacaagcatttggttttaaattatggagtatgtgtctgtggagacgagaatattctggttcaggagtttgtaaaatttggatcactagatacatatctgaaaaagaataaaaattgtataaatatattatggaaacttgaagttgctaaacagttggcatgggccatgcattttctagaagaaaacacccttattcatgggaatgtatgtgccaaaaatattctgcttatcagagaagaagacaggaagacaggaaatcctcctttcatcaaacttagtgatcctggcattagtattacagttttgccaaaggacattcttcaggagagaataccatgggtaccacctgaatgcattgaaaatcctaaaaatttaaatttggcaacagacaaatggagttttggtaccactttgtgggaaatctgcagtggaggagataaacctctaagtgctctggattctcaaagaaagctacaattttatgaagataggcatcagcttcctgcaccaaagtgggcagaattagcaaaccttataaataattgtatggattatgaaccagatttcaggccttctttcagagccatcatacgagatcttaacagtttgtttactccagattatgaactattaacagaaaatgacatgttaccaaatatgaggataggtgccctagggttttctggtgcctttgaagaccgggatcctacacagtttgaagagagacatttgaaatttctacagcaacttggcaagggtaattttgggagtgtggagatgtgccggtatgaccctctacaggacaacactggggaggtggtcgctgtaaaaaagcttcagcatagtactgaagagcacctaagagactttgaaagggaaattgaaatcctgaaatccctacagcatgacaacattgtaaagtacaagggagtgtgctacagtgctggtcggcgtaatctaaaattaattatggaatatttaccatatggaagtttacgagactatcttcaaaaacataaagaacggatagatcacataaaacttctgcagtacacatctcagatatgcaagggtatggagtatcttggtacaaaaaggtatatccacagggatctggcaacgagaaatatattggtggagaacgagaacagagttaaaattggagattttgggttaaccaaagtcttgccacaagacaaagaatactataaagtaaaagaacctggtgaaagtcccatattctggtatgctccagaatcactgacagagagcaagttttctgtggcctcagatgtttggagctttggagtggttctgtatgaacttttcacatacattgagaagagtaaaagtccaccagcggaatttatgcgtatgattggcaatgacaaacaaggacagatgatcgtgttccatttgatagaacttttgaagaataatggaagattaccaagaccagatggatgcccagatgagatctatatgatcatgacagaatgctggaacaataatgtaaatcaacgcccctcctttagggatctagctcttcgagtggatcaaataagggataacatggctggatgaaagaaatgaccttcattctgagaccaaagtagatttacagaacaaagttttatatttcacattgctgtggactattattacatatatcattattatataaatcatgatgctagccagcaaagatgtgaaaatatctgctcaaaactttcaaagtttagtaagtttttcttcatgaggccaccagtaaaagacattaatgagaattccttagcaaggattttgtaagaagtttcttaaacattgtctgttaacatcactcttgtctggcaaaagaaaaaaaatagactttttcaactcagctttttgagacctgaaaaaattattatgtaaattttgcaatgttaaagatgcacagaatatgtatgtatagtttttaccacagtggatgtataataccttggcatcttgtgtgatgttttacacacatgagggctggtgttcattaatactgttttctaatttttccatagttaatctataattaattacttcactatacaaacaaattaagatgttcagataattgaataagtacctttgtgtccttgttcatttatatcgctggccagcattataagcaggtgtatacttttagcttgtagttccatgtactgtaaatatttttcacataaagggaacaaatgtctagttttatttgtataggaaatttccctgaccctaaataatacattttgaaatgaaacaagcttacaaagatataatctattttattatggtttcccttgtatctatttgtggtgaatgtgttttttaaatggaactatctccaaatttttctaagactactatgaacagttttcttttaaaattttgagattaagaatgccaggaatattgtcatcctttgagctgctgactgccaataacattcttcgatctctgggatttatgctcatgaactaaatttaagcttaagccataaaatagattagattgttttttaaaaatggatagctcattaagaagtgcagcaggttaagaattttttcctaaagactgtatatttgaggggtttcagaattttgcattgcagtcatagaagagatttatttcctttttagaggggaaatgaggtaaataagtaaaaaagtatgcttgttaattttattcaagaatgccagtagaaaattcataacgtgtatctttaagaaaaatgagcatacatcttaaatcttttcaatta

SEQ ID NO: 1784 - DNA, 1198 bp, Homo sapiens
ggtggagcaccatggaaggcgactgtctgagctgcatgaagtatctgatgtttgtattcaatttcttcatatttctgggcggggcctgcctgctggccatcggcatctgggtcatggtggaccccaccggcttccgggagatcgtggctgccaatcctctgctcctcacgggcgcctacatcctcctggccatggggggcctgctctttctgctcggcttcctgggctgctgcggggccgtccgtgagaacaagtgtctgctgctatttttcttcctgttcatcctgatcatcttcctggcagagctctcagcagccatcctggccttcatcttcagggaaaatctcacccgagaattcttcaccaaggagctcaccaagcactaccagggcaataacgacacagacgtcttctctgccacctggaactcggtcatgatcacatttggttgctgcggggtcaacgggcctgaagactttaagtttgcatctgtgtttcgactcctgaccctggatagtgaagaggtgccggaggcctgctgccggagggaaccccaaagtcgggacggggtcctgctgagccgggaggagtgcctcctgggaaggagcctattcctaaacaagcagggctgttacacggtgatcctcaacaccttcgagacctacgtctacttggccggagcccttgccatcggggtactggccatcgaggaagaaagagctcattctgtctcacaagccaccggcatcctgtatcagcttccagcctcccctcaggctttccagtcaccagggacactcggagccacagcctagagccccgtgttccctggcctgtgcgtctgcccccttctgagatgcagccagaagctctgtgcctgctgcaaagattcaggtggaccctcctctaatctcctcctgctgtgcccgccagtccttgccctcccaccaggtctctgagctcagtcttaccaaattcgccctttaacagcttgctctggcaaccccataaatgacacctgagctccgtagaagctaagctcctgagacccagggggacctgccactggtaccgcggcccagcctggggcctgggggctgcccctcttgaaccacccacatgcttagccccagctttttggaagaggcaaatggctggtctgaggatgacacacaaaaacaaaaaaaaaaaaaaaaaa

SEQ ID NO: 1785 - DNA, 3063 bp, Homo sapiens
gtggaaagaggtgagcatctcctggaccaccctcaagcttcaggtgagctgagcttctaacactaccatcaaagcaactggaaccccttgaatttgatttctggagacgcgagcataatccttttgcagacatctcaacgctggctctccaggtggagcaccatggaaggcgactgtctgagctgcatgaagtatctgatgtttgtattcaatttcttcatatttctgggcggggcctgcctgctggccatcggcatctgggtcatggtggaccccaccggcttccgggagatcgtggctgccaatcctctgctcctcacgggcgcctacatcctcctggccatggggggcctgctctttctgctcggcttcctgggctgctgcggggccgtccgtgagaacaagtgtctgctgctatttttcttcctgttcatcctgatcatcttcctggcagagctctcagcagccatcctggccttcatcttcagggaaaatctcacccgagaattcttcaccaaggagctcaccaagcactaccagggcaataacgacacagacatcttctctgccacctggaactcggtcatgatcacatttggttgctgcggggtcaacgggcctgaagactttaagtttgcatctgtgtttcgactcctgaccctggatagtgaagaggtgccggaggcctgctgccggagggaaccccaaagtcgggacggggtcctgctgagccgggaggagtgcctcctgggaaggagcctattcctaaacaagcagggctgttacacggtgatcctcaacaccttcgagacctacgtctacttggccggagcccttgccatcggggtactggccatcgagcttttcgccatgatctttgccatgtgcctcttccggggcatccagtagagggtatggcctgaagcctgaagactcgccccacccaccactgcccagcacccaatgtcctcccgtgcccctccccgctgtcctcttggccccaggggagaagatgaggccatcagagatggccaggagaagggccaggggaatagagctatttttttaacaaaacaaaatgaagacaaaaatatggactgatgtatcctcgcctggactcagggcaggtgccgtgggttctccagagaccccagcacctggcccaggatgcaggctgctctagagaccaaaggaacaccaggcccagcgccctctttggtccagccagaccctgggccctctctcctcactgcaccaggacctgatgccaagaaagtgaggatttaggcaacaaggaggcaaaagcaaatctcagagaagtcatcaaagcccaggggctgcacggagattcagctgccatgtctttgaggactcggaacccacagcgcaatccctggtccactggaggatggactgttccccccttcaggccggggccaagagtgagctgctaacacggcatccaagaatggcccagctggtaggatccttgctttccccatctgttggaccaaataatctcaaaggcccagagaggacagtgaccatccacagacacacagcacaggcgtgacagttctgaaaagaagctgagttgtctccaggctgctgtcactgcatccaggactctgtcagctctgctgcccacatgcacccctggcctcagcatcccggttcccccagacaagagagggcaagtcagccaggaactgcctcctccctgctctacagctaagaaaacaccattccatgacttcccaccgcgccctcgctcctacctccccacacctctctctcagtccccaggaacacacagaggtgcacatcacattcccttgtccacactgcccgcctctcccacatgccacccccttccctgtccttccccaactccccagctccaagagtggaagaaatccccaagatcatctgggtctccctctccacacccagaactgaggcttggatatcttcttcaacatccttgccaagacttctccaccctcttgcatacctccagggacagagagcttactacctcccaaggcagcctcctgcctttggactgctctgactttagcatcagcttaatacacagaagaggtttctgtttttctgtggctctgtccatggcatcccacttgcccactctccttcctggagtgttgaggtcacacattgactcccctgagccctcttctctccaggctaaagaatcccgaaggcatcgaggccatttctgctgcaacaaggtttcctgtctcttcactgtccgcacatttcttagtattccctccaggcttgggcagggagactcgcagatgcacacccacaagtattcagttctcaaactctagacgagtgttggcaactggattgcaagatgctcctaccctgatagatcaggggtggctgctggaggctgtgctggggatctgaggtttggtctgggctcagtgggagatggcagtgcaatcctgatgagtgatgtctgccaggcaccgtaagtttgattagtgatgtctgccacgggcagggatggaaggagcagtgtgatgtctgctctcttctctcccctctgtccctcttcaggaagaaagagctcattctgtctcacaagccaccggcatcctgtatcagcttccagcctcccctcaggctttccagtcaccagggacactcggagccacagcctagagccccgtgttccctggcctgtgcgtctgcccccttctgagatgcagccagaagctctgtgcctgctgcaaagattcaggtggaccctcctctaatctcctcctgctgtgcccgccagtccttgccctcccaccaggtctctgagctcagtcttaccaaattcgccctttaacagcttgctctggcaaccccataaatgacacctgagctccgtagaagctaagctcctgagacccagggggacctgccactggtaccgcggcccagcctggggcctgggggctgcccctcttgaaccacccacatgcttagccccagctttttggaagaggcaaatggctggtctgaggatgacacacaaaaaca

SEQ ID NO: 1786 - DNA, 5354 bp, Homo sapiens
gccagcgatcagagcagcgctgggtgttcaggggccaagatggcggcgcgccggggacggagagacggagtcgcgccgcccccgagtgggggccccggtccggaccctggcgggggagcccgcggcagtggttggggaagtcgaagccaagcgccgtatgggactttgggcgctgtgagcggcggcgagcaggtgctgctgcatgaggaggcgggtgattctggctttgtcagtctctctcggctgggcccatctctgagggacaaggacctggaaatggaggagctaatgctgcaggatgagacactgctggggaccatgcagagctacatggatgcctcccttatctccctcattgaggattttgggagccttggagagagcaggttatctctggaggaccagaatgaagtgtcgctgctcacggctctgacggagatcttggacaatgcagattctgagaacctttctccatttgacagcattcctgattcggagctgcttgtgtcaccccgggagggctcctctctgcacaagctgcttactctctctcggacacccccagaacgtgacctcatcaccccagttgacccactggggcccagtacaggcagcagtagagggagtggggttgaaatgtctcttccagatccctcttgggacttctccccaccctctttcttagagacctcttcccccaagcttcctagctggagacccccaagatcaagaccacgctggggccaatccccacctccccagcagcgcagtgatggagaagaagaggaggaggtggccagcttcagtggccagattcttgccggggagcttgacaactgtgtgagcagtatcccggacttccccatgcatttggcctgccctgaggaggaagataaagcaacagcagcagagatggcagtgccagcagctggtgatgagagcatctcctccctgagtgagctggtgcgggccatgcacccatactgcctgcccaacctcacccacctggcatcacttgaggatgagcttcaggagcagccagatgatttgacactgcctgagggctgcgtagtgctggagattgtggggcaggcagccacagctggcgatgacctggagatcccagttgtggtgcgacaggtctctcctggaccccggcctgtgctcctggatgactcgctagagactagttctgccttgcagctgcttatgcctacactggagtcagagacagaggctgctgtgcccaaggtaaccctctgctctgagaaagaggggttgtcattgaactcagaggagaagctggactcagcctgcttattgaagcccagggaggtcgtggagccggtggtgcccaaggagcctcagaacccacctgccaatgcagcaccaggttcccagagagctcgaaagggcaggaagaagaagagcaaggagcagccagcagcctgtgtggaaggctatgccaggaggctgaggtcatcttctcgcgggcagtctactgtaggtacagaagtgacctctcaggtagacaacttgcagaaacagcctcaggaagaacttcaaaaagagtctgggcctctccagggtaaggggaagccccgggcttgggctcgggcctgggcagctgccttggagaattctagccctaagaacttggagagaagtgctggacaaagtagtcctgctaaagaaggccctctagacctctacccaaagctggctgacactatccaaaccaatcctataccaacccatctctcattggtcgactctgcccaagccagccccatgccagttgactctgttgaagctgatcccactgcagttggccctgttctagctggccctgtacctgttgaccctgggttggttgaccttgcttcaaccagctcagaactggttgagcctctcccggctgagccagtgctgatcaacccagtcctggctgactcagcagcagttgaccctgcagtggttcccatctcagataacttgccaccagttgatgctgtcccgtctggcccagcaccagttgatctagcactggttgaccctgttcctaatgacctgactccagttgacccagtgctagttaagtccagaccaactgatcccagacgtggtgcagtgtcatcagccctggggggttcagcaccccagctcctcgtggagtcagagtccttggacccaccaaagaccatcatccctgaagtcaaagaggttgtggattctctgaaaattgaaagtggtaccagtgctacaacccatgaagccagacctcggcctctcagcttatctgagtaccggcgacgaaggcagcaacgccaagcagaaacagaagagagaagtccacagcccccaactgggaagtggcctagccttccagagactcccacagggctggcagacatcccttgtcttgtcatcccaccagccccagccaagaagacagctctgcagagaagccctgaaacaccccttgagatttgccttgtgcctgtaggtcccagccctgcttctcctagtcctgagccacctgtaagcaaacctgtggcctcatctcccactgagcaggtgccatcccaggagatgccactgttggcgagaccttcccctcctgtgcagtctgtgtcccctgctgtgcccacacctccctcgatgtctgctgccctgcctttccctgcaggtgggcttggcatgccccccagtctgcccccacctcccttgcagcctcctagtcttccattgtctatggggccagtactacctgatccgtttactcactatgcccccttgccatcctggccttgttatcctcatgtgtccccttctggctatccttgcctgccccccccaccaacggtgcccctagtgtctggtactcctggtgcctatgccgtgcctcccacttgcagtgtgccttgggcaccccctcctgccccagtctcaccttacagttccacatgtacctatgggcccttgggatggggcccagggcctcaacatgctccattctggtctactgttcccccacctcctttgcctccagcctccattgggagagctgttccccaacctaaaatggagtctaggggcactccagctggccctcctgaaaatgtacttcccttgtcgatggctcctcccctcagtcttgggctacctggccatggagctcctcagacagagcctaccaaggtggaggtcaagccagtgcctgcatctccccatccgaaacacaaggtgtctgccctggtgcaaagtccccagatgaaggctctagcatgtgtgtctgctgaaggtgtgactgttgaggagcctgcatcagagaggctaaagcctgagacccaagagaccaggcccagggagaagccccccttgcctgctaccaaggctgttcccacaccaaggcagagcactgtccccaagctgcctgctgtccacccagcccgtctaaggaagctgtccttcctgcctaccccacgtactcagggttctgaagatgtggtacaggctttcatcagtgagattggaattgaggcatcggacctgtccagtctgctggagcagtttgagaaatcagaagccaaaaaggagtgtcctcctccggctcctgctgacagcttggctgtaggaaactcaggcggcgttgacattccccaggagaagaggcccctagaccggttacaagccccagaactggccaacgtggcagggctcacccctccagctacccctccccaccagttatggaagcccctggctgctgtctcactgctggccaaagccaaatctcctaagtccaccgcccaggagggaaccctgaagcctgaaggagttacggaggccaaacatccagctgcagttcgcctccaagaaggggtccatggccctagtcgagtccatgtgggctctggggaccatgactattgtgtccggagcaggacccccccaaaaaagatgcctgccctagtcattccagaggtgggctcccgatggaatgtcaagcgccatcaggacatcaccatcaaacctgtcttgtccttgggcccagctgcccctccgcccccatgcatagctgcctcccgggagccgcttgatcacaggactagcagtgagcaggcagatccctcagcaccctgccttgccccatccagcttgctgtcccctgaggcctcaccctgccggaatgacatgaacactaggactccccctgaaccctcagccaagcagcggtcaatgcgctgttaccgaaaagcctgcaggtcagccagcccctcaagccagggctggcagggccgccgaggccgcaacagccgttctgtcagctctgggtccaaccggactagcgaagcatcttcctcatcctcatcatcgtcttcctcatcccgatctcggtccaggtccctctcccccccacacaagaggtggcgaaggtccagctgtagttcctctggacgttctcgaagatgctcttcctcttcttcgtcatcatcttcctcttcgtcttcctcatcctcatcatccagttctcgaagccgctcacgatccccatccccccgccggagaagtgacaggaggcggcggtacagctcttatcgttcacatgaccattaccaaaggcaaagagtgctacaaaaggagcgtgcaatagaagaaagaagggtggtcttcattggaaagatacctggccgcatgactcgatcagagctgaaacagaggttctccgtttttggagagattgaggagtgcaccatccacttccgtgtccaaggggacaactacggcttcgtcacttatcgctatgctgaggaggcatttgcagccattgagagtggccacaagctgcggcaggcagatgagcagccctttgatctctgctttgggggccgaaggcagttctgcaagaggagctattctgatcttgactccaaccgggaagactttgacccagcacctgtaaagagcaaatttgattctcttgactttgacacattgttgaaacaggcccagaagaacctcaggaggtaaccttgggcccttccctgctatcctttttctcctttggaggtgcccaacctcctccacccccttcccctactctaggggagagagctgctagtgagatgactgttttataaagaaatggaaaaaagtgaaataaaaaatatgttgaatcagattttttaaaaggggtatttgtttttttataacaggtattgaaacaagttaacttgcattcctatgtaagataggaggggctgaggggatccccagtgtttggaacataagtcactatgcagactaataaacatcaactagagagaactcccaaaaaaaaaaaaaaaaaa

SEQ ID NO: 1787 - DNA, 4059 bp, Homo sapiens
ggggcgggccgggccggcttgggaggggacgcggagggggcgggccgggctgcgttcgctccagccgcggctctacagcagcgggcggcgggacccgggacccagcttggcgacggcgatctcgacgcgggcccccaggatctcccggcgccccacctctggagcagcccctgccgccagcgtcaggtccaccccggaatcccagggactctcggcgccgaacggacccgggccgggtgcaacggggtccccggactggagaagacgcgggtggcaccgtgcgagctccaggagccccgggtccactgcgaggcctcggggggcgcagacctgcagagactgcggccaacgggaagaaataaagggattatagtccacccaattcacagacttctgagactcagacacgaggagagatagagaaccgccaatctctagatcaacaagcaaaggaggtgccaagcctgtttgtcttcattgtgacactggagtctagatgctgggaagtccaagatcagggtgccggcatggtcagttcctggcgaagcctctcttctaggtttcagactgccctcttctttgttgtgtcctcgaatggcagaaaaaggggtggctgttggaggaagggaggagagtaaatgaagagaaagaactggaataaccccttgcagaaaaaaaaaaaaagggaagcaagcttagctgtacaccctgagtcttgcaaaagctgcagccccacccaggagcagggtggtggctggggcgatggtggacgccctgaagatgtcccatggctactgaaggggctgcccagttagggaacagagtggcgggcatggtgtgtagcctatgggtgctgctcctggtgtcttcagttctggctctggaagaggtattgctggacaccaccggagagacatctgagattggctggctcacctacccaccaggggggtgggacgaggtgagtgttctggacgaccagcgacgcctgactcggacctttgaggcatgtcatgtggcaggggcccctccaggcaccgggcaggacaattggttgcagacacactttgtggagcggcgcggggcccagagggcgcacattcgactccacttctctgtgcgggcatgctccagcctgggtgtgagcggcggcacctgccgggagaccttcaccctttactaccgtcaggctgaggagcccgacagccctgacagcgtttcctcctggcacctcaaacgctggaccaaggtggacacaattgcagcagacgagagctttccctcctcctcctcctcctcctcctcttcttcctctgcagcgtgggctgtgggaccccacggggctgggcagcgggctggactgcaactgaacgtcaaagagcggagctttgggcctctcacccaacgcggcttctacgtggccttccaggacacgggggcctgcctggccctggtcgctgtcaggctcttctcctacacctgccctgccgtgctccgatcctttgcttcctttccagagacgcaggccagtggggctgggggggcctccctggtggcagctgtgggcacctgtgtggctcatgcagagccagaggaggatggagtagggggccaggcaggaggcagcccccccaggctgcactgcaacggggagggcaagtggatggtagctgtcgggggctgccgctgccagcctggataccaaccagcacgaggagacaaggcctgccaagcctgcccacgggggctctataagtcttctgctgggaatgctccctgctcaccatgccctgcccgcagtcacgctcccaacccagcagcccccgtttgcccctgcctggagggcttctaccgggccagttccgacccaccagaggccccctgcactggtcctccatcggctccccaggagctttggtttgaggtgcaaggctcagcactcatgctacactggcgcctgcctcgggagctggggggtcgaggggacctgctcttcaatgtcgtgtgcaaggagtgtgaaggccgccaggaacctgccagcggtggtgggggcacttgtcaccgctgcagggatgaggtccacttcgaccctcgccagagaggcctgactgagagccgagtgttagtggggggactccgggcacacgtaccctacatcttagaggtgcaggctgttaatggggtgtctgagctcagccctgaccctcctcaggctgcagccatcaatgtcagcaccagccatgaagtgccctctgctgtccctgtggtgcaccaggtgagccgggcatccaacagcatcacggtgtcctggccgcagcccgaccagaccaatgggaacatcctggactatcagctccgctactatgaccaggcagaagacgaatcccactccttcaccctgaccagcgagaccaacactgccaccgtgacacagctgagccctggccacatctatggtttccaggtgcgggcccggactgctgccggccacggcccctacgggggcaaagtctatttccagacacttcctcaaggggagctgtcttcccagcttccggaaagactctccttggtgatcggctccatcctgggggctttggccttcctcctgctggcagccatcaccgtgctggcggtcgtcttccagcggaagcggcgtgggactggctacacggagcagctgcagcaatacagcagcccaggactcggggtgaagtattacatcgacccctccacctacgaggacccctgtcaggccatccgagaacttgcccgggaagtcgatcctgcttatatcaagattgaggaggtcattgggacaggctcttttggagaagtgcgccagggccgcctgcagccacggggacggagggagcagactgtggccatccaggccctgtgggccgggggcgccgaaagcctgcagatgaccttcctgggccgggccgcagtgctgggtcagttccagcaccccaacatcctgcggctggagggcgtggtcaccaagagccgacccctcatggtgctgacggagttcatggagcttggccccctggacagcttcctcaggcagcgggagggccagttcagcagcctgcagctggtggccatgcagcggggagtggctgctgccatgcagtacctgtccagctttgccttcgtccatcgctcgctgtctgcccacagcgtgctggtgaatagccacttggtgtgcaaggtggcccgtcttggccacagtcctcagggcccaagttgtttgcttcgctgggcagccccagaggtcattgcacatggaaagcatacaacatccagtgatgtctggagctttgggatactcatgtgggaagtgatgagttatggagaacggccttactgggacatgagtgagcaggaggtactaaatgcaatagagcaggagttccggctgcccccgcctccaggctgtcctcctggattacatctacttatgttggacacttggcagaaggaccgtgcccggcggcctcattttgaccagctggtggctgcatttgacaagatgatccgcaagccagataccctgcaggctggcggggacccaggggaaaggccttcccaggcccttctgacccctgtggccctggactttccttgtctggactcaccccaggcctggctttcagccattggactggagtgctaccaggacaacttctccaagtttggcctctgtaccttcagtgatgtggctcagctcagcctagaagacctgcctgccctgggcatcaccctggctggccaccagaagaagctgctgcaccacatccagctccttcagcaacacctgaggcagcagggctcagtggaggtctgagaatgacgatacccgtgactcagccctggacactggtccgagaagggacatgtgggacgtgagccgggctccaacagcctctgtgagagatgccccacaccaaacccaaccctcccgatggctgcattccctggtcctccgcctctccaccagccccctcctcattaaagggaaagaagggaatttgcaaaaaaaaaaaaaaaaaa

SEQ ID NO: 1788 - DNA, 2097 bp, Homo sapiens
gcaagatggcggctgtggtgctggcggcgacgcggttgctgcggggctcgggttcttggggctgttcgcggctgaggtttggacctcctgcgtacagacggtttagtagtggtggtgcctatcccaacatccccctctcttctcccttacctggagtacccaagcctgtttttgctacagttgatggacaggaaaagtttgaaaccaaagtaaccacattggataatgggcttcgcgtggcatctcagaataagtttggacagttttgtacagtaggaattcttatcaattcaggatcgagatatgaagcgaaataccttagtggaattgctcactttttggaaaaattggcattttcgtctactgctcgatttgacagcaaagatgaaattctgcttacgttggaaaagcatgggggtatctgtgactgccagacatcaagagacaccaccatgtatgctgtgtctgctgatagcaaaggcttggacacggtggttgccttactggctgatgtggttctgcagccccggctaacagatgaagaagtcgagatgacgcggatggcggtccagtttgagctggaggacctgaacctgcggcctgacccagagccacttctcaccgagatgattcatgaagcggcttacagggagaacacagttggcctccaccgtttctgccccacagaaaacgtagcaaagatcaaccgagaggtgctgcattcctacctgaggaactactacactcccgaccgcatggtgctggccggcgtgggcgtggagcacgagcatctggtggactgtgcccggaagtacctcctgggggtccagccggcctgggggagcgcagaggccgtggatattgacagatctgtggcccagtacactggggggattgccaagctagaaagagacatgtccaatgtcagcctgggcccgacccccatccccgagctcacgcacatcatggttggactggagagctgctccttcctggaggaggacttcatcccctttgcagtgttgaacatgatgatgggcggaggtggctccttctcggctggtgggcccggcaagggcatgttctccaggctctacctcaacgtgctcaacaggcaccactggatgtataacgcgacctcctaccaccacagctacgaggacactggcctcctttgcatccatgccagcgccgacccaagacaggttcgagaaatggtagaaatcatcacaaaggagtttattttaatgggcggaaccgtggacacggtggagctggaacgagccaagacgcagctgacatcaatgctcatgatgaacctggaatccaggcctgtgatcttcgaggatgtggggaggcaggtgctggccactcgctccagaaagctgccgcacgagctgtgcacgctcatccgcaacgtgaagccggaagatgtgaagagagtcgcttctaagatgctccgagggaagccggcagtggccgccctgggtgacctgactgacctgcccacgtatgagcacatccagaccgccctgtcgagtaaggacgggcgcctgcccaggacgtaccggctcttccggtagaaccgctccccggcctgacagacccagggagctgcagctggagcccgttcccgtgcgtgttagtttggacacgaatttagtctaaaaagctgtctggttgtataaacggtgcaaacaatgtcgccacagcacccacgcggtttgcattcttttggaactcaatgtgccgatcagtggagtcagtatcgagcctgaccaccgcaagccaggaagcaggtgaagtgcccagcgctggagtgcagcgtgccacgaggagggcggtcggtgcttccctcctcgggctgtgggcacatggggccccgcaggttccttggaggagccctgagctgggaggcagcaaaggctgacctatcaaagcctcccggaggccaccgtgctgggtaccaggactcacctctgacaagcaggagaaggtaagggcccggtcagctccaaggagcgcgctccacgcgcgtgcacacagcttccctggtaataaagagctggcatctttcttaaaaaaaaaaaaaaaaaa

SEQ ID NO: 1789 - DNA, 1953 bp, Homo sapiens
cgggcctggctgcgcccccggacctcgcgggaccgcggcggcgcaggaagaagtccccaaggagacttcgccataggagttcacaggaaatattgaaatgtcaggttccacgccatttcagatgagattagttcatttagaccttaaaggagctccaccaaaggtctcgtacctctcagagatttttcctctgttccgtgcgctaggtgcaaacggcctcctcattgagtatgaagacatgtttccctacgagggccctctgaggctgctgagggccaagtacgcctacagcccctctgaaatcaaagagatcttgcatctggctggactcaatgagctggaggtgattcccttggtgcagacatttggacacatggagtttgtgctgaagcacacggccttcgcccacctgcgggaggtgggctccttcccctgcaccctgaacccccacgaggcagagtccctggcgctggtgggcgccatgattgaccaggtcctggagctacacccaggcgcccagcggctgcacatcgggtgtgatgaggtctattacctcggagagggggaggcctcgcgccggtggctacagcaagagcagaacagcacggggaagttgtgcctgtcacacatgcgggcggtggccagcggcgtgaaggcccggcgccccagcgtgacacccctggtgtgggacgacatgctccgagacctgcctgaggaccagctcgcagcgtccggggtgccgcagctggtggagccggtgctctgggactacacggccgacctggatgtgtacggcaaggtcctcctcatgcagaagtaccggcggtgcggctttccgcagctgtgggcagccagtgccttcaagggtgccacggggcccagccaggccgtgccccctgttgagcaccacctcaggaaccacgtgcagtggctgcaggtggcgggcagcgggcccacggactcactgcagggcatcatcctgaccggctggcagaggtacgaccactactctgtgctgtgcgagctgctgcccgcaggagtcccgtccctggccgcctgcctgcagttgcttctacgcggaggatttgatgaagatgttaaagcgaaagtggagaaccttctcgggatttccagcctggaaaaaacggaccctgttaggcaagcaccctgcagccctccctgtccccttcttcccctccccttcccccgcccgtggagacagctgttctcagcagggctctccgcagggagggggccggctccttccctggcagcaacatccttgcccttgtcacacaagtcagcctccatctgcgcagctctgtggatgcgctgctggagggcaacaggtatgtcactggctggttcagcccctaccaccgccagcggaagctcatccacccggtcatggttcagcacatccagcccgcagcgctcagcctcctggcacagtggagcaccctcgtgcaggagctggaggctgccctgcagctggctttctacccggatgccgtggaggagtggctggaggaaaacgtgcaccccagcctgcagcggctgcaagctctgctgcaggacctcagcgaggtgtctgcccccccgctgccacccaccagccctggcagggacgttgctcaggacccctgaggggagagctcatgccagggggctcctgctggaggctgggggggctctgcactgccaaatggcctgggcaatacgggcccacgtgggcgtcgtgccctctggcccagcagtgtcttgcccacactcagttcctgagggccctgggcagcccctgggggagagactagaaaacacagaaggaagcagcacagggagacccgctttgtgatctgcatgtgtgacactgattctttggaaataaagagtggaagctgcaaaaaaaaaaaaaaaaaaaaaaaaaaaaaaaaaaaaaaaaaaaaaaaaaaa

SEQ ID NO: 1790 - DNA, 3647 bp, Homo sapiens
gttgtcatgggggaggtggtggcgcttggtggccactggcggccgaggtagaggcagtggcgcttgagttggtcgggggcagcggcagatttgaggcttaagcaacttcttccggggaagagtgccagtgcagccactgttacaattcaagatcttgatctatatccatagattggaatattggtgggccagcaatcctcagacgcctcacttaggacaaatgaggaaactgaggcttggtgaagttacgaaacttgtccaaaatcacacaacttgtaaagggcacagccaagattcagagccaggctgtaaaaattaaaatgaacaaattacggcaaagttttaggagaaagaaggatgtttatgttccagaggccagtcgtccacatcagtggcagacagatgaagaaggcgttcgcaccggaaaatgtagcttcccggttaagtaccttggccatgtagaagttgatgaatcaagaggaatgcacatctgtgaagatgctgtaaaaagattgaaagctgaaaggaagttcttcaaaggcttctttggaaaaactggaaagaaagcagttaaagcagttctgtgggtctcagcagatggactcagagttgtggatgaaaaaactaaggacctcatagttgaccagacgatagagaaagtttctttctgtgccccagacaggaactttgatagagccttttcttacatatgccgtgatggcaccactcgtcgctggatctgtcactgcttcatggctgtcaaggacacaggtgaaaggttgagccatgcagtaggctgtgcttttgcagcctgtttagagcgcaagcagaagcgggagaaggaatgtggagtgactgctacttttgatgctagtcggaccacttttacaagagaaggatcattccgtgtcacaacagccactgaacaagcagaaagagaggagatcatgaaacaaatgcaagatgccaagaaagctgaaacagataagatagtcgttggttcatcagttgcccctggcaacactgccccatccccatcctctcccacctctcctacttctgatgccacgacctctctggagatgaacaatcctcatgccatcccacgccggcatgctccaattgaacagcttgctcgccaaggctctttccgaggttttcctgctcttagccagaagatgtcaccctttaaacgccaactatccctacgcatcaatgagttgccttccactatgcagaggaagactgatttccccattaaaaatgcagtgccagaagtagaaggggaggcagagagcatcagctccctgtgctcacagatcaccaatgccttcagcacacctgaggaccccttctcatctgctccgatgaccaaaccagtgacagtggtggcaccacaatctcctaccttccaagctaatggcactgactcagccttccatgtgcttgctaagccagcccatactgctctagcacccgtagcaatgcctgtgcgtgaaaccaacccttgggcccatgcccctgatgctgctaacaaggaaattgcagccacatgttcggggaccgagtggggtcaatcttctggtgctgcctctccaggtctcttccaggccggtcatagacgtactccctctgaggccgaccgatggttagaagaggtgtctaagagcgtccgggctcagcagccccaggcctcagctgctcctctgcagccagttctccagcctcctccacccactgccatctcccagccagcatcacctttccaagggaatgcattcctcacctctcagcctgtgccagtgggtgtggtcccagccctgcaaccagcctttgtccctgcccagtcctatcctgtggccaatggaatgccctatccagcccctaatgtgcctgtggtgggcatcactccctcccagatggtggccaacgtatttggcactgcaggccaccctcaggctgcccatccccatcagtcacccagcctggtcaggcagcagacattccctcactacgaggcaagcagtgctaccaccagtcccttctttaagcctcctgctcagcacctcaacggttctgcagctttcaatggtgtagatgatggcaggttggcctcagcagacaggcatacagaggttcctacaggcacctgcccagtggatccttttgaagcccagtgggctgcattagaaaataagtccaagcagcgtactaatccctcccctaccaaccctttctccagtgacttacagaagacgtttgaaattgaactttaagcaatcattatggctatgtatcttgtccataccagacagggagcagggggtagcggtcaaaggagcaaaacagactttgtctcctgattagtactcttttcactaatcccaaaggtcccaaggaacaagtccaggcccagagtactgtgaggggtgattttgaaagacatgggaaaaagcattcctagagaaaagctgccttgcaattaggctaaagaagtcaaggaaatgttgctttctgtactccctcttcccttacccccttacaaatctctggcaacagagaggcaaagtatctgaacaagaatctatattccaagcacatttactgaaatgtaaaacacaacaggaagcaaagcaatctccctttgtttttcaggccattcacctgcctcctgtcagtagtggcctgtattagagatcaagaagagtggtttgtgctcaggctggggaacagagaggcacgctatgctgccagaattcccaggagggcatatcagcaactgcccagcagagctatattttgggggagaagttgagcttccattttgagtaacagaataaatattatatatatcaaaagccaaaatctttatttttatgcatttagaatattttaaatagttctcagatattaagaagttgtatgagttgtaagtaatcttgccaaaggtaaaggggctagttgtaagaaattgtacataagattgatttatcattgatgcctactgaaataaaaagaggaaaggctggaagctgcagacaggatccctagcttgttttctgtcagtcattcattgtaagtagcacattgcaacaacaatcatgcttatgaccaatacagtcactaggttgtagttttttttaaataaaggaaaagcagtattgtcctggttttaaacctatgatggaattctaatgtcattattttaatggaatcaatcgaaatatgctctatagagaatatatcttttatatattgctgcagtttccttatgttaatcctttaacactaaggtaacatgacataatcataccatagaagggaacacaggttaccatattggtttgtaatatgggtcttggtgggttttgttttatcctttaaattttgttcccatgagttttgtggggatggggattctggttttattagctttgtgtgtgtcctcttcccccaaacccccttttggtgagaacatccccttgacagttgcagcctcttgacctcggataacaataagagagctcatctcatttttacttttgaacgttggccttacaatcaaatgtaagttatatatatttgtactgatgaaaatttataatctgctttaacaaaaataaatgttcatggtagaagcttttaaa

SEQ ID NO: 1791 - DNA, 3503 bp, Homo sapiens
gttgtcatgggggaggtggtggcgcttggtggccactggcggccgaggtagaggcagtggcgcttgagttggtcgggggcagcggcagatttgaggcttaagcaacttcttccggggaagagtgccagtgcagccactgttacaattcaagatcttgatctatatccatagattggaatattggtgggccagcaatcctcagacgcctcacttaggacaaatgaggaaactgaggcttggtgaagttacgaaacttgtccaaaatcacacaacttgtaaagggcacagccaagattcagagccaggctgtaaaaattaaaatgaacaaattacggcaaagttttaggagaaagaaggatgtttatgttccagaggccagtcgtccacatcagtggcagacagatgaagaaggcgttcgcaccggaaaatgtagcttcccggttaagtaccttggccatgtagaagttgatgaatcaagaggaatgcacatctgtgaagatgctgtaaaaagattgaaagctgaaaggaagttcttcaaaggcttctttggaaaaactggaaagaaagcagttaaagcagttctgtgggtctcagcagatggactcagagttgtggatgaaaaaactaaggacctcatagttgaccagacgatagagaaagtttctttctgtgccccagacaggaactttgatagagccttttcttacatatgccgtgatggcaccactcgtcgctggatctgtcactgcttcatggctgtcaaggacacaggtgaaaggttgagccatgcagtaggctgtgcttttgcagcctgtttagagcgcaagcagaagcgggagaaggaatgtggagtgactgctacttttgatgctagtcggaccacttttacaagagaaggatcattccgtgtcacaacagccactgaacaagcagaaagagaggagatcatgaaacaaatgcaagatgccaagaaagctgaaacagataagatagtcgttggttcatcagttgcccctggcaacactgccccatccccatcctctcccacctctcctacttctgatgccacgacctctctggagatgaacaatcctcatgccatcccacgccggcatgctccaattgaacagcttgctcgccaaggctctttccgaggttttcctgctcttagccagaagatgtcaccctttaaacgccaactatccctacgcatcaatgagttgccttccactatgcagaggaagactgatttccccattaaaaatgcagtgccagaagtagaaggggaggcagagagcatcagctccctgtgctcacagatcaccaatgccttcagcacacctgaggaccccttctcatctgctccgatgaccaaaccagtgacagtggtggcaccacaatctcctaccttccaagggaccgagtggggtcaatcttctggtgctgcctctccaggtctcttccaggccggtcatagacgtactccctctgaggccgaccgatggttagaagaggtgtctaagagcgtccgggctcagcagccccaggcctcagctgctcctctgcagccagttctccagcctcctccacccactgccatctcccagccagcatcacctttccaagggaatgcattcctcacctctcagcctgtgccagtgggtgtggtcccagccctgcaaccagcctttgtccctgcccagtcctatcctgtggccaatggaatgccctatccagcccctaatgtgcctgtggtgggcatcactccctcccagatggtggccaacgtatttggcactgcaggccaccctcaggctgcccatccccatcagtcacccagcctggtcaggcagcagacattccctcactacgaggcaagcagtgctaccaccagtcccttctttaagcctcctgctcagcacctcaacggttctgcagctttcaatggtgtagatgatggcaggttggcctcagcagacaggcatacagaggttcctacaggcacctgcccagtggatccttttgaagcccagtgggctgcattagaaaataagtccaagcagcgtactaatccctcccctaccaaccctttctccagtgacttacagaagacgtttgaaattgaactttaagcaatcattatggctatgtatcttgtccataccagacagggagcagggggtagcggtcaaaggagcaaaacagactttgtctcctgattagtactcttttcactaatcccaaaggtcccaaggaacaagtccaggcccagagtactgtgaggggtgattttgaaagacatgggaaaaagcattcctagagaaaagctgccttgcaattaggctaaagaagtcaaggaaatgttgctttctgtactccctcttcccttacccccttacaaatctctggcaacagagaggcaaagtatctgaacaagaatctatattccaagcacatttactgaaatgtaaaacacaacaggaagcaaagcaatctccctttgtttttcaggccattcacctgcctcctgtcagtagtggcctgtattagagatcaagaagagtggtttgtgctcaggctggggaacagagaggcacgctatgctgccagaattcccaggagggcatatcagcaactgcccagcagagctatattttgggggagaagttgagcttccattttgagtaacagaataaatattatatatatcaaaagccaaaatctttatttttatgcatttagaatattttaaatagttctcagatattaagaagttgtatgagttgtaagtaatcttgccaaaggtaaaggggctagttgtaagaaattgtacataagattgatttatcattgatgcctactgaaataaaaagaggaaaggctggaagctgcagacaggatccctagcttgttttctgtcagtcattcattgtaagtagcacattgcaacaacaatcatgcttatgaccaatacagtcactaggttgtagttttttttaaataaaggaaaagcagtattgtcctggttttaaacctatgatggaattctaatgtcattattttaatggaatcaatcgaaatatgctctatagagaatatatcttttatatattgctgcagtttccttatgttaatcctttaacactaaggtaacatgacataatcataccatagaagggaacacaggttaccatattggtttgtaatatgggtcttggtgggttttgttttatcctttaaattttgttcccatgagttttgtggggatggggattctggttttattagctttgtgtgtgtcctcttcccccaaacccccttttggtgagaacatccccttgacagttgcagcctcttgacctcggataacaataagagagctcatctcatttttacttttgaacgttggccttacaatcaaatgtaagttatatatatttgtactgatgaaaatttataatctgctttaacaaaaataaatgttcatggtagaagcttttaaa

SEQ ID NO: 1792 - DNA, 3470 bp, Homo sapiens
gttgtcatgggggaggtggtggcgcttggtggccactggcggccgaggtagaggcagtggcgcttgagttggtcgggggcagcggcagatttgaggcttaagcaacttcttccggggaagagtgccagtgcagccactgttacaattcaagatcttgatctatatccatagattggaatattggtgggccagcaatcctcagacgcctcacttaggacaaatgaggaaactgaggcttggtgaagttacgaaacttgtccaaaatcacacaacttgtaaagggcacagccaagattcagagccaggctgtaaaaattaaaatgaacaaattacggcaaagttttaggagaaagaaggatgtttatgttccagaggccagtcgtccacatcagtggcagacagatgaagaaggcgttcgcaccggaaaatgtagcttcccggttaagtaccttggccatgtagaagttgatgaatcaagaggaatgcacatctgtgaagatgctgtaaaaagattgaaagctactggaaagaaagcagttaaagcagttctgtgggtctcagcagatggactcagagttgtggatgaaaaaactaaggacctcatagttgaccagacgatagagaaagtttctttctgtgccccagacaggaactttgatagagccttttcttacatatgccgtgatggcaccactcgtcgctggatctgtcactgcttcatggctgtcaaggacacaggtgaaaggttgagccatgcagtaggctgtgcttttgcagcctgtttagagcgcaagcagaagcgggagaaggaatgtggagtgactgctacttttgatgctagtcggaccacttttacaagagaaggatcattccgtgtcacaacagccactgaacaagcagaaagagaggagatcatgaaacaaatgcaagatgccaagaaagctgaaacagataagatagtcgttggttcatcagttgcccctggcaacactgccccatccccatcctctcccacctctcctacttctgatgccacgacctctctggagatgaacaatcctcatgccatcccacgccggcatgctccaattgaacagcttgctcgccaaggctctttccgaggttttcctgctcttagccagaagatgtcaccctttaaacgccaactatccctacgcatcaatgagttgccttccactatgcagaggaagactgatttccccattaaaaatgcagtgccagaagtagaaggggaggcagagagcatcagctccctgtgctcacagatcaccaatgccttcagcacacctgaggaccccttctcatctgctccgatgaccaaaccagtgacagtggtggcaccacaatctcctaccttccaagggaccgagtggggtcaatcttctggtgctgcctctccaggtctcttccaggccggtcatagacgtactccctctgaggccgaccgatggttagaagaggtgtctaagagcgtccgggctcagcagccccaggcctcagctgctcctctgcagccagttctccagcctcctccacccactgccatctcccagccagcatcacctttccaagggaatgcattcctcacctctcagcctgtgccagtgggtgtggtcccagccctgcaaccagcctttgtccctgcccagtcctatcctgtggccaatggaatgccctatccagcccctaatgtgcctgtggtgggcatcactccctcccagatggtggccaacgtatttggcactgcaggccaccctcaggctgcccatccccatcagtcacccagcctggtcaggcagcagacattccctcactacgaggcaagcagtgctaccaccagtcccttctttaagcctcctgctcagcacctcaacggttctgcagctttcaatggtgtagatgatggcaggttggcctcagcagacaggcatacagaggttcctacaggcacctgcccagtggatccttttgaagcccagtgggctgcattagaaaataagtccaagcagcgtactaatccctcccctaccaaccctttctccagtgacttacagaagacgtttgaaattgaactttaagcaatcattatggctatgtatcttgtccataccagacagggagcagggggtagcggtcaaaggagcaaaacagactttgtctcctgattagtactcttttcactaatcccaaaggtcccaaggaacaagtccaggcccagagtactgtgaggggtgattttgaaagacatgggaaaaagcattcctagagaaaagctgccttgcaattaggctaaagaagtcaaggaaatgttgctttctgtactccctcttcccttacccccttacaaatctctggcaacagagaggcaaagtatctgaacaagaatctatattccaagcacatttactgaaatgtaaaacacaacaggaagcaaagcaatctccctttgtttttcaggccattcacctgcctcctgtcagtagtggcctgtattagagatcaagaagagtggtttgtgctcaggctggggaacagagaggcacgctatgctgccagaattcccaggagggcatatcagcaactgcccagcagagctatattttgggggagaagttgagcttccattttgagtaacagaataaatattatatatatcaaaagccaaaatctttatttttatgcatttagaatattttaaatagttctcagatattaagaagttgtatgagttgtaagtaatcttgccaaaggtaaaggggctagttgtaagaaattgtacataagattgatttatcattgatgcctactgaaataaaaagaggaaaggctggaagctgcagacaggatccctagcttgttttctgtcagtcattcattgtaagtagcacattgcaacaacaatcatgcttatgaccaatacagtcactaggttgtagttttttttaaataaaggaaaagcagtattgtcctggttttaaacctatgatggaattctaatgtcattattttaatggaatcaatcgaaatatgctctatagagaatatatcttttatatattgctgcagtttccttatgttaatcctttaacactaaggtaacatgacataatcataccatagaagggaacacaggttaccatattggtttgtaatatgggtcttggtgggttttgttttatcctttaaattttgttcccatgagttttgtggggatggggattctggttttattagctttgtgtgtgtcctcttcccccaaacccccttttggtgagaacatccccttgacagttgcagcctcttgacctcggataacaataagagagctcatctcatttttacttttgaacgttggccttacaatcaaatgtaagttatatatatttgtactgatgaaaatttataatctgctttaacaaaaataaatgttcatggtagaagcttttaaa

SEQ ID NO: 1793 - DNA, 3614 bp, Homo sapiens
gttgtcatgggggaggtggtggcgcttggtggccactggcggccgaggtagaggcagtggcgcttgagttggtcgggggcagcggcagatttgaggcttaagcaacttcttccggggaagagtgccagtgcagccactgttacaattcaagatcttgatctatatccatagattggaatattggtgggccagcaatcctcagacgcctcacttaggacaaatgaggaaactgaggcttggtgaagttacgaaacttgtccaaaatcacacaacttgtaaagggcacagccaagattcagagccaggctgtaaaaattaaaatgaacaaattacggcaaagttttaggagaaagaaggatgtttatgttccagaggccagtcgtccacatcagtggcagacagatgaagaaggcgttcgcaccggaaaatgtagcttcccggttaagtaccttggccatgtagaagttgatgaatcaagaggaatgcacatctgtgaagatgctgtaaaaagattgaaagctactggaaagaaagcagttaaagcagttctgtgggtctcagcagatggactcagagttgtggatgaaaaaactaaggacctcatagttgaccagacgatagagaaagtttctttctgtgccccagacaggaactttgatagagccttttcttacatatgccgtgatggcaccactcgtcgctggatctgtcactgcttcatggctgtcaaggacacaggtgaaaggttgagccatgcagtaggctgtgcttttgcagcctgtttagagcgcaagcagaagcgggagaaggaatgtggagtgactgctacttttgatgctagtcggaccacttttacaagagaaggatcattccgtgtcacaacagccactgaacaagcagaaagagaggagatcatgaaacaaatgcaagatgccaagaaagctgaaacagataagatagtcgttggttcatcagttgcccctggcaacactgccccatccccatcctctcccacctctcctacttctgatgccacgacctctctggagatgaacaatcctcatgccatcccacgccggcatgctccaattgaacagcttgctcgccaaggctctttccgaggttttcctgctcttagccagaagatgtcaccctttaaacgccaactatccctacgcatcaatgagttgccttccactatgcagaggaagactgatttccccattaaaaatgcagtgccagaagtagaaggggaggcagagagcatcagctccctgtgctcacagatcaccaatgccttcagcacacctgaggaccccttctcatctgctccgatgaccaaaccagtgacagtggtggcaccacaatctcctaccttccaagctaatggcactgactcagccttccatgtgcttgctaagccagcccatactgctctagcacccgtagcaatgcctgtgcgtgaaaccaacccttgggcccatgcccctgatgctgctaacaaggaaattgcagccacatgttcggggaccgagtggggtcaatcttctggtgctgcctctccaggtctcttccaggccggtcatagacgtactccctctgaggccgaccgatggttagaagaggtgtctaagagcgtccgggctcagcagccccaggcctcagctgctcctctgcagccagttctccagcctcctccacccactgccatctcccagccagcatcacctttccaagggaatgcattcctcacctctcagcctgtgccagtgggtgtggtcccagccctgcaaccagcctttgtccctgcccagtcctatcctgtggccaatggaatgccctatccagcccctaatgtgcctgtggtgggcatcactccctcccagatggtggccaacgtatttggcactgcaggccaccctcaggctgcccatccccatcagtcacccagcctggtcaggcagcagacattccctcactacgaggcaagcagtgctaccaccagtcccttctttaagcctcctgctcagcacctcaacggttctgcagctttcaatggtgtagatgatggcaggttggcctcagcagacaggcatacagaggttcctacaggcacctgcccagtggatccttttgaagcccagtgggctgcattagaaaataagtccaagcagcgtactaatccctcccctaccaaccctttctccagtgacttacagaagacgtttgaaattgaactttaagcaatcattatggctatgtatcttgtccataccagacagggagcagggggtagcggtcaaaggagcaaaacagactttgtctcctgattagtactcttttcactaatcccaaaggtcccaaggaacaagtccaggcccagagtactgtgaggggtgattttgaaagacatgggaaaaagcattcctagagaaaagctgccttgcaattaggctaaagaagtcaaggaaatgttgctttctgtactccctcttcccttacccccttacaaatctctggcaacagagaggcaaagtatctgaacaagaatctatattccaagcacatttactgaaatgtaaaacacaacaggaagcaaagcaatctccctttgtttttcaggccattcacctgcctcctgtcagtagtggcctgtattagagatcaagaagagtggtttgtgctcaggctggggaacagagaggcacgctatgctgccagaattcccaggagggcatatcagcaactgcccagcagagctatattttgggggagaagttgagcttccattttgagtaacagaataaatattatatatatcaaaagccaaaatctttatttttatgcatttagaatattttaaatagttctcagatattaagaagttgtatgagttgtaagtaatcttgccaaaggtaaaggggctagttgtaagaaattgtacataagattgatttatcattgatgcctactgaaataaaaagaggaaaggctggaagctgcagacaggatccctagcttgttttctgtcagtcattcattgtaagtagcacattgcaacaacaatcatgcttatgaccaatacagtcactaggttgtagttttttttaaataaaggaaaagcagtattgtcctggttttaaacctatgatggaattctaatgtcattattttaatggaatcaatcgaaatatgctctatagagaatatatcttttatatattgctgcagtttccttatgttaatcctttaacactaaggtaacatgacataatcataccatagaagggaacacaggttaccatattggtttgtaatatgggtcttggtgggttttgttttatcctttaaattttgttcccatgagttttgtggggatggggattctggttttattagctttgtgtgtgtcctcttcccccaaacccccttttggtgagaacatccccttgacagttgcagcctcttgacctcggataacaataagagagctcatctcatttttacttttgaacgttggccttacaatcaaatgtaagttatatatatttgtactgatgaaaatttataatctgctttaacaaaaataaatgttcatggtagaagcttttaaa

SEQ ID NO: 1794 - DNA, 3222 bp, Homo sapiens
gagcggcttcctgcaaaccttccctggcatctggagggaccaccgttgccgcgtcttcggcttccacgatctgcgttcgggctacgcggccacggcggcagccactgcgactcccactgtgcctggctctgtccatattagttcccaggcggccgtcgccgttccagcagcggcagcggcagcggcagcggcggacatgttgtgaggcggcggcgcgggtgtctgaaggatggtttggccgaggcggcggcaacggctgctggcggcggcggcagcggcagcggggcctcgggctctatagagccgagcccgctgggtacccgcccggtaccgcggcgaggccagtgcccctggatcttgcctctgctccgacgccgttggggaccagttaggcgacagcgcccgcccctctgaggagacacgaaggtggttccccagccgctcaaatttccggaccaccgcgctttcccctcctcagcctgggctgtgctctctctagaatcctcgggcccccactttcttcccaaactcatcctaaatctctcacacacgcgagtgttcccagccctcaagccagctgctcctccgttcattttctgcaccctcttcgcaaagcaccccccgggatcactctccgagggcgactttttgagaaatctcggtggagtagtggaccagagctggggagtttttaaaagccggggcgcgagaaacaggaaggtactatggcttcctcgtctggcaacgatgatgatctcactatccccagagctgctatcaataaaatgatcaaagagactcttcctaatgtccgggtggccaacgatgctcgagagctggtggtgaactgctgcactgaattcattcaccttatatcttctgaagccaatgagatttgtaacaaatcggaaaagaagaccatctcaccagagcatgtcatacaagcactagaaagtttgggatttggctcttacatcagtgaagtaaaagaagtcttgcaagagtgtaaaacagtagcattaaaaagaagaaaggccagttctcgtttggaaaaccttggcattcctgaagaagagttattgagacagcaacaagaattatttgcaaaagctagacagcaacaagcagaattggcccaacaggaatggcttcaaatgcagcaagctgcccaacaagcccagcttgctgctgcctcagccagtgcatctaatcaggcgggatcttctcaggatgaagaagatgatgatgatatctgaaattcaccagctgagtttctatttcttctataaatgtttttccctgcacaacaaaaacagtgaaagaaatgcttatctgtaattttgtatgcatcttggtggacttgtcattggtattctagggatgtctgctattaagtttcatctattgtgtgctatacatgtaaaaactgtctctttgaactattgaaaatttaaggttcagtataatatcaattttgaatttttaatggtgtttatgaaattttagatagcagcgagtccttcgtttgatcaataaacagtgttacagataacttcaagtttataaaaatacagtgaaatttctacaaagctctaaatctgcatttgcatttcctctgcccttttaactaaactaaaacttgtgaattttaaattattaaggggggggtgctgtgtgaatcagtagacattggattgggttggtgaaagagttcagttctgtagtatctgaatttgtcttttaaaatgagtacatatataggcaataaatatatatgctcagatcaatatacttgtttagaaaaacttcaagacattcaaaaactaggaaggagtatgtttaatagtatttgtataaatttggtggttatgtttttttattttgtttctgttttgtgtagaggtaaaaactatagttttattacagcataattcattttgagctccactatgacatttcaaagactgcccagtttggaagtctgtcatgatttttactctttcactccaattcagtaattgttgatagtattacttacctagtccatccatactcatattattcaaatatataggtggtacttttgaaacaattacattggttctcttggtttaactgaggtttatgaatattcaaacctttgctgggggaaagaaatgaaagttaatgagcatgcttgctatgagagagggatttttaatttaacttgtagttatagtttacttattgtttttagaattacttttacattttcccaactagatggcctagagtccaacattaccttttgagatgacattattgtctccataattgagtgatagctttaaaaaaaagattagttttgcttaagaagttatgttacaactgatcagccctatatgaattaactgatcagccctatatgaaacataagttgtgttataacttatcagccgtatatggaacataaatagtttctacctgcttgttagagaagctttaatttggttctaataaatacagtatggtagtgtttataggaatccaggatgttgaagaaatggcataatgtctatattttggaaacagaaaggaaaagtcacttaagatagtattaagtaattaaattcctatgtcagttgccaaatcttttaaacttatgtattcaccaagcccaaaaatagattgtggctcccaggattccaattttaattggagagctaagtaagtaaagttttataactgttaggtttcttaatgatcatattttgcagttttagtaaaagggaaatattgttatacatttattaaatatacttcccccatgaagtgaaaaggttaattttgctgaatgttttaagttgaagttacttcatggatgtcatacccatgaagtgcatttggatgagatagaagaaattgttttttaaaaagtttaagtaccaaaggtagtctagtctagaacgataagttaatacgtgttggcttttctaatttgtactgtaacatccttatactttctattttaagtatatctgtttcttaagtaaacaacttagatattttccacacctttttttttttttctgatgcagagttcaggttaatattttactgcatctgataatgtattatacgtttgaagcctagtgacttttcattttgacattcttgtgatttcatatgctgtattcttcaagcaataaaattgtgatgtgttttataaaaaaaaaaaaaaaa

SEQ ID NO: 1795 - DNA, 963 bp, Homo sapiens
atggaagcacaccagtgtagaacaggacattcaaattgtcatgaattcgttgaggagcttctggaaagtgcacattctgactcagcagaaaagagatactctcagaaaaaagtcatcggctttagaaactctccaaacgacctaagccaaacacagcagcaaataaaggaaatgaaagagatgtatgaaaatgcagaagataaagtgaataattccactggaaagtggagctgtgtagaagagaggatatgtcatctccaacatgaaaatccgtgcattgaacagcaactagatgatgttcatcagaaagaggatcataaagagatagtaactaatatccaaagaggctttattgagagtggaaagaaagacctcatgctagaagagaaaaataagaagctaatgaatgaatgtgatcatttaaaagaaagtctctttcaatatgagagagagaaagcagaaagagtagtggttgtgagacaacttcaacaagaagcggctgacagcctaaaaaaattaactatgttagagtctccactggaaggcatatcacattatcacattaatttggatgagacacaggtcccaaaaaagaaattatttcaagtggaaagtcaatttgatgatcttatggtggagaaggaagctgtatcttcaaaatgtgtcaatttggctaaagagaatcaagtttttcaacagaagttattatctatgaaaaaagtacaacaggaatgtgaaaaacttgaggaggataaaaagatgttggaagaagaaatattaaatcttaagacacatatggaaaacagtatggtagaacttagtaaactacaagaatataaatcagagctagatgaaagggcaatgcaggcagtagaaaaattagaagaaatccatttacaggaacaagcacaatataaaaaacaattagagcagttaaacaaggatataatacagcttcactaa

SEQ ID NO: 1796 - DNA, 4992 bp, Homo sapiens
aacctttgccagccttgtgggagggggctagggtacttggcttgctttgctatgtgtgtgaagttgccttcattactgcccttctcttgctgcctcctgggcagggcctgcctcctctggctcagtgtgagattgaaatccaggccctactcacatgaatttggaccctgagtccagagtttagagaggggagggagagagaagagcaccagaaaggtagatgagagacccttattttggctgtgtggaggctctaggcagctgatcgctttgaagtgtcacttgatgcttatgggcctgctgaggccttacatcctgggggagaggggaacagtgatggtgagtgggtacagactaggaggacgtgtcaagactgcttccagccctaggacagtgtattcaagagttgagtgctgagggtctgtggcgtatgcccagcccttagtttctggcccacgtgaagcaggggggcactaggacccagaggctagcacggttcctgacaagtctagagcagcactagcgcagagtgagactcatcagctggcaagcaggattctgtgtctctgggttcaggaatcctcaggcagcagaggggacttgctcctcagcccccatcactgcccccacccctacccgtgtaggccaccgagtgaggcccatggactggggagggctgtgcctgacgactcctgtgtccctctatgagggcccagcgccctgaccctcctgcctaggtttctaccttttctctctgtctttggccagctgggggagtgggtagaggccgggtgagcaacatggcacagagcaagaggcacgtgtacagccggacgcccagcggcagcaggatgagtgcggaggcaagcgcccggcctctgcgggtgggctcccgtgtagaggtgattggaaaaggccaccgaggcactgtggcctatgttggagccacactgtttgccactggcaaatgggtaggcgtgattctggatgaagcaaagggcaaaaatgatggaactgttcaaggcaggaagtacttcacttgtgatgaagggcatggcatctttgtgcgccagtcccagatccaggtatttgaagatggagcagatactacttccccagagacacctgattcttctgcttcaaaagtcctcaaaagagagggaactgatacaactgcaaagactagcaaactgcggggactgaagcctaagaaggcaccgacagcccgaaagaccacaactcggcgacccaagcccacgcgcccagccagtactggggtggctggggccagtagctccctgggcccctctggctcagcgtcagcaggtgagctgagcagcagtgagcccagcaccccggctcagactccgctggcagcacccatcatccccacgccggtcctcacctctcctggagcagtccccccgcttccttccccatccaaggaggaggagggactaagggctcaggtgcgggacctggaggagaaactagagaccctgagactgaaacgggcagaagacaaagcaaagctaaaagagctggagaaacacaaaatccagctggagcaggtgcaggaatggaagagcaaaatgcaggagcagcaggccgacctgcagcggcgcctcaaggaggcgagaaaggaagccaaggaggcgctggaggcaaaggaacgctatatggaggagatggctgatactgctgatgccattgagatggccactttggacaaggagatggctgaagagcgggctgagtccctgcagcaggaggtggaggcactgaaggagcgggtggacgagctcactactgacttagagatcctcaaggctgagattgaagagaagggctcagatggcgctgcatccagttatcagctcaagcagcttgaggagcagaatgcccgcctgaaggatgccctggtgaggatgcgggatctttcttcctcagagaagcaggagcatgtgaagctccagaagctcatggaaaagaagaaccaagagctggaagttgtgaggcaacagcgggagcgtctgcaggaggagctaagccaggcagagagcaccattgatgagctcaaggagcaggtggatgctgctctgggtgctgaggagatggtggagatgctgacagatcggaacctgaatctggaagagaaagtgcgcgagttgagggagactgtgggagacttggaagcgatgaatgagatgaacgatgagctgcaggagaatgcacgtgagacagaactggagctgcgggagcagctggacatggcaggcgcgcgggttcgtgaggcccagaagcgtgtggaggcagcccaggagacggttgcagactaccagcagaccatcaagaagtaccgccagctgaccgcccatctacaggatgtgaatcgggaactgacaaaccagcaggaagcatctgtggagaggcaacagcagccacctccagagacctttgacttcaaaatcaagtttgctgagactaaggcccatgccaaggcaattgagatggaattgaggcagatggaggtggcccaggccaatcgacacatgtccctgctgacagccttcatgcctgacagcttccttcggccaggtggggaccatgactgcgttctggtgctgttgctcatgcctcgtctcatttgcaaggcagagctgatccggaagcaggcccaggagaagtttgaactaagtgagaactgttcagagcggcctgggctgcgaggagctgctggggagcaactcagctttgctgctggactggtgtactcgctgagcctgctgcaggccacgctacaccgctatgagcatgccctctctcagtgcagtgtggatgtgtataagaaagtgggcagcctgtaccctgagatgagtgcccatgagcgctccttggatttcctcattgaactgctgcacaaggatcagctggatgagactgtcaatgtggagcctctcaccaaggccatcaagtactatcagcatctgtacagcatccaccttgccgaacagcctgaggactgtactatgcagctggctgaccacattaagttcacgcagagtgctctggactgcatgagtgtggaggtaggacggctgcgtgccttcttgcagggtgggcaggaggctacagatattgccctcctgctccgggatctggaaacttcatgcagtgacatccgccagttctgcaagaagatccgaaggcgaatgccagggacagatgctcctgggatcccagctgcactggcctttggaccacaggtatctgacacgctcctagactgcaggaaacacttgacgtgggtcgtggctgtgctgcaggaggtggcagctgctgctgcccagctcattgccccactggcagagaatgaggggctacttgtggctgctctggaggaactggctttcaaagcaagcgagcagatctatgggaccccctccagcagcccctatgagtgtctgcgccagtcatgcaacatcctcatcagtaccatgaacaagctggccacagccatgcaggagggggagtatgatgcagagcggccccccagcaagcctccaccggttgaactgcgggctgctgcccttcgtgcagagatcacagatgctgaaggcctgggtttgaagctcgaagatcgagagacagttattaaggagttgaagaagtcactcaagattaagggagaggagctaagtgaggccaatgtgcggctgagcctcctggagaagaagttggacagtgctgccaaggatgcagatgagcgcatcgagaaagtccagactcggctggaggagacccaggcactgctgcgaaagaaggagaaagagtttgaggagacaatggatgcactccaggctgacatcgaccagctggaggcagagaaggcagaactaaagcagcgtctgaacagccagtccaaacgcacgattgagggactccggggccctcctccttcaggcattgctactctggtctctggcattgctggtgaagaacagcagcgaggagccatccctgggcaggctccagggtctgtgccaggcccagggctggtgaaggactcaccactgctgcttcagcagatctctgccatgaggctgcacatctcccagctccagcatgagaacagcatcctcaagggagcccagatgaaggcatccttggcatccctgccccctctgcatgttgcaaagctatcccatgagggccctggcagtgagttaccagctggagcgctgtatcgtaagaccagccagctgctggagacattgaatcaattgagcacacacacgcacgtagtagacatcactcgcaccagccctgctgccaagagcccgtcggcccaacttatggagcaagtggctcagcttaagtccctgagtgacaccgtcgagaagctcaaggatgaggtcctcaaggagacagtatctcagcgccctggagccacagtacccactgactttgccaccttcccttcatcagccttcctcagggccaaggaggagcagcaggatgacacagtctacatgggcaaagtgaccttctcatgtgcggctggttttggacagcgacaccggctggtgctgacccaggagcagctgcaccagcttcacagtcgcctcatctcctaagcactcctttcccctgctgtccccttcgaccctcagccctctggtgccgctctgcccgatgcacagccacctcagccagcccccaggtagaaacgtgggttaagctcttcctgccccgttcagcttcactcccaccctttcagcgtcctgccccttcaccttgacccgggttcccccactcccattccctggcctctgccataatttgttgttcaactgctccctccttcctgaggggcctcagggcttgtggggggtaggctgagaccccaccaccaaaggttaagtgaggtccccttgattgaggacttcaccccttgattaaagcaacttctgcttcagtgaaaaaaaaaaa

SEQ ID NO: 1797 - DNA, 3790 bp, Homo sapiens
atgatgagacaggcaccgacagcccgaaagaccacaactcggcgacccaagcccacgcgcccagccagtactggggtggctggggccagtagctccctgggcccctctggctcagcgtcagcaggtgagctgagcagcagtgagcccagcaccccggctcagactccgctggcagcacccatcatccccacgccggtcctcacctctcctggagcagtccccccgcttccttccccatccaaggaggaggagggactaagggctcaggtgcgggacctggaggagaaactagagaccctgagactgaaacgggcagaagacaaagcaaagctaaaagagctggagaaacacaaaatccagctggagcaggtgcaggaatggaagagcaaaatgcaggagcagcaggccgacctgcagcggcgcctcaaggaggcgagaaaggaagccaaggaggcgctggaggcaaaggaacgctatatggaggagatggctgatactgctgatgccattgagatggccactttggacaaggagatggctgaagagcgggctgagtccctgcagcaggaggtggaggcactgaaggagcgggtggacgagctcactactgacttagagatcctcaaggctgagattgaagagaagggctcagatggcgctgcatccagttatcagctcaagcagcttgaggagcagaatgcccgcctgaaggatgccctggtgaggatgcgggatctttcttcctcagagaagcaggagcatgtgaagctccagaagctcatggaaaagaagaaccaagagctggaagttgtgaggcaacagcgggagcgtctgcaggaggagctaagccaggcagagagcaccattgatgagctcaaggagcaggtggatgctgctctgggtgctgaggagatggtggagatgctgacagatcggaacctgaatctggaagagaaagtgcgcgagttgagggagactgtgggagacttggaagcgatgaatgagatgaacgatgagctgcaggagaatgcacgtgagacagaactggagctgcgggagcagctggacatggcaggcgcgcgggttcgtgaggcccagaagcgtgtggaggcagcccaggagacggttgcagactaccagcagaccatcaagaagtaccgccagctgaccgcccatctacaggatgtgaatcgggaactgacaaaccagcaggaagcatctgtggagaggcaacagcagccacctccagagacctttgacttcaaaatcaagtttgctgagactaaggcccatgccaaggcaattgagatggaattgaggcagatggaggtggcccaggccaatcgacacatgtccctgctgacagccttcatgcctgacagcttccttcggccaggtggggaccatgactgcgttctggtgctgttgctcatgcctcgtctcatttgcaaggcagagctgatccggaagcaggcccaggagaagtttgaactaagtgagaactgttcagagcggcctgggctgcgaggagctgctggggagcaactcagctttgctgctggactggtgtactcgctgagcctgctgcaggccacgctacaccgctatgagcatgccctctctcagtgcagtgtggatgtgtataagaaagtgggcagcctgtaccctgagatgagtgcccatgagcgctccttggatttcctcattgaactgctgcacaaggatcagctggatgagactgtcaatgtggagcctctcaccaaggccatcaagtactatcagcatctgtacagcatccaccttgccgaacagcctgaggactgtactatgcagctggctgaccacattaagttcacgcagagtgctctggactgcatgagtgtggaggtaggacggctgcgtgccttcttgcagggtgggcaggaggctacagatattgccctcctgctccgggatctggaaacttcatgcagtgacatccgccagttctgcaagaagatccgaaggcgaatgccagggacagatgctcctgggatcccagctgcactggcctttggaccacaggtatctgacacgctcctagactgcaggaaacacttgacgtgggtcgtggctgtgctgcaggaggtggcagctgctgctgcccagctcattgccccactggcagagaatgaggggctacttgtggctgctctggaggaactggctttcaaagcaagcgagcagatctatgggaccccctccagcagcccctatgagtgtctgcgccagtcatgcaacatcctcatcagtaccatgaacaagctggccacagccatgcaggagggggagtatgatgcagagcggccccccagcaagcctccaccggttgaactgcgggctgctgcccttcgtgcagagatcacagatgctgaaggcctgggtttgaagctcgaagatcgagagacagttattaaggagttgaagaagtcactcaagattaagggagaggagctaagtgaggccaatgtgcggctgagcctcctggagaagaagttggacagtgctgccaaggatgcagatgagcgcatcgagaaagtccagactcggctggaggagacccaggcactgctgcgaaagaaggagaaagagtttgaggagacaatggatgcactccaggctgacatcgaccagctggaggcagagaaggcagaactaaagcagcgtctgaacagccagtccaaacgcacgattgagggactccggggccctcctccttcaggcattgctactctggtctctggcattgctggtgaagaacagcagcgaggagccatccctgggcaggctccagggtctgtgccaggcccagggctggtgaaggactcaccactgctgcttcagcagatctctgccatgaggctgcacatctcccagctccagcatgagaacagcatcctcaagggagcccagatgaaggcatccttggcatccctgccccctctgcatgttgcaaagctatcccatgagggccctggcagtgagttaccagctggagcgctgtatcgtaagaccagccagctgctggagacattgaatcaattgagcacacacacgcacgtagtagacatcactcgcaccagccctgctgccaagagcccgtcggcccaacttatggagcaagtggctcagcttaagtccctgagtgacaccgtcgagaagctcaaggatgaggtcctcaaggagacagtatctcagcgccctggagccacagtacccactgactttgccaccttcccttcatcagccttcctcagggccaaggaggagcagcaggatgacacagtctacatgggcaaagtgaccttctcatgtgcggctggttttggacagcgacaccggctggtgctgacccaggagcagctgcaccagcttcacagtcgcctcatctcctaagcactcctttcccctgctgtccccttcgaccctcagccctctggtgccgctctgcccgatgcacagccacctcagccagcccccaggtagaaacgtgggttaagctcttcctgccccgttcagcttcactcccaccctttcagcgtcctgccccttcaccttgacccgggttcccccactcccattccctggcctctgccataatttgttgttcaactgctccctccttcctgaggggcctcagggcttgtggggggtaggctgagaccccaccaccaaaggttaagtgaggtccccttgattgaggacttcaccccttgattaaagcaacttctgcttcagtgaaaaaaaaaaa

SEQ ID NO: 1798 - DNA, 3277 bp, Homo sapiens
gcgtgctgtgggcggtgccgcgcggacccccgggaagtgtctctgtgggcggccgccgggttgagctgcggcacacgtgcgacggccgtgatgaagttcgcttaccggttttcaaatttgctgggtacggtgtaccggcgtgggaacctaaattttacctgcgatggaaattcagttatcagtcccgtgggcaatagagtcactgtatttgaccttaaaaacaacaaatctgacacgctgcccctggccactcggtacaacgtcaagtgcgtggggctgtccccggatggccgcctcgctatcatcgtcgatgaagggggcgatgcgctgctggtcagcctggtctgcaggtctgtgctgcaccacttccacttcaagggctctgtgcacagtgtgtccttctcccctgatggcaggaagtttgttgtcacaaagggtaacattgcccagatgtatcatgcccctgggaagaagcgggagttcaacgccttcgttctggacaagacctattttgggccctacgatgagaccacctgcatcgactggacggatgactccaggtgctttgtggttgggagcaaagacatgtccacctgggtgttcggagccgagcgctgggacaacctcatctactatgcactggggggacataaggatgccatcgtggcctgcttctttgaatccaacagcctggacctgtactcactcagccaggacggagtgctgtgcatgtggcagtgtgacacgccccccgagggcttgcggctgaagccccctgcgggctggaaagcagacctgttgcagcgggaggaggaagaggaggaggaggaggaccaggagggcgacagagagaccaccatccggggaaaagccactccggccgaggaggagaagacaggaaaagtgaagtactcacggctggccaagtacttcttcaataaagaaggggattttaacaacctgacagctgcagcatttcataagaagtctcacctcttggtcactggctttgcttctggaatcttccatcttcatgagctgccagagtttaacctcatccactccctgagcatttcagatcagagcatcgcctcagtggccatcaatagctcgggggactggattgcttttggctgttcaggcctgggccagctgctggtgtgggagtggcagagtgagtcctacgtgctcaagcagcagggccacttcaacagcatggtggccctggcctactcgcccgacggacagtacatcgtgactggcggggacgacggcaaggtcaaggtgtggaacaccctcagcggcttctgcttcgtcacttttacggagcactccagcggggtgaccggtgtgacctttactgccaccggctacgttgtggtgacctcatccatggacgggaccgtgcgagcctttgaccttcacaggtaccgaaacttccgcaccttcacctctccacgccccacccagttctcctgtgtggcggtggatgcgagcggtgagatcgtctctgcaggggcgcaggactcctttgagattttcgtgtggtccatgcagacaggcaggctccttgatgttttgtctggacacgaagggcccatcagtggtctgtgttttaacccaatgaagtccgtcctggccagtgcctcctgggacaagacagtgcgcctatgggacatgtttgacagctggaggaccaaggagacgctggccctgacctctgatgctctggctgtgacttttcgccctgatggtgcggagctggctgtggccacactgaactcacagatcaccttctgggaccctgagaacgcggtgcagacgggctccattgagggcaggcatgacctcaagactggcaggaaggagctggacaagattacagccaagcacgcggccaaggggaaggccttcaccgccctgtgctactctgcagacggccacagcatcctggcgggaggcatgtccaagttcgtgtgcatctaccacgtccgtgagcagattctcatgaagaggttcgagatctcttgcaacctgtctttggacgccatggaggaatttttgaaccgaagaaaaatgacagagtttggcaacctggcactaattgatcaggatgctgggcaggaggatggagtcgcgataccactgccaggcgtcaggaaaggtgacatgagttctcggcacttcaaacctgagatcagggtgacctcactccgcttctctcccactgggcgctgctgggcggccaccaccacggagggactcctcatctactccctggacacccgcgtgctctttgacccgtttgagctggacaccagcgtcacccccgggagggtgcgcgaggcactgcgccagcaggacttcaccagggccatcctcatggccctccggctcaacgagagcaaactggtgcaggaggccctggaggcggtgcccaggggcgagattgaagtggtcacctcctcccttcctgaactgtatgtggagaaagtgctggagtttttagcttcctcctttgaagtgtctcgccacctggaattctacctcctctggactcacaaactgctcatgttgcacggacagaagctgaagtccagagccgggacgctgctgcctgtcattcagttcctccagaagagcatccagcggcacctggacgacctgtcgaaactctgtagctggaaccactataacatgcagtacgcactagcagtttccaagcagcggggcacaaaacgctccctagacccgctgggaagtgaggaggaggcagaagcatctgaagatgacagcctgcatctgcttggaggaggaggcagagactcagaagaagagatgctggcctagagccagccggttgcagcgttggattgtgccggctaagacctgccagggagatgggacccttgtgccacctgggccagcaaagaggaggggtccagagaacagctgaaatactgtcactagtggtagtgacttgcttttcctgtgcacacatgtagcccatcaggacagcgagccgacgggtcacgccaggggccggcacgcactggcacctggccccaggagcggggccgtgtgaacggtgatgaatgttgaaaatgcgtctcagagaggtattcacatgaactttgtatgagacttatttatatctttaacataaaggtttgataaagaacttagggattaaaaaaaagatggagttttctaacgtgaggatgaagtctacacttcagattaaaaagggttatgttgtaaaaaaaaaaaaaaaaaa

SEQ ID NO: 1799 - DNA, 4347 bp, Homo sapiens
cacggtagtcgtggcgaccaagcaacccggcaacgcgagtcaacaacaacaaccgcccggccgacccccacccccaccccccaggcccggcccggggaccccagcacgtcccgtccccttcccaacatcgactccgagacctccgaaaagcgtttccgcagacagaagtggggagaagcggaggaattaaaaaaaaaaaaaagccttatttattatcattttccccaccgttggcatggcaacacaggcgtatactgagctacaggcagccccgccaccatcccagccgccacaggccccgccacaagcccagccccagccgccaccgccaccacccccagcggcaccccagcccccgcagccacccaccgctgctgccacccctcagccccaatatgtcaccgagctgcagagcccccagccccaggcacagccaccgggtggccagaagcagtacgtgacggagctcccggctgtacccgcaccctcgcagccaaccggtgcacccaccccttcgcctgcaccccagcagtacatcgtggtcactgtctctgaaggtgccatgcgggccagcgagacagtgtcggaggccagccccggctccaccgccagccagaccggcgttcctactcaggtggttcagcaggtgcagggcacccagcagcggctgctggtccagacgagcgtgcaggccaagccaggccacgtgtcgcccctccagctgaccaacatccaagtgccccagcaggctcttcccacgcagcgtctggtggtgcagagcgcagccccaggcagcaaaggtggccaggtctccctgacggtccatggtacccagcaggtgcactcgcccccagagcagtcgccggtgcaggccaacagctcttccagcaagacagccggggcccccacgggcacagtgccacagcagctgcaggtccacggcgtccagcagagtgtccccgtcacccaagagagatctgtggtccaggccactccacaagcgcccaaacccggcccggtgcagccgctgaccgtgcagggcctccagccagtccacgtggctcaagaggtgcagcagctccagcaggtgcccgtcccacacgtgtactccagccaggtgcagtatgtggagggcggcgatgccagctacacggccagtgccatccgttccagcacctactcctatcccgagacgccgctgtacacgcagacggcaagcaccagctactacgaggccgcaggcacggccacccaggtcagcacccccgccacctcccaggcggtggccagcagtggctccatgcccatgtacgtgtccggcagccaggtcgtcgccagctccgccagcactggggctggggccagcaacagcagcggaggtggtggcagtggtggtggcggcggcggcgggggaggcggtggcgggggtggcagtggcagcaccggaggcggcggcagcggagcaggcacctacgtgatccaaggcggctacatgctgggcagtgccagccagtcttactctcacaccacccgtgcctcgccagccacggtccagtggctcctggacaactatgagacggctgagggcgtgagtctgccacggagcaccctctactgccactacttactgcactgccaggagcagaagctggagcccgtcaacgccgcctccttcggcaagctcatccgctccgtcttcatgggcctgcgaacccgccgtctgggcaccaggggcaactccaagtaccactactatggcctgcgcatcaaggccagctcacccctgctgcggctgatggaggaccagcagcacatggccatgcggggccagcccttctcgcagaagcagaggctcaagcccatccagaagatggaaggcatgaccaacggcgtggcggtggggcagcagccgagcacggggctgtcggacatcagcgcccaggtgcagcagtaccagcaatttttggatgcctctcggagcctccctgacttcacagagctcgacctccagggcaaggtgctgcctgagggcgtcgggcccggggacatcaaagccttccaggtcctgtaccgggaacactgtgaggccattgtcgacgtcatggtgaacctgcagttcaccctggtggagacgctgtggaagaccttctggaggtacaacctcagccagcccagtgaggcgccaccgctggctgtacatgacgaggccgagaagcgactgcccaaagccatcctggtgctcctctccaagttcgagcccgtgctccaatggaccaagcactgtgacaacgtgctgtaccagggcctggtggaaatcctcattcccgacgtgctgcggcccatccccagtgccttgacccaagcgatccggaactttgccaagagcctggagagctggctcacccacgccatggtcaacatccccgaggagatgctgcgggtgaaggtggccgcggctggcgccttcgcgcagacactgcggcgctacacgtcgctcaaccacctggcgcaggcggcgcgcgctgtgctgcagaacaccgcacagatcaaccagatgctgagcgacctcaaccgcgtggacttcgccaacgtgcaggagcaggcctcgtgggtgtgccgctgcgaggaccgcgtggtgcagcggctggagcaggacttcaaggtgacgctgcagcagcagaactcgctggagcagtgggcggcctggctggacggcgtggtgagccaggtgctcaagccctaccagggcagcgccggcttccccaaggccgccaagctcttcctcctcaagtggtccttctacagctccatggtgatccgggacctgaccctgcgcagcgccgccagcttcggttccttccacctcatccggctgctctacgacgagtacatgtactacctgatcgagcaccgcgtagcccaggccaagggcgagacccccatcgccgtcatgggcgagttcgccaatctggccacctccctgaaccccctggaccccgacaaagacgaggaggaagaagaggaggaggagagcgaggacgagctgccgcaggacatctcactggcggctggcggcgagtcacccgcgctgggcccggagaccctggagccgccggccaagctggcgcggactgacgcgcgcggcctcttcgtgcaggcgctgccctccagctaagcccttggcctccccgccccacccgcccccgccacccctccacgccagggtccctcaaagcttctgtggcttcgtggtcactgctccagcctcagccagggcagggagggggactccgagacagggaagaccggggccctcctcccttatggggccggcacaatcagtgggctgggcggagccgcagctgcaaactctgacacaaaagacgtgccttaaggaacccgccgcgtgcccaggtgccccgcggggcatccagctcggccccttggccgcccccctcccaggccccagcgtcttctccccagccccgtcctcccaccaccccagggggcaggcaggcaggccccctcccgtgcgaaactgttaacttattcagctcgctggctttgcacagcctgtcctgggcccagccctgagccccgggccggcgcaggtgggcgtcacctggggactccccactgtcagcagcagccccgggacaccctacccccagcaaccccactgcttccccttcttggtattaagtgcaattaaagccgtgggtgtcgcatcttctccagcgctgggccctcccttgcccccaagctcaagaagggggcactgcccggcccggctgtgaggagggcggcagggggcacggcctccagcttccaaagagcagcgagccgcggagccggggagtgcccacagaccccagcccccgcgcccccgccctccgccgctggtttgtaatggaaccttttctgtgcccctatcttcccggagaccacgcttctcctccgtgccgtgcgacccccaccccatgactattgtgcgattcgtgagcgccgcccgagcggagttggtaacttgttgggtttttttccaaccatcatggccttatctgttccagttttctcagtgttttcagcctgtgagatagatgtttatggcaagaaaaaggaaaaaaaaatggaaatctgacctattgtataaaaatcactattttgtgtgctccgcgtgctatagcttttggggcggccctgcccagtccccgtgcccacggggctccctctcccggtggtgaaagtgtccacacgtgtggtagtctagtgtgccgagctgttttctacctttttgtagtctttcttaaaacaataaattccgctgtgaaaaaaaaaaaaaaaaaa

SEQ ID NO: 1800 - DNA, 1501 bp, Homo sapiens
atagaggacacgaccaagatggcggcggtgtctggcttggtgcggagaccccttcgggaggtctccgggctgctgaagaggcgctttcactggaccgcgccggctgcgctgcaggtgacagttcgtgatgctataaatcagggtatggatgaggagctggaaagagatgagaaggtatttctgcttggagaagaagttgcccagtatgatggggcatacaaggttagtcgagggctgtggaagaaatatggagacaagaggattattgacactcccatatcagagatgggctttgctggaattgctgtaggtgcagctatggctgggttgcggcccatttgtgaatttatgaccttcaatttctccatgcaagccattgaccaggttataaactcagctgccaagacctactacatgtctggtggccttcagcctgtgcctatagtcttcaggggacccaatggtgcctcagcaggtgtagctgcccagcactcacagtgctttgctgcctggtatgggcactgcccaggcttaaaggtggtcagtccctggaattcagaggatgctaaaggacttattaaatcagccattcgggataacaatccagtggtggtgctagagaatgaattgatgtatggggttccttttgaatttctcccggaagctcagtcaaaagattttctgattcctattggaaaagccaaaatagaaaggcaaggaacacatataactgtggtttcccattcaagacctgtgggccactgcttagaagctgcagcagtgctatctaaagaaggagttgaatgtgaggtgataaatatgcgtaccattagaccaatggacatggaaaccatagaagccagtgtcatgaagacaaatcatcttgtaactgtggaaggaggctggccacagtttggagtaggagctgaaatctgtgccaggatcatggaaggtcctgcgttcaatttcctggatgctcctgctgttcgtgtcactggtgctgatgtccctatgccttatgcaaagattctagaggacaactctatacctcaggtcaaagacatcatatttgcaataaagaaaacattaaatatttagtttggacttgaatatcaagtcgttgaaatttatttgaaatacttgctggcactgcacctggatttgtactgcaagacctgactattcataaaggaaaacgatttctaaagcaacagcaggtatttttgtacagggaagtttaaatgtgtttgtgtatggaaaactctccactctcctcccctagatgccatgcttccttttgtctgttacggttgccatgttctttgaataacaaattatatcacattttatcctctctcaccacaaggacaaagtatggatgtggcagagtcctgatgaaagatgtatccaaacaagataacttatatgtataaaattaaagcatataatacacatttactgttagtttgttttgataaggaataaaggaatttctaacatg

SEQ ID NO: 1801 - DNA, 4562 bp, Homo sapiens
gccagggcgtgtcccgtgtgcccgagagcgccggcggcggggccggagggcgggccctgggccgagtgacaggccgcagccccccgagcaccgtcgaagccggcgcgcccgcccggtgcagccgctgtgcgagagcgaccccgcggtccaagcctcgcgtggccctgccgggccccttctttccccgggtagggcgcagcttcccagcctccgccccggcctcgcctggcgcttccttccgggtccttcggcctttccctggcggtgcggcaggccctcgcctcatcccaccaggcacgccgcggtgctcggccctgggtatccgggcaggctgcctccgttagggccgcccctgctctccggacgcgacttttcattggtctcagaatttcttggctcctcttggcctctgcagccttgctggaggctgccctgcggaatctgaatatggatcagaaactttcgaagttggtagaagagctcacaacttcaggagaaccccgactaaatcctgagaaaatgaaggaactgaagaaaatttgcaagtcttcagaggagcagctgagccgcgcctaccgcctgctgatagcacagctgacccaggagcacgccgagatccgtctctcagccttccagatcgtggaggaactcttcgtcaggtctcaccagttccggatgctggttgtttccaacttccaggagttcctggagctcacgctgggcacagaccccgcacagcctctgccgccccccagggaggcggcacagaggctgaggcaggcgaccacccgggccgtggaagggtggaatgagaagtttggggaggcctacaagaagcttgccttgggctaccacttcttaagacacaacaaaaaggtggattttcaagacacgaatgctcggagtctggcagaaaggaagagagaagaggagaagcagaagcacttggataaaatttatcaagaaagagccagccaggcggagagggagatgcaagaaatgtctggagaaattgaatcctgcttgacggaggtagagagctgctttaggctgctggtgccttttgactttgacccgaacccggagacggaatcccttggcatggcttctggcatgtccgatgcccttcgctcctcctgcgcgggccaggtgggcccctgccggtctggcacccctgacccccgggacggggagcagccctgctgcagtagagacctgcctgcctctgcaggccaccccagagcgggcggcggggcacagccatcccagacagccacaggtgacccctcagatgaggacgaggacagcgacctcgaggagtttgtgcggagccacgggctgggctcgcacaagtacacgctggatgtggagctctgctcagagggcctgaaggtgcaggagaacgaggacaaccttgctctcatccacgccgcccgcgacacactcaagctcatccggaacaagttcctgccggctgtgtgctcgtggatccagcgcttcacccgcgtcgggacccacggtggatgtttaaagcgtgccattgacctgaaggctgaattggagctcgtactgagaaaatacaaggagctggacatcgagcctgagggaggggaaaggcgcaggacagaagccctgggggatgcggaggaagatgaggacgatgaggactttgtggaggtccctgagaaggaggggtatgagccacacatccccgaccacttgcggcctgagtatgggctggaggcagcaccagagaaagacacagttgtgcggtgcttgcggacgaggacgaggatggacgaggaggtgtcggaccccacctctgcggctgctcagctgcggcagctccgggaccacttgcctccaccctcatctgccagcccctccagagcgttgccagagccacaggaggcccagaagctggcagcagagcgggcccgggcgcctgtggtgccctacggcgtggacctgcactactggggccaggagctccccacagccgggaagattgtcaagtctgactcccagcaccgcttctggaagcccagcgaggtggaggaggaagtggtcaatgccgacatctccgagatgctccggagccgccacatcacttttgccgggaagtttgagcctgtgcagcactggtgccgtgccccgaggccagacggccggctctgtgagcgccaagaccggctgaagtgccctttccatgggaagattgttccaagggacgacgaaggacggccgctcgacccggaagacagggctcgtgagcagcggcggcagctgcagaagcaggagcgcctggaatggcaggaccctgagttgatgagagacgtggaagcagccacagggcaggatctcggctcgtccaggtacagcgggaaaggcagggggaagaagaggaggtaccccagcctcaccaacctgaaggctcaggctgataccgcccgcgctcgcattgggagaaaagtcttcgccaaggcagctgtgcggagggtagtggcagccatgaaccggatggaccagaagaagcacgagaagttttcaaaccagtttaactacgcactgaactagagagcggggcccagtgcactggccatcagcactttctccctctgccagtgtctcaggacagcagagtgggcgtgggtctgggcagtaaccatgctttgtctattactgtgtttgatgtaaagaaatggtgtgttgcaatgccctgaaggtacggccgctctgctgctacagggttcggcatcgtctggtgatgggtctggcctcgcagaagaggccctcgggcctggagatgtgaacacaggcagcgaccctgttccagagggcttctgcgagtcctcgtgaggccagtgcttgtcgtggtgtggggttcagcacggacggaatgtgtgtgcagctcagccttcagagcgtgcattccccagccaggaggcgaccactcagaggaactctgggaaacccacttttgtgcaaatgctgtttttaacacaaacacaaaggctagtgaaccgttcagtcatctgctttctgtttctggatgtgccttttcatacatgtgtcctcttgtccctggcttcttacacttggcgttgtttttaaggtttatccatgcagttcccctccaatgtataaaacaaaggaggtgaaaacctgtccatgcggaagcttgtgcacccatgttcacagcagcattggagaaggataccgaacatcttctcgtgggcttactggccatttgtgtatctcctttggagaggagtctattcaaacctcttgcctatttttaattgaatgatttatcttgagttgtaacagttgttttttttttgtttttccttttagagatgggcttttgctcttacccaggctgagtgcagtggcagaatcatggctcagtgcagcctcaaactcctgggctcaagccatccttccacgtcagcctcccaggtagctgggactacaggcacacaccacaacacctggctaattttttaaattttttgtagagatgaggtctcactgtgttgcccacggtgatctcgaactcctagcctcaagcgatcctcctgcttcggtctcccaaagtgttgggattacaggcatgagccaccactcctggccaggagtttatatgtatactgtggatactagatcctcatgtggtttgcaaaaactttatttatttatttatttatttttgaaatggaatcttgctctgtcgccaggctggagtgcaatggcgtgatctcggctcactgcaactaccacctcctgggttcaagcgattcgcctgcgtcagcgtcctgagtagctgggactacaggcgcgcaccaccacgcccagctaatttttgtatttttagtagagacgggatttcactgtgttggctgggatggtcttgatctcttgacctcgtgatccacccacctcggcctcccatagtgctgggattacaggtgtgagccaccgcactcagctgatttgcaaaaactttcttccatactgttgtttcactttctggatagtgtcctctgaagcacaaaagttaattttgatgaagtacagcaatttatctgtttttttcttttgttgcttatgcttttgctgtcacatttcagaagccatcacctaatccaagatcacagagatttacacctagtttctaataagcattttataatttcagctcttatgtgtagatctttgatccattgtgaattaagttttgtgtgtggtgtaagagcccacattcttttgcatgtggatatccagttgtcccagcaccatttgttgaaaacattatttttccccattgaattatcttcgcaccattattgataatcagttgaccaaaaatgtacaggcttatttctgggcacttgactctattccattgacctgtttaaccttatgccagtgccacagtgccttgatcagtgctgctttgttgtgagaagttttactttgttctgcttcaaggctgttttgactcttctgcatctcttgcatttccaaatgaattttaggatccactcatcagtttcttc

SEQ ID NO: 1802 - DNA, 3994 bp, Homo sapiens
gcaagcggcgatggcggcggcggcgggagctgcagcggcggcggccgccgagggggaggcccccgctgagatgggggcgctgctgctggagaaggaaaccagaggagccaccgagagagttcatggctctttgggggacacccctcgtagtgaagaaaccctgcccaaggccaaccccgactccctggagcctgctggcccctcatctccagcctctgtcactgtcactgttggtgatgagggggctgacacccctgtaggggctacaccactcattggggatgaatctgagaatcttgagggagatggggacctccgtgggggccggatcctgctgggccatgccacaaagtcattcccctcttcccccagcaaggggggttcctgtcctagccgggccaagatgtcaatgacaggggcgggaaaatcacctccatctgtccagagtttggctatgaggctactgagtatgccaggagcccagggagctgcagcagcagggtctgaaccccctccagccaccacgagcccagagggacagcccaaggtccaccgagcccgcaaaaccatgtccaaaccaggaaatggacagcccccggtccctgagaagcggccccctgaaatacagcatttccgcatgagtgatgatgtccactcactgggaaaggtgacctcagatctggccaaaaggaggaagctgaactcaggaggtggcctgtcggaggagttaggttctgcccggcgttcaggagaagtgaccctgacgaaaggggaccccgggtccctggaggagtgggagacggtggtgggtgatgacttcagtctctactatgattcctactctgtggatgagcgcgtggactccgacagcaagtctgaagttgaagctctaactgaacaactaagtgaagaggaggaggaggaagaggaggaagaagaagaagaggaagaggaggaggaagaggaagaagaagaggaagatgaggagtcagggaatcagtcagataggagtggttccagtggccggcgcaaggccaagaagaaatggcgaaaagacagcccatgggtgaagccgtctcggaaacggcgcaagcgggagcctccgcgggccaaggagccacgaggagtgaatggtgtgggctcctcaggccccagtgagtacatggaggtccctctggggtccctggagctgcccagcgaggggaccctctcccccaaccacgctggggtgtccaatgacacatcttcgctggagacagagcgagggtttgaggagttgcccctgtgcagctgccgcatggaggcacccaagattgaccgcatcagcgagagggcggggcacaagtgcatggccactgagagtgtggacggagagctgtcaggctgcaatgccgccatcctcaagcgggagaccatgaggccatccagccgtgtggccctgatggtgctctgtgagacccaccgcgcccgcatggtcaaacaccactgctgcccgggctgcggctacttctgcacggcgggcaccttcctggagtgccaccctgacttccgtgtggcccaccgcttccacaaggcctgtgtgtctcagctgaatgggatggtcttctgtccccactgtggggaggatgcttctgaagctcaagaggtgaccatcccccggggtgacggggtgaccccaccggccggcactgcagctcctgcacccccacccctgtcccaggatgtccccgggagagcagacacttctcagcccagtgcccggatgcgagggcatggggaaccccggcgcccgccctgcgatcccctggctgacaccattgacagctcagggccctccctgaccctgcccaatgggggctgcctttcagccgtggggctgccactggggccaggccgggaggccctggaaaaggccctggtcatccaggagtcagagaggcggaagaagctccgtttccaccctcggcagttgtacctgtccgtgaagcagggcgagctgcagaaggtgatcctgatgctgttggacaacctggaccccaacttccagagcgaccagcagagcaagcgcacgcccctgcatgcagccgcccagaagggctccgtggagatctgccatgtgctgctgcaggctggagccaacataaatgcagtggacaaacagcagcggacgccactgatggaggccgtggtgaacaaccacctggaggtagcccgttacatggtgcagcgtggtggctgtgtctatagcaaggaggaggacggttccacctgcctccaccacgcagccaaaatcgggaacttggagatggtcagcctgctgctgagcacaggacaggtggacgtcaacgcccaggacagtggggggtggacgcccatcatctgggctgcagagcacaagcacatcgaggtgatccgcatgctactgacgcggggcgccgacgtcaccctcactgacaacgaggagaacatctgcctgcactgggcctccttcacgggcagcgccgccatcgccgaagtccttctgaatgcgcgctgtgacctccatgctgtcaactaccatggggacacccccctgcacatcgcagctcgggagagctaccatgactgcgtgctgttattcctgtcacgtggggccaaccctgagctgcggaacaaagagggggacacagcatgggacctgactcccgagcgctccgacgtgtggtttgcgcttcaactcaaccgcaagctccgacttggggtgggaaatcgggccatccgcacagagaagatcatctgccgggacgtggctcggggctatgagaacgtgcccattccctgtgtcaacggtgtggatggggagccctgccctgaggattacaagtacatctcagagaactgcgagacgtccaccatgaacatcgatcgcaacatcacccacctgcagcactgcacgtgtgtggacgactgctctagctccaactgcctgtgcggccagctcagcatccggtgctggtatgacaaggatgggcgattgctccaggaatttaacaagattgagcctccgctgattttcgagtgtaaccaggcgtgctcatgctggagaaactgcaagaaccgggtcgtacagagtggcatcaaggtgcggctacagctctaccgaacagccaagatgggctggggggtccgcgccctgcagaccatcccacaggggaccttcatctgcgagtatgtcggggagctgatctctgatgctgaggctgatgtgagagaggatgattcttacctcttcgacttagacaacaaggatggagaggtgtactgcatagatgcccgttactatggcaacatcagccgcttcatcaaccacctgtgtgaccccaacatcattcccgtccgggtcttcatgctgcaccaagacctgcgatttccacgcatcgccttcttcagttcccgagacatccggactggggaggagctagggtttgactatggcgaccgcttctgggacatcaaaagcaaatatttcacctgccaatgtggctctgagaagtgcaagcactcagccgaagccattgccctggagcagagccgtctggcccgcctggacccacaccctgagctgctgcccgagctcggctccctgccccctgtcaacacatgagaacggaccacaccctctctccccagcatggatggccacagctcagccgcctcctctgccaccagctgctcgcagcccatgcctgggggtgctgccatcttctctccccaccaccctttcacacattcctgaccagagatcccagccaggccctggaggtctgacagcccctccctcccagagctggttcctccctgggagggcaacttcagggctggccaccccccgtgttccccatcctcagttgaagtttgatgaattgaagtcgggcctctatgccaactggttccttttgttctcaataaatgttgggtttggtaataaaaaaaaaaaaaaaaaaaaaaaaaaaaa

SEQ ID NO: 1803 - DNA, 3892 bp, Homo sapiens
gcaagcggcgatggcggcggcggcgggagctgcagcggcggcggccgccgagggggaggcccccgctgagatgggggcgctgctgctggagaaggaaaccagaggagccaccgagagagttcatggctctttgggggacacccctcgtagtgaagaaaccctgcccaaggccaaccccgactccctggagcctgctggcccctcatctccagcctctgtcactgtcactgttggtgatgagggggctgacacccctgtaggggctacaccactcattggggatgaatctgagaatcttgagggagatggggacctccgtgggggccggatcctgctgggccatgccacaaagtcattcccctcttcccccagcaaggggggttcctgtcctagccgggccaagatgtcaatgacaggggcgggaaaatcacctccatctgtccagagtttggctatgaggctactgagtatgccaggagcccagggagctgcagcagcagggtctgaaccccctccagccaccacgagcccagagggacagcccaaggtccaccgagcccgcaaaaccatgtccaaaccaggaaatggacagcccccggtccctgagaagcggccccctgaaatacagcatttccgcatgagtgatgatgtccactcactgggaaaggtgacctcagatctggccaaaaggaggaagctgaactcaggaggtggcctgtcggaggagttaggttctgcccggcgttcaggagaagtgaccctgacgaaaggggaccccgggtccctggaggagtgggagacggtggtgggtgatgacttcagtctctactatgattcctactctgtggatgagcgcgtggactccgacagcaagtctgaagttgaagctctaactgaacaactaagtgaagaggaggaggaggaagaggaggaagaagaagaagaggaagaggaggaggaagaggaagaagaagaggaagatgaggagtcagggaatcagtcagataggagtggttccagtggccggcgcaaggccaagaagaaatggcgaaaagacagcccatgggtgaagccgtctcggaaacggcgcaagcgggagcctccgcgggccaaggagccacgaggagtgtccaatgacacatcttcgctggagacagagcgagggtttgaggagttgcccctgtgcagctgccgcatggaggcacccaagattgaccgcatcagcgagagggcggggcacaagtgcatggccactgagagtgtggacggagagctgtcaggctgcaatgccgccatcctcaagcgggagaccatgaggccatccagccgtgtggccctgatggtgctctgtgagacccaccgcgcccgcatggtcaaacaccactgctgcccgggctgcggctacttctgcacggcgggcaccttcctggagtgccaccctgacttccgtgtggcccaccgcttccacaaggcctgtgtgtctcagctgaatgggatggtcttctgtccccactgtggggaggatgcttctgaagctcaagaggtgaccatcccccggggtgacggggtgaccccaccggccggcactgcagctcctgcacccccacccctgtcccaggatgtccccgggagagcagacacttctcagcccagtgcccggatgcgagggcatggggaaccccggcgcccgccctgcgatcccctggctgacaccattgacagctcagggccctccctgaccctgcccaatgggggctgcctttcagccgtggggctgccactggggccaggccgggaggccctggaaaaggccctggtcatccaggagtcagagaggcggaagaagctccgtttccaccctcggcagttgtacctgtccgtgaagcagggcgagctgcagaaggtgatcctgatgctgttggacaacctggaccccaacttccagagcgaccagcagagcaagcgcacgcccctgcatgcagccgcccagaagggctccgtggagatctgccatgtgctgctgcaggctggagccaacataaatgcagtggacaaacagcagcggacgccactgatggaggccgtggtgaacaaccacctggaggtagcccgttacatggtgcagcgtggtggctgtgtctatagcaaggaggaggacggttccacctgcctccaccacgcagccaaaatcgggaacttggagatggtcagcctgctgctgagcacaggacaggtggacgtcaacgcccaggacagtggggggtggacgcccatcatctgggctgcagagcacaagcacatcgaggtgatccgcatgctactgacgcggggcgccgacgtcaccctcactgacaacgaggagaacatctgcctgcactgggcctccttcacgggcagcgccgccatcgccgaagtccttctgaatgcgcgctgtgacctccatgctgtcaactaccatggggacacccccctgcacatcgcagctcgggagagctaccatgactgcgtgctgttattcctgtcacgtggggccaaccctgagctgcggaacaaagagggggacacagcatgggacctgactcccgagcgctccgacgtgtggtttgcgcttcaactcaaccgcaagctccgacttggggtgggaaatcgggccatccgcacagagaagatcatctgccgggacgtggctcggggctatgagaacgtgcccattccctgtgtcaacggtgtggatggggagccctgccctgaggattacaagtacatctcagagaactgcgagacgtccaccatgaacatcgatcgcaacatcacccacctgcagcactgcacgtgtgtggacgactgctctagctccaactgcctgtgcggccagctcagcatccggtgctggtatgacaaggatgggcgattgctccaggaatttaacaagattgagcctccgctgattttcgagtgtaaccaggcgtgctcatgctggagaaactgcaagaaccgggtcgtacagagtggcatcaaggtgcggctacagctctaccgaacagccaagatgggctggggggtccgcgccctgcagaccatcccacaggggaccttcatctgcgagtatgtcggggagctgatctctgatgctgaggctgatgtgagagaggatgattcttacctcttcgacttagacaacaaggatggagaggtgtactgcatagatgcccgttactatggcaacatcagccgcttcatcaaccacctgtgtgaccccaacatcattcccgtccgggtcttcatgctgcaccaagacctgcgatttccacgcatcgccttcttcagttcccgagacatccggactggggaggagctagggtttgactatggcgaccgcttctgggacatcaaaagcaaatatttcacctgccaatgtggctctgagaagtgcaagcactcagccgaagccattgccctggagcagagccgtctggcccgcctggacccacaccctgagctgctgcccgagctcggctccctgccccctgtcaacacatgagaacggaccacaccctctctccccagcatggatggccacagctcagccgcctcctctgccaccagctgctcgcagcccatgcctgggggtgctgccatcttctctccccaccaccctttcacacattcctgaccagagatcccagccaggccctggaggtctgacagcccctccctcccagagctggttcctccctgggagggcaacttcagggctggccaccccccgtgttccccatcctcagttgaagtttgatgaattgaagtcgggcctctatgccaactggttccttttgttctcaataaatgttgggtttggtaataaaaaaaaaaaaaaaaaaaaaaaaaaaaa

SEQ ID NO: 1804 - DNA, 2113 bp, Homo sapiens
cgctcttacaccctgggcagcctcctccgatggcccactccccgcctctttcactttctggagatcactgagctctccatcctctctgggaatttaccgatgcccagaacgcccttctttcccccacacgaccctctcctagtctaactcctgggcgtgctttaagctcagctcaggcagcgtcaccttctctggaaagcccaaacccagccaccccactacccgctacccgcggcccacgctgatgaagacagcagaacacggaggccccgcgttcccgccgcgagagcaggagagaaagattacctcccgcgagctctagcgcgcccggctttccggcgcactccagggggcgtggctcgggtccacccgggctgcgagccggcagcacaggccaataggcaattagcgcgcgccaggctgcattccccgcgccggacccaaaagatgaacggaagttcgacccacggcgacccgacggcgagaccccgccccatccccgactgcctgaaccgcgccaggagacggaccgcaagtccagcgtacccacagacgactcaggcgggagacgagcggtgtcatggccgccgacagtgacgatggcgcagtttcagctcccgcagcttccgacggtggtgtcagcaaaagcacaacatctggggaggagctagtagtccaggttcccgtagtggatgtgcaaagcaacaacttcaaggagatgtggccatccctcctgctagccataaagacagctaatttcgtggctgtggacacggagctgagtgggcttggggacaggaagagtttgctgaaccagtgcattgaggaacgttacaaggccgtgtgtcatgctgccaggacccgttctatcctttccctgggcctcgcctgcttcaagcggcagccagacaagggtgaacattcctatctggctcaagtgttcaatctcactctgctgtgcatggaggagtatgtcatagaaccaaagtctgtgcagttcctgatacagcatggcttcaacttcaaccagcagtatgcccaaggcatcccctaccataagggcaatgacaagggtgatgagagccagagccagtcagtacggaccctattcctggagctaatccgagcccgccggcccctggtgctacacaatggccttatagacttggtgttcctgtaccagaacttctatgcacacctccctgagagtctgggaaccttcaccgctgacctgtgtgagatgttcccagcaggcatttatgacaccaaatatgctgctgagtttcatgcccgtttcgtggcctcctacttagaatatgccttccggaaatgtgaacgggaaaatgggaagcagcgggcagctggcagcccacaccttaccctggagttctgcaactatccttccagcatgagggaccatattgattaccgctgctgcctgcccccagcaacccaccgtcctcatcccaccagcatctgtgacaacttctcggcttatggctggtgccccctgggaccacagtgtcctcagtctcacgatattgaccttatcattgacactgatgaggctgcggcagaggacaagcggcgacggcgacgacgtagggaaaaacggaagagggctttattgaacctaccggggacacagacctctggggaagctaaggatggtcctcccaagaagcaggtctgtggggatagcatcaagcctgaagaaaccgagcaggaggtggctgccgatgaaactaggaacctgcctcactccaagcaaggcaacaaaaatgacttagagatggggattaaggcagcaaggcctgaaatagctgatagagctacctcagaagtgccagggagccaagccagtcctaacccagtgcctgggggtggattgcaccgggctggttttgatgcctttatgacaggttatgtgatggcctatgtggaagtgagccagggaccgcaaccctgcagctctggaccctggctccctgaatgccacaataaggtatatttgagtggcaaagctgtacccctcacagtggccaagagccagttctctcgttcctccaaagcccacaatcagaagatgaagctcacttggggcagtagctga

SEQ ID NO: 1805 - DNA, 2038 bp, Homo sapiens
ggcccgcgggactcagaccagcggggagcgcggcctccgcccttggggccctcccgccgggccggagacccaagcccccaacgccaggccctgccctggaagcgctcgcggcccggcgcctggacgggggagttgctgctctttggcgtaaattgcaatcgattagggatcgtttctcagaatcaagttagaagtgagagttcagataagtgaggccgccattgctgctttgaacacctcagaaggggagaatggatttatcaggagtgaaaaagaagagcttgctaggagtcaaagaaaataataaaaagtccagcactagggctccttcacctaccaaacgcaaagaccgctcagatgagaagtccaaggatcgctcaaaagataaaggggccaccaaggagtcgagtgagaaggatcgcggccgggacaaaacccgaaagaggcgcagcgcttccagtggtagcagcagtaccaggtctcggtccagctcgacttccagctcaggctccagcaccagcactggctcaagcagtggctccagctcttcctcagcatccagccgctcaggaagctccagcacctcccgcagctccagctctagcagctcttctggctctccaagtccttctcggcgcagacacgacaacaggaggcgctcccgctccaaatccaaaccacctaaaagagatgaaaaggagaggaaaaggcggagcccatctcctaagcccaccaaagtgcacattgggagactcacccggaatgtgacaaaggatcacatcatggagatattttccacctatgggaaaattaaaatgattgacatgcccgtggaaaggatgcatccccatctgtccaaaggctatgcgtacgtagagtttgagaatccagatgaagccgagaaggcgctgaagcacatggatggaggacaaattgatggccaggagatcactgccaccgccgtgctggccccctggcctaggccaccccccaggagattcagccctcccaggagaatgttgccaccaccgcctatgtggcgcaggtctcccccacggatgaggagaaggtcccgctccccgaggcgcaggtcccccgtgcgccggagatcacggtccccgggccgccgccgccacaggagccgctccagctccaactcctcccgataaacaggccactgaagctctcgcccctgtaacttataccccacccagctcagttttgtcacttttctagccaaaggaagaccagtaggaaagcaaacccttgactctggcaggatttgcaggcagcaggcagcacccctctgccagccgggccccggctgcagaagtgctgttggtttggatgctgtgtgcctgtcaagattccctccggttttctggctagaaagctcatccgtttccggtttctaagagtcagttcagtggcagagccaccagggaaaagtgaggctcttgggggtggtttgaccctgcttacctgggagcacacttttcccttccccgatgacctgggatggtggccaggccgtgcccttgctgttgctgggcagtgtccttttggaaagggagctgccccaggctttagtgcagctgccaaccctgttaggcctggcctctcgaggcctcttctgacctcaagggtcacaccccctcaaagatcctctcacccatggtagttgctgctcgtggttctgtctgtccgtgcaccgatgcacacaccgcaccccaccactgtactctgaaattggcgagtgagtggagagccagctctgcggagtcatcacgcagccatggttgtgcctgccgttcatggtggtctttcaggttatcttggcaacatgtacattgcttttattttttttcttttttgctttcattgtacagtcagtactataaaatttctcttttgagttttatacctttgtagcattttagatgacattgtgtttgtactttgttgtgtagagtggaagaattgtgttgaataaacccaagatcggaatgcaaaaaaaaaaaaaaaaaaaaaaaaaaaa

SEQ ID NO: 1806 - DNA, 1963 bp, Homo sapiens
gagcggcgccggcctcggcggctgaggaaagcaggaggaggtggcggcggcgggaagatgctgctctttggcgtaaattgcaatcgattagggatcgtttctcagaatcaagttagaagtgagagttcagataagtgaggccgccattgctgctttgaacacctcagaaggggagaatggatttatcaggagtgaaaaagaagagcttgctaggagtcaaagaaaataataaaaagtccagcactagggctccttcacctaccaaacgcaaagaccgctcagatgagaagtccaaggatcgctcaaaagataaaggggccaccaaggagtcgagtgagaaggatcgcggccgggacaaaacccgaaagaggcgcagcgcttccagtggtagcagcagtaccaggtctcggtccagctcgacttccagctcaggctccagcaccagcactggctcaagcagtggctccagctcttcctcagcatccagccgctcaggaagctccagcacctcccgcagctccagctctagcagctcttctggctctccaagtccttctcggcgcagacacgacaacaggaggcgctcccgctccaaatccaaaccacctaaaagagatgaaaaggagaggaaaaggcggagcccatctcctaagcccaccaaagtgcacattgggagactcacccggaatgtgacaaaggatcacatcatggagatattttccacctatgggaaaattaaaatgattgacatgcccgtggaaaggatgcatccccatctgtccaaaggctatgcgtacgtagagtttgagaatccagatgaagccgagaaggcgctgaagcacatggatggaggacaaattgatggccaggagatcactgccaccgccgtgctggccccctggcctaggccaccccccaggagattcagccctcccaggagaatgttgccaccaccgcctatgtggcgcaggtctcccccacggatgaggagaaggtcccgctccccgaggcgcaggtcccccgtgcgccggagatcacggtccccgggccgccgccgccacaggagccgctccagctccaactcctcccgataaacaggccactgaagctctcgcccctgtaacttataccccacccagctcagttttgtcacttttctagccaaaggaagaccagtaggaaagcaaacccttgactctggcaggatttgcaggcagcaggcagcacccctctgccagccgggccccggctgcagaagtgctgttggtttggatgctgtgtgcctgtcaagattccctccggttttctggctagaaagctcatccgtttccggtttctaagagtcagttcagtggcagagccaccagggaaaagtgaggctcttgggggtggtttgaccctgcttacctgggagcacacttttcccttccccgatgacctgggatggtggccaggccgtgcccttgctgttgctgggcagtgtccttttggaaagggagctgccccaggctttagtgcagctgccaaccctgttaggcctggcctctcgaggcctcttctgacctcaagggtcacaccccctcaaagatcctctcacccatggtagttgctgctcgtggttctgtctgtccgtgcaccgatgcacacaccgcaccccaccactgtactctgaaattggcgagtgagtggagagccagctctgcggagtcatcacgcagccatggttgtgcctgccgttcatggtggtctttcaggttatcttggcaacatgtacattgcttttattttttttcttttttgctttcattgtacagtcagtactataaaatttctcttttgagttttatacctttgtagcattttagatgacattgtgtttgtactttgttgtgtagagtggaagaattgtgttgaataaacccaagatcggaatgcaaaaaaaaaaaaaaaaaaaaaaaaaaaa

SEQ ID NO: 1807 - DNA, 2140 bp, Homo sapiens
tttgaaattaatgtccttctgttgactgcagaatttctgctggaaatgcagggaggctgcttgtggggttcgcgtgctgtgggaagtagggaaaatgagctggtttactttgtgtctttttgtgcatgcagactgtttggattttgccaacagtttctgggtgctgcctgctttttaaacttttaaaaaattgtaaacagcttcagtggctttgcagaaggaagctgtggtttctggtcttcctgttcagtcatgtttttttcagagggagggctaacatctggccatatttttcaacaaattcagaagtgagtagagaatgcatagtagctgtcggcagaggaggaaccagaatctctccaaagaaattcctcaaacagaatttcacacagggtattccatggagaatgagcctggaattgtctcgccatttaaacgagtattcctaaaaggtgaaaagagtagagataagaaagcccatgagaaggtgacagagaggcgccctctgcacactgtggtgttgtcattgcctgagcgcgtcgagccagacagactgctgagcgactatattgagaaggaggtaaagtatttaggtcagttaacgtccataccaggatacctgaatccctccagtaggactgaaatcctgcatttcatagacaatgcaaagagagcccaccagcttccgggacacttgactcaggagcacgatgctgtgctcagcctgtctgcgtacaacgtcaagctggcctggagggacggggaggatatcatcctcagggtgcccatccatgacatcgccgccgtctcctatgttcgggatgacgctgcacacctggtggtcctgaagacagcccaggacccagggatctcccccagccagagtctgtgtgcggaaagttccagaggcctcagtgcaggctccctgtcggagagtgcagttgggcccgtggaggcatgctgcctggtcatcctggctgcagagagcaaggtcgctgcggaggagctttgctgtctgctaggccaggtcttccaggttgtttacacggagtccaccatcgactttctggacagagcgatatttgatggggcctctaccccgacccaccacctgtccctgcacagcgatgactcttctacaaaagtggacattaaggagacctacgaggtggaagccagcactttctgcttccctgaatctgtggatgtgggtggtgcatcaccccacagcaagaccatcagtgagagcgagctgagcgccagcgccactgagctgctgcaggactacatgctgacgctgcgcaccaagctgtcatcacaggagatccagcagtttgcagcactgctgcacgagtaccgcaatggggcctctatccacgagttctgcatcaacctgcggcagctctacggggacagccgcaagttcctgctgcttggtctgaggcccttcatccctgagaaggacagccagcacttcgagaacttcctggagaccattggcgtgaaggatggccgcggcatcatcactgacagctttggcaggcaccggcgggccctgagcaccacatccagttccaccaccaatgggaacagggccacgggcagctctgatgaccggtcggcaccctcagagggggatgagtgggaccgcatgatctcggacatcagcagcgacattgaggcgctgggctgcagcatggaccaggactcagcatgatggacagtggatgggggggcacccacaccttccgcgcagtcgtcataggccttcccagaaggagctgcccagacctgcgtgtcagcccttggtggtggccagggagaggcgcccggtgcagatggccccgggcggcccaggtcctctactgtgaaggagcagggagctgccgagggacacgagcctcagtgcggggtggaaggctctttgccttgtccaccagggctcagccaagccctgcagtgtgtccccgctcggggagggcccggccgagcgggcagggagagccagtcctgtcggctgggcccttggacggctgtcagttttgcacatgatgttcctattgtaactctcagagaccttaaaaagaagtttactgcaatgtgaataatttaatctctggttgccaagcaaaaaaaaaaa

SEQ ID NO: 1808 - DNA, 1904 bp, Homo sapiens
gcgcggccggggcggagacttcgggcccggctggcgggcggcgccgggagcgcgggggcggcgggcccgggtcgagcatgtagcggctgctggcggcggggctcccggggcgggccgggcgggccgcgggagccgcacgcggcgatatggaagaggagggcaagaagggcaagaagcctggaattgtctcgccatttaaacgagtattcctaaaaggtgaaaagagtagagataagaaagcccatgagaaggtgacagagaggcgccctctgcacactgtggtgttgtcattgcctgagcgcgtcgagccagacagactgctgagcgactatattgagaaggaggtaaagtatttaggtcagttaacgtccataccaggatacctgaatccctccagtaggactgaaatcctgcatttcatagacaatgcaaagagagcccaccagcttccgggacacttgactcaggagcacgatgctgtgctcagcctgtctgcgtacaacgtcaagctggcctggagggacggggaggatatcatcctcagggtgcccatccatgacatcgccgccgtctcctatgttcgggatgacgctgcacacctggtggtcctgaagacagcccaggacccagggatctcccccagccagagtctgtgtgcggaaagttccagaggcctcagtgcaggctccctgtcggagagtgcagttgggcccgtggaggcatgctgcctggtcatcctggctgcagagagcaaggtcgctgcggaggagctttgctgtctgctaggccaggtcttccaggttgtttacacggagtccaccatcgactttctggacagagcgatatttgatggggcctctaccccgacccaccacctgtccctgcacagcgatgactcttctacaaaagtggacattaaggagacctacgaggtggaagccagcactttctgcttccctgaatctgtggatgtgggtggtgcatcaccccacagcaagaccatcagtgagagcgagctgagcgccagcgccactgagctgctgcaggactacatgctgacgctgcgcaccaagctgtcatcacaggagatccagcagtttgcagcactgctgcacgagtaccgcaatggggcctctatccacgagttctgcatcaacctgcggcagctctacggggacagccgcaagttcctgctgcttggtctgaggcccttcatccctgagaaggacagccagcacttcgagaacttcctggagaccattggcgtgaaggatggccgcggcatcatcactgacagctttggcaggcaccggcgggccctgagcaccacatccagttccaccaccaatgggaacagggccacgggcagctctgatgaccggtcggcaccctcagagggggatgagtgggaccgcatgatctcggacatcagcagcgacattgaggcgctgggctgcagcatggaccaggactcagcatgatggacagtggatgggggggcacccacaccttccgcgcagtcgtcataggccttcccagaaggagctgcccagacctgcgtgtcagcccttggtggtggccagggagaggcgcccggtgcagatggccccgggcggcccaggtcctctactgtgaaggagcagggagctgccgagggacacgagcctcagtgcggggtggaaggctctttgccttgtccaccagggctcagccaagccctgcagtgtgtccccgctcggggagggcccggccgagcgggcagggagagccagtcctgtcggctgggcccttggacggctgtcagttttgcacatgatgttcctattgtaactctcagagaccttaaaaagaagtttactgcaatgtgaataatttaatctctggttgccaagcaaaaaaaaaaa

SEQ ID NO: 1809 - DNA, 2185 bp, Homo sapiens
cgcgcggtgaccgttggcgccgaggggaggaggcagccgccgccgccgccgccgccgccgccgccgccgccgccgccgttgcgcagatccgggccgcggctgtggggagggcgacggagcgggtgaccttccggaggcgggagcgagcgaggaggcccgggagcgccgagcgtcgccgccgccgccgccatgaacaactcgggcgccgacgagatcgggaagctcttcgtgggcggtcttgactggagcacgacccaagagactctgcgcagctacttttcccaatatggagaagtcgtagattgtgttatcatgaaagataaaaccaccaaccagtctcgaggctttgggtttgtcaaatttaaagacccaaactgtgtggggacggtgctggccagcagaccgcacacgctagatggccgaaacatcgaccccaagccatgcacaccccgggggatgcagccggagagaacacggccgaaggaaggatggcagaaaggacccaggagcgataacagtaaatcaaataagatatttgtcggtggaattcctcacaattgtggtgagacagagctcagggaatacttcaagaagttcggagtggtcacggaggtagtcatgatctatgacgccgagaagcagaggccccgaggttttggatttattactttcgaggacgaacaatcagtggaccaggctgtcaacatgcattttcacgacatcatgggcaaaaaagtggaagttaaacgagctgagcctcgggacagcaagagccaagcgccgggacagccaggtgccagccagtgggggagccgggttgtgcccaacgctgccaatggctgggcaggccagcccccgcccacgtggcagcaaggatatggcccgcaaggaatgtgggtgccggcaggacaggcgattggtggctatggaccgccccctgcaggaagaggagcccccccgccacccccaccgttcacctcctacatcgtgtccacccctcctggaggctttccccctccccagggcttccctcagggctacggtgccccgccacagttcagttttggctacgggcctccacctccaccgccagatcagtttgcccctccgggggttcctcctccaccagccactcccggggcagcacctctggctttcccaccgcctccgtctcaggctgccccggacatgagcaagcccccgacagctcagccagacttcccctatggtcagtatgcaggttacgggcaggacttgagtggcttcggacagggcttctcagaccccagccagcagcctccttcctacgggggtccctccgtgccagggtcggggggcccccccgccggcggcagcggctttggacgagggcagaaccacaacgtgcaagggttccacccctaccgacgctagcccgcggcgccgcgacgtctgcacggcccagacccaggattccaaacttgtgaactcgtgacaatcacaaacttggcggcaaagtggcgactcaaccttgggggggggggcggggggagggcgcgaggcttttggagcggctgtgggtgtcgtctggactgaggtttttaaatatttctttctctaacccatcagcacaataaaaaaaagtcactggttcaacaacagggtttaaaaaaaatgtcttcagctttaattcaaaacttcaggtttctttttcttccttttttttggaaattattttcctgagccttttgttttacggtatattgtaaacttttatgttaaagaaaaaatatacatttacaaattgtgagatttttaagagaaattttctacgatgtatactggcttattttttaatttaaaacggggtttccgtcggcactggtggagggggtgcgctgttagtcccctcgctcctggctttgggggttgggacttggtggtccagaaactctgggagcttctagaagaaatctactgagtgtatttctgttttttgtttaattccttgcttttgtcgactgacctgcttggtagtgtctgaggtgaactgtgggggttgcgcacagccagccgcgtggatcccacgcagcgctgaaccgaaccgagtaggaagcctttctccccaggcacgtggcttcagggcgtttcccattgaccagtttgaccctggtttgaataaagagaagtgcgtttggattagaaa

SEQ ID NO: 1810 - DNA, 2274 bp, Homo sapiens
cgcgcggtgaccgttggcgccgaggggaggaggcagccgccgccgccgccgccgccgccgccgccgccgccgccgccgttgcgcagatccgggccgcggctgtggggagggcgacggagcgggtgaccttccggaggcgggagcgagcgaggaggcccgggagcgccgagcgtcgccgccgccgccgccatgaacaactcgggcgccgacgagatcgggaagctcttcgtgggcggtcttgactggagcacgacccaagagactctgcgcagctacttttcccaatatggagaagtcgtagattgtgttatcatgaaagataaaaccaccaaccagtctcgaggctttgggtttgtcaaatttaaagacccaaactgtgtggggacggtgctggccagcagaccgcacacgctagatggccgaaacatcgaccccaagccatgcacaccccgggggatgcagccggagagaacacggccgaaggaaggatggcagaaaggacccaggagcgataacagtaaatcaaataagatatttgtcggtggaattcctcacaattgtggtgagacagagctcagggaatacttcaagaagttcggagtggtcacggaggtagtcatgatctatgacgccgagaagcagaggccccgaggttttggatttattactttcgaggacgaacaatcagtggaccaggctgtcaacatgcattttcacgacatcatgggcaaaaaagtggaagttaaacgagctgagcctcgggacagcaagagccaagcgccgggacagccaggtgccagccagtgggggagccgggttgtgcccaacgctgccaatggctgggcaggccagcccccgcccacgtggcagcaaggatatggcccgcaaggaatgtgggtgccggcaggacaggcgattggtggctatggaccgccccctgcaggaagaggagcccccccgccacccccaccgttcacctcctacatcgtgtccacccctcctggaggctttccccctccccagggcttccctcagggctacggtgccccgccacagttcagttttggctacgggcctccacctccaccgccagatcagtttgcccctccgggggttcctcctccaccagccactcccggggcagcacctctggctttcccaccgcctccgtctcaggctgccccggacatgagcaagcccccgacagctcagccagacttcccctatggtcagtatggcctgggttcctattctccagccccgccgggctgcggcccacactttgtttacagtcttatggtcaggctgagcagtgatgtggcctagcaggttacgggcaggacttgagtggcttcggacagggcttctcagaccccagccagcagcctccttcctacgggggtccctccgtgccagggtcggggggcccccccgccggcggcagcggctttggacgagggcagaaccacaacgtgcaagggttccacccctaccgacgctagcccgcggcgccgcgacgtctgcacggcccagacccaggattccaaacttgtgaactcgtgacaatcacaaacttggcggcaaagtggcgactcaaccttgggggggggggcggggggagggcgcgaggcttttggagcggctgtgggtgtcgtctggactgaggtttttaaatatttctttctctaacccatcagcacaataaaaaaaagtcactggttcaacaacagggtttaaaaaaaatgtcttcagctttaattcaaaacttcaggtttctttttcttccttttttttggaaattattttcctgagccttttgttttacggtatattgtaaacttttatgttaaagaaaaaatatacatttacaaattgtgagatttttaagagaaattttctacgatgtatactggcttattttttaatttaaaacggggtttccgtcggcactggtggagggggtgcgctgttagtcccctcgctcctggctttgggggttgggacttggtggtccagaaactctgggagcttctagaagaaatctactgagtgtatttctgttttttgtttaattccttgcttttgtcgactgacctgcttggtagtgtctgaggtgaactgtgggggttgcgcacagccagccgcgtggatcccacgcagcgctgaaccgaaccgagtaggaagcctttctccccaggcacgtggcttcagggcgtttcccattgaccagtttgaccctggtttgaataaagagaagtgcgtttggattagaaa

SEQ ID NO: 1811 - DNA, 5541 bp, Homo sapiens
cagtgccgtttaacctttattgtggtggagtccaccccgctgtgggcctcagataaccctgtacaaaagggaatggagattgcctgtatccacctagattcataagctgccctgaggcgatcttggcatcaagaaagacagcattgaggcacatctcaccatcagcttcagaggatgtcagcctttgatatgtcccatgatttctttttctgcttaacttcagaatgggaaatacaacctagaaccaaacggtcatcacttcagcagggttttttgaagaatcaaatattcactgggatacaaatgcagacaagaagctacagtggatggaaactctgtgagaattgtggagaggtcttcagtgaacagttttgccttaagacacacatgagagctcagaatggagggaacacttttgagggtaattgttatggaaaagacagcatcagtgtgcacaaggaagcctctattggacaagaactttccaaacttaatccatgtggaaaagtcttcaccttaactccaggccttgctgtgcatcttgaaattctcaatggaagacaaccctacgaatgtaaggaatgtggaaaaggctttaagtattttgcaagccttgataatcacatgggaatccacattggagagaaactctgtgaatttcaggaatgtgagagagccatcacaacttcctcacacttaaagcagtgtgtagcagttcatactggaaagaaatccgaaaagactaagaactgtgggaaatccttcactaatttttctcaactttctgcacatgcaaaaactcataaaggagagaagtcctttgaatgtaaagaatgtggaagatcctttagaaattcctcatcctttaatgttcacattcaaattcacactggaataaaaccacacaaatgtacggaatgtgggaaagccttcactagatcaactcaccttactcaacatgtaagaactcacactggaataaaaccctatgaatgtaaggaatgtggccaagccttcactcagtacacgggccttgctatacacatacgaaatcacactggagagaaaccctatcagtgtaaggaatgtgggagagccttcaatagatcttcaacgcttactcaacatagaagaattcacacaggagagaagccttatgaatgtgttgaatgtgggaagaccttcattacttcttcccatcgtagtaaacatttgaaaactcacagtggagaaaggtaaatgcaagatatgtgggaaagaatttctgtattcctcaccccacctgtgaactcctaccagagagaaaccttttgtatgtaaagaatttgggaaagcatttgctctttcctcatgcctaagtatgcatgaaagaattcacactggggagaaatactatgaatgtaaggatatgagtgttgttaccatttagcccattggttgccatctttaattattggcagtgcaaagatcatcagattagtcctaaatgccttttggaggttgtaatggctcacagattggccttagatgcatcccgagggtctgaaattaaacctacaggttctgaatacaacatcatggttacctgagtctgggcatctgtgaagaagggtcatggatggtgaggtcagtactgcaggctgcctcaccttggtgattagattcctaagatcatagcattaacaagttctgtacgagataaatcatgcagattgatcccagcccctgttggttagtggctgccagtgtggcacattcatgtcaaaatttaccagaagccaagatgatgtaggccccagaggtggattgttaaaaagatgctcctccaaggttctcttctgttcccatggatcctgcagagcatgtcaggagtgaaaccatccataactgccagtgccctttcacagctgattatttctatgtccccttcttgtaaaataagaagtgtgacaaccttgactgttctgttctgtcttctctgtccattttaggtggcacaatgtaagtggcagtgtctcttatagtataatccagtctctcttctcacttctgttaagatggctgatatagtccatgaatcccactcatgatctctttatcaaatgattgttcagccacactttgaggattctcttcagtacaagttttctaatttttgcagtatggataggctgagaattttccaaatctccaagttctggttcctttttccttaacaacttcttctgcaattcaggtctccttttgcatttttgccgagaccagctgggtcgtggagaccctaacccagtggctctagaggaattaagacaaagacacagaaatatagtgcagagtgggaatcggggctcacagccttcagagctgagcttgaacagagtttgtcccacatatttattgacagtaagcctgtgataaacattattcctatagattgtagatcagctataagtattccttatgagaaagaaagggacaggctctggcttgttatctgcaacaggaatatgtccttaaggcacaaatcactcatgctattgtttgtggtttaggaatgccttgagcagttttccagttttctgccctgggtgggccaggtgttgcttgccctcattctggtaaaccagcagcctccagcatgggcgtcatagccatcacgagcatgtcacagtgctgcagagattttgtttatggccagtttctcattgcctgtttatggccagatttggggggcctgttcccagcacattttcctgtaagcactcaggaataatgaagcttcctgtgtcctttaacactttaattacagatcttagtgatacataccattttatctgtctcaagctctaccttccgtaaaatgctagaatacagttctgccaagttcttcaccactttatatcaagggttgtcttttcttcatttcccaatagcatgttcctcattccccaatgacacctcaccagaataacccttaccaaccttatttccagcttgcacatcagaatttttccagcctctactcatttgtcagtttcaaagctgcttcacatttttagtttttttgtttgtttttaattgcagtacctcacttctcagtaccaatatctgccttagtcagctcagacaaccataagagaataccgcagaccaaatggcttagaaattaatttaattttaaatcaatgaggttaaaaacacaggatttttttttttttttttttttttttttgaaatggagttttgctcttgttgcccaggctggagtgcaatggtatgatcttggctcaccgcaacctccacctcctgagttccagtgattctcctgcctcaccctcagtagctgggattattggcatgcaccacaaaccttagctaagtttgtatttttagtagagacagggtttctccatgttggttaggctgatctccatgttggtcagatctgacctttggtgatccacctgccttggcctcccaaagtgctgggattacaggcctgagccaccgtatctggcccaaaacacaaatttatattctcacatatctggaggctggaagtctgagatcagagtgccagcatggtcaacctctagtgagagctctcttcctggcatgtaagtgcccacttcctcatgttttcacacgatggagaccaacaaataggtcggtcggtctcccccctccccgcccccttctcttttcacatacagtcacattgaggtttggaacttcatatgaaatttggggggtcactgtgtgtgtgtgtgtgtgtgtgtgtatgtgtatatatatatacatatatatacacatatgtatgtatacctaactcctaaagtggaacagtaagagtcattatttatagattatctgattctctatgtggaaagagaaaagaatcatattaagtactttggactgaacaatggcccccaaaattcgtatgacgatgaagctctctctaaatattttcttgctttactggactgattttaacccgctgcacaacaccaactaaaagtagtaataccagcatacttgtctttgcagttctggtgagatatgcactctattttgttggtttggctgtaggcttttatttcttttttattttttgaagaggttatgtcctgtcagggaaccagccccgatattcacataggttcttttctattttccctaagtgtcagccaacttgagaaataaagggacagagtacaaaagagagaaattttaaagctgggtgtccggggcagacatcacatgtcggtaggttccgtgatgccccacaagccgcaaaaaccagcaagtttttattagggattttcaaaaggggagggagtgtgcaaataggtgtgggtcacagacatcaagtactttacaaggtaatagaatatcacaaggcaagtggaggcagggcgagatcacaggaccaaggtgaaattaaaattgctaatgaagttttgggcaccattgtcattgataacatcttatcaggagacggttttgagatcaactggtctgactaaaatttattaggtgggaatttcctcttcctaataagcctgggagtgctatgggagactggggtctatttcacccctgcagtctcgaccataagagatggctacacccaggggggccagttcagagacccactcccaggtgtgcattctctttctcaaggatgttccttgctgagaaaaagaattcagtgatatttctcccatttgcttgtgaaagaagagaaatgtggctttgttccacctggctcaccggcggtcagaatttaaggttatctctcttgtttcctaaacattgctgttatcctgttcttttttcaaggtgcccagatttcatattgctcaaacacacatgctgtataatttgtgcagttaatgcaattattacagggtcctgaggtaatatacatcctcctcagctgacaggattgagagattaaagtaaagacaggcataggaaatcacaagggtattgactggggaagtgataagtgtccatgaaatctttacaatttatgtttagagattgcagtaaggacaggcataagaaattataaaagtattaatttggggaactaataaatgtccatgaaacctccacaatccatgtttttctgccatggcttcagccagtccccccgtttggggtccctgacttcctgcaacaatgtcctgcaggaaaagttttttctttatatccagtttttacatgatgaattatttcccaatatttcatagtttatgaggctgaattcctcttgaatttattaaatgcttccttcacatcctctgtgatgatcatgtttatttactgataaaactcaatacctagaactgcacctagctcatgatggtacctaataaatacttcaatgaaatgatgtggtgatgcatgcctatagttttagctacttgggagggtggcctgagcccaggggttctagaccagcttaggcaacatagcaagaccccatctcaaaaaaaaaagcatcagcaaaaacaaaaaaaaaaaaaaaaa

SEQ ID NO: 1812 - DNA, 2035 bp, Homo sapiens
tccctgtcctgcgcccgcgcgccccgggagcctacccagcacgcgctccgcgcccactggttccctccagccgccgccgtccagccgagtccccactccggagtcgccgctgccgcggggacatggtcctctgcgttcagggacctcgtcctttgctggctgtggagcggactgggcagcggcccctgtgggccccgtccctggaactgcccaagccagtcatgcagcccttgcctgctggggccttcctcgaggaggtggcagagggtaccccagcccagacagagagtgagccaaaggtgctggacccagaggaggatctgctgtgcatagccaagaccttctcctaccttcgggaatctggctggtattggggttccattacggccagcgaggcccgacaacacctgcagaagatgccagaaggcacgttcttagtacgtgacagcacgcaccccagctacctgttcacgctgtcagtgaaaaccactcgtggccccaccaatgtacgcattgagtatgccgactccagcttccgtctggactccaactgcttgtccaggccacgcatcctggcctttccggatgtggtcagccttgtgcagcactatgtggcctcctgcactgctgatacccgaagcgacagccccgatcctgctcccaccccggccctgcctatgcctaaggaggatgcgcctagtgacccagcactgcctgctcctccaccagccactgctgtacacctaaaactggtgcagccctttgtacgcagaagcagtgcccgcagcctgcaacacctgtgccgccttgtcatcaaccgtctggtggccgacgtggactgcctgccactgccccggcgcatggccgactacctccgacagtaccccttccagctctgactgtacggggcaatctgcccaccctcacccagtcgcaccctggaggggacatcagccccagctggacttgggcccccactgtccctcctccaggcatcctggtgcctgcatacctctggcagctggcccaggaagagccagcaagagcaaggcatgggagaggggaggtgtcacacaacttggaggtaaatgcccccaggccgcatgtggcttcattatactgagccatgtgtcagaggatggggagacaggcaggaccttgtctcacctgtgggctgggcccagacctccactcgcttgcctgccctggccacctgaactgtatgggcactctcagccctggtttttcaatccccagggtcgggtaggacccctactggcagccagcctctgtttctgggaggatgacatgcagaggaactgagatcgacagtgactagtgaccccttgttgaggggtaagccaggctaggggactgcacaattatacactatttatttatttattctccttggggttggtgtcaggggcgagccaaccccacctctatgccctgagccctggtagtccagagaccccaactctgccctggcttctctggttcttccctgtggaaagcccatcctgagacatcttgctggaaccaaggcaatcctggatgtcctggtactgacccacccgtctgtgaatgtgtccactctcttctgcccccagccatatttggggaggatggacaactacaataggtaagaaaatgcagccggagcctcagtccccagcagagcctgtgtctcaccccctcacaggacagagctgtatctgcatagagctggtctcactgtggcgcaggccccggggggagtgcctgtgctgtcaggaagagggggtgctggtttgagggccaccactgcagttctgctaggtctgcttcctgcccaggaaggtgcctgcacatgagaggagagaaatacacgtctgataagacttcatgaaataataattatagcaaagaacagtttggtggtcttttctcttccactgatttttctgtaatgacattatacctttattacctctttattttattacctctataataaaatgatacctttttcatgtaaaaaaaaaaaaaaaaa

SEQ ID NO: 1813 - DNA, 4382 bp, Homo sapiens
gatttacttggagaagatttgctatctggcaaaaagaatcagtcggatttgtcagatgaagagctaaatgatgatcttttgcagagtgataatgaagatgaagaaaatttcagttctcagggtgttacaattagtctgaatgctacatctggcatggttacatcatttgaactctctgacaacactaacgaccaatctggagaacaggaatctgagtatgaacaagaacaaggagaggatgaactggtttatcacaaatctgatggatcagaattgtatactcaagagtacccagaagaaggacagtatgaaggccacgaagctgagttgacagaagaccaaatagaatatgtggaagagccagaggaggagcagctttacactgatgaagtgttagacatcgagatcaatgaacctttagatgaatttacaggaggtatggaaacattggaacttcaaaaggacatcaaagaagaatcagatgaagaagaagaagatgatgaagaatctggacgattacgtttcaaaactgaaaggaaagaaggaacaattattaggctctcagatgtaactagagagagaaggaacattccagaaactttggagctttcagcagaggccaaggcagcattgcttgaatttgaagaaagggagcgacagcataaacaaggacgctacagctccaggcggggaggacggcgaggaggtccgctgatgtgtcgtggtgtgggggaccagaggagagagagcaccgagaggggcaggatgaaggaccacagacctgcgctgcttcctacacagcctcctgtcgtgatacttccagaggaggaattaatgagcgacctgatgccctaagatgacataagctgttggaccttgctacctaaagcctctagagagccccaggctccccctccaccgcctccgccgcctcagcagcagccgatcagaagcctgttccagccgcagccgctgcagccgctgcttccggtgcagcacccgcaccacccatccccgcctcagggaatgcacatgcctccccagctagagaccccaaggatgatgatgaccccgccacccgtgactccacagcagcccaagaacatacacatcaacccgcacttcaaagggacggtggtcacgcctgttcaagtgcccttgctaccagttccgagccagccgagacctgccgtgggaccccagagattcccaggccctccagaatttccacagcatacacctggacctgttcccaacagtttcagccagcccccacgactccctctccaggaccagtggagagccccacccccgcctcaggatcgagaccctttcttcttaggagtttcaggtgaaccaagattcccgagccatctttttctggaacagcgaagtccccctccaccaccaccgcctcctacccttcttaacagtagccatcctgttcctactcagagtcctctaccattcactcagccaggaccagcatttaatcagcaaggacagcagccagtgttcccaagagagcggcccgtacgaccagccttgcagcctccaggtccggtggggattctgcactttagccagcctgggtcggcaaccacacggcccttcattcctcctagacagccgttcctgccaggcccaggacagccgtttctgcccacacacacacagcccaacctgcaggtaatgcatcctgagtgaacctccagggaaaaaatgtgtagcttcaaggctttgtgttccataaagtttcagatttttatttgagcctactaatttgtggttatttaaagaatagagtattagtctcaaatgtactgtttgttaaagacaacttttttcaacaatgttacttatctcaatacaagaaaaaaatgggaaaatgtcattttttgggaattgaaaaatgctacttattataattgtttaaagggtatactactaataaaattaggacatgttttgataatacatttgctcatctgtataaaatttcatgagaggtttaccagtggaaatactttgtcaaattatattcctgcagtagacagttttgaaaagagtctttgcatggagggaagaagatgttgctgttcactggttatttgaaggccttgagtgccctctgccgaccggcttctgcttcatgggttttcactggttatttgaaggccttgagtgccctctgcccatcggcttctgcttcatgggttgacatgcgtctgtaacatctttcttaccaagtgtatatttcttcttgtattgtagggttactattaaaatacatagcgatggtaaacttgaatcaactatttaaaaatacgtggaatacgtatctaagccaaaaacggaaaatgaatattatctagggtgttaaaggaagataaaatgtttttaagaatttttctttttattaaaaaaatgcaattaatacatccccattgcagaaattttcaagtatatataagaaaggaaattaaatactctcgttacctagaaacaattcaggagcttttttttttgtctttttttaaatgcacatcttctcgccacctgctttttccctccagtgtcacatatcatttgatcttttcatgtcagcgagttggttttgatgccatcgtttgagagtgctgtatgcggttccctttcatgctgtctgtgtggttgcatgtgtgtatactggtttcagtactttagtatcatagtgctacagggaacatgctttagagttatgagtttgtctgcatacctagttttccttaggacaattcaatcctagaattactggattaaatataaaatttaaggtaatagcttctggcttattactgcattttagatagtattaccttcatcagcaagtctaaaatgaagttttggtatcgctgaaagttcctttcttgtgttgaggttttttaggaaatgattgaagtgattatgcccggtgtaaccatttatgaactgttgtttctctttctttggaaatggaaggggccgttgcatcctccattgccccctccgcatcagcctcagcctcagcaacctcagcaacagcccccgccacagcaccagcctccgcaccagcccccgcaccagcccccgccccagcaccagcccccaccccagcacccaccacagcacccgccgcagcaccagcaccaccaccaccaccaccacctgtccgtcccgccccctcctttgatgccgatgtctcagccacagttccggcctcacgtacagaccgctcagcctcaggccagcagcagccggatgcagtgcccccagcgccaggggctccggcataatacaacttctcagaatgtaagcaagcggcccatgcagcaaatgcagcccactgcgccaaggaacagcaatttgcgtgaattacccatagcgccgtcacacgtgatagaaatgagcagcagccgctgctctgccacgccctcagcacaagtgaaacctatcgtcagcgcgtcaccaccctcgcgggccgtggcgggttccagaagctcacagggaaagacggaagtgaaagtcaagccagctagccctgtggctcaacctaaagaagaggcaaaaacagaaacagagtttcctgatgaagatgaggaaacaaggttatatcgcttaaagatagaagaacagaaacgcctaagagaagaaatcctgaaacagaaggagttacggcggcagcagcaggctggtgccaggaagaaggagctgctggagagactcgcgcagcaacagcagcagctgtacgctcccccacccccagcagagcaggaagagcaggcactgtcaccatcacccaccaacggtaacccactgttgccctttccaggtgcacaggtcagacaaaatgtgaagaacagacttcttgttaaaaaccaggatgtcagtatttcaaacgttcagcccaaaacatccaattttgtaccatccagtgccaacatgcagtatcaaggacaacagatgaaagcactgaaacatttgagacagaccagaacagttcctcaaagtcagactcagccgctgcataaagtgctcccgatcaaacctgcagatgtggaggagccagctgtcccccagactcctcgagtggcgtccatccagggccggccccaggacacaaagcctggcgtgaaaaggactgtcacgcacaggacaaacagtggtggtggagacgggccccacatcagctccaaggtcagggtgattaagctgtcaggtggggtaagttgacaagttttatgagagcctctttgagtctgtgtatcacatagaatgtcctcatttgcagagaatgtttttgaagaaagaattaaaagttacctctgttatagtcttgtaaaaaaaaaaaaaaaaaaaaaaaa

SEQ ID NO: 1814 - DNA, 1746 bp, Homo sapiens
gggaagctcccctccgagactctggatagccgccgggggggcgttgcctggccggctggttgcgtagcaacggcaggcggtgcgtgacgtgcgcagccgcgttccgtcctgaggcgcgcccgccccggggtaagctcgcgccgccgcgtcagctcagcgctgggtctctcggtcccgcagccgtgaggaggacggtctgcatactcgctgcccgccggctccctcccccgcgtccctgcgaccgccgcggcgaagatgattttcagttcacccactagaggcaaagacgtaagagagctaccagcgtattgagaggagatacacaggcactacgagaatggagtttagaagaaggtcagagccctgggcagtgttgggccaggctttagggcctcaggagtgcaagtagctgatgaagtatgtcgcattttttatgacatgaaagttcgtaaatgctccacaccagaagaaatcaagaaaagaaagaaggctgtcattttttgtctcagtgcagacaaaaagtgcatcattgtagaagaaggcaaagagatcttggttggagatgttggtgtaaccataactgatcctttcaagcattttgtgggaatgcttcctgaaaaagattgtcgctatgctttgtatgatgcaagctttgaaacaaaagaatccagaaaagaagagttgatgttttttttgtgggcaccagaactagcacctctgaaaagtaaaatgatctatgcaagctccaaggatgcaattaaaaagaaatttcaaggcataaaacatgaatgtcaagcaaatggaccagaagatctcaatcgggcttgtattgctgaaaagttaggtggatccttaattgtagcctttgaaggatgccctgtgtagattattcagtgccacaaattgaaagcttccatgtttaatgttatcctcttgctatataaataaagcaaatatatttaggccagggtctcactgagggggagctgtcttgtcatcttttagagtaaactattctataaacatatgcaaacagccctaaataaatctaaagtctaaagttttattgatgtgaaattaaattcttattggccaaatgcctgttttgatgagttgatttataaagatttttgttaagctcaggattttaaattacacagttcacaaacagtaaaggccatgtgaagagaattattacatctttattaacctcagcatttactttgtttcttttgcttaggaaattgctcataatctggttataattttggtccaaattctttattcttccttgagctaagcagaataatggaatataatatgtcttcataatataacaacactaatacactaatagtaagattaagttaggcagtcttctaccaaatgtgtaatggagattgcctcaaaattgtgtccacataatccacgctcatcttgcaaagcgctatttcaggcacatcattggaatacaggaagtagccctgcacctgccagtgagctcgccattcactgattggaagagtgacctggcatcttggaaatcattgtgtgtcttcaggagaatgtgcagtgtcttgtaacaactaattataatgcaaattagggctacattgtaatctgctttgttaatgaaaatgataaaacagaatattgacaagctaggacacctgtggtatctttaattgtatctccttcagaagtttgcttcttatggtataataaagtatggaagaatattgagta

SEQ ID NO: 1815 - DNA, 1614 bp, Homo sapiens
gggaagctcccctccgagactctggatagccgccgggggggcgttgcctggccggctggttgcgtagcaacggcaggcggtgcgtgacgtgcgcagccgcgttccgtcctgaggcgcgcccgccccggggtaagctcgcgccgccgcgtcagctcagcgctgggtctctcggtcccgcagccgtgaggaggacggtctgcatactcgctgcccgccggctccctcccccgcgtccctgcgaccgccgcggcgaagatggcctcaggagtgcaagtagctgatgaagtatgtcgcattttttatgacatgaaagttcgtaaatgctccacaccagaagaaatcaagaaaagaaagaaggctgtcattttttgtctcagtgcagacaaaaagtgcatcattgtagaagaaggcaaagagatcttggttggagatgttggtgtaaccataactgatcctttcaagcattttgtgggaatgcttcctgaaaaagattgtcgctatgctttgtatgatgcaagctttgaaacaaaagaatccagaaaagaagagttgatgttttttttgtgggcaccagaactagcacctctgaaaagtaaaatgatctatgcaagctccaaggatgcaattaaaaagaaatttcaaggcataaaacatgaatgtcaagcaaatggaccagaagatctcaatcgggcttgtattgctgaaaagttaggtggatccttaattgtagcctttgaaggatgccctgtgtagattattcagtgccacaaattgaaagcttccatgtttaatgttatcctcttgctatataaataaagcaaatatatttaggccagggtctcactgagggggagctgtcttgtcatcttttagagtaaactattctataaacatatgcaaacagccctaaataaatctaaagtctaaagttttattgatgtgaaattaaattcttattggccaaatgcctgttttgatgagttgatttataaagatttttgttaagctcaggattttaaattacacagttcacaaacagtaaaggccatgtgaagagaattattacatctttattaacctcagcatttactttgtttcttttgcttaggaaattgctcataatctggttataattttggtccaaattctttattcttccttgagctaagcagaataatggaatataatatgtcttcataatataacaacactaatacactaatagtaagattaagttaggcagtcttctaccaaatgtgtaatggagattgcctcaaaattgtgtccacataatccacgctcatcttgcaaagcgctatttcaggcacatcattggaatacaggaagtagccctgcacctgccagtgagctcgccattcactgattggaagagtgacctggcatcttggaaatcattgtgtgtcttcaggagaatgtgcagtgtcttgtaacaactaattataatgcaaattagggctacattgtaatctgctttgttaatgaaaatgataaaacagaatattgacaagctaggacacctgtggtatctttaattgtatctccttcagaagtttgcttcttatggtataataaagtatggaagaatattgagta

SEQ ID NO: 1816 - DNA, 1410 bp, Homo sapiens
tccggcggggcccggcaggcgccgaggaggaagagcgagcccggacggcgcctctcgaacgagtgtgggcgcgaggcaggatgacgacctcaggcgcgctctttccaagcctggtgccaggctctcggggcgcctccaacaagtacttggtggagtttcgggcgggaaagatgtccctgaaggggaccaccgtgactccggataagcggaaagggctggtgtacattcagcagacggacgactcgcttattcacttctgctggaaggacaggacgtccgggaacgtggaagacgacttgatcatcttccctgacgactgtgagttcaagcgggtgccgcagtgccccagcgggagggtctacgtgctgaagttcaaggcagggtccaagcggcttttcttctggatgcaggaacccaagacagaccaggatgaggagcattgccggaaagtcaacgagtatctgaacaaccccccgatgcctggggcgctgggggccagcggaagcagcggccacgaactctctgcgctaggcggtgagggtggcctgcagagcctgctgggaaacatgagccacagccagctcatgcagctcatcggaccagccggcctcggaggactgggtgggctgggggccctgactggacctggcctggccagcttactggggagcagtgggcctccagggagcagctcctcctccagctcccggagccagtcggcagcggtcaccccgtcatccaccacctcttccacccgtgccaccccagccccttctgctccagcagctgcctcagcaactagcccgagccccgcgcccagttccgggaatggagccagcacagcagccagcccgacccagcccatccagctgagcgacctccagagcatcctggccacgatgaacgtaccagccgggccagcaggcggccagcaagtggacctggccagtgtgctgacgccggagataatggctcccatcctcgccaacgcggatgtccaggagcgcctgcttccctacttgccatctggggagtcgctgccgcagaccgcggatgagatccagaataccctgacctcgccccagttccagcaggccctgggcatgttcagcgcagccttggcctcggggcagctgggccccctcatgtgccagttcggtctgcctgcagaggctgtggaggccgccaacaagggcgatgtggaagcgtttgccaaagccatgcagaacaacgccaagcccgagcagaaagagggcgacacgaaggacaagaaggacgaagaggaggacatgagcctggactgagccacgcgccgtcctccgaggaactgggcgcttgcagtgcgttgcacaccctcacctcccacccactgattattaataaagtcttttcttttacctgccaaaaaaa

SEQ ID NO: 1817 - DNA, 1406 bp, Homo sapiens
tccggcggggcccggcaggcgccgaggaggaagagcgagcccggacggcgcctctcgaacgagtgtgggcgcgaggatgacgacctcaggcgcgctctttccaagcctggtgccaggctctcggggcgcctccaacaagtacttggtggagtttcgggcgggaaagatgtccctgaaggggaccaccgtgactccggataagcggaaagggctggtgtacattcagcagacggacgactcgcttattcacttctgctggaaggacaggacgtccgggaacgtggaagacgacttgatcatcttccctgacgactgtgagttcaagcgggtgccgcagtgccccagcgggagggtctacgtgctgaagttcaaggcagggtccaagcggcttttcttctggatgcaggaacccaagacagaccaggatgaggagcattgccggaaagtcaacgagtatctgaacaaccccccgatgcctggggcgctgggggccagcggaagcagcggccacgaactctctgcgctaggcggtgagggtggcctgcagagcctgctgggaaacatgagccacagccagctcatgcagctcatcggaccagccggcctcggaggactgggtgggctgggggccctgactggacctggcctggccagcttactggggagcagtgggcctccagggagcagctcctcctccagctcccggagccagtcggcagcggtcaccccgtcatccaccacctcttccacccgtgccaccccagccccttctgctccagcagctgcctcagcaactagcccgagccccgcgcccagttccgggaatggagccagcacagcagccagcccgacccagcccatccagctgagcgacctccagagcatcctggccacgatgaacgtaccagccgggccagcaggcggccagcaagtggacctggccagtgtgctgacgccggagataatggctcccatcctcgccaacgcggatgtccaggagcgcctgcttccctacttgccatctggggagtcgctgccgcagaccgcggatgagatccagaataccctgacctcgccccagttccagcaggccctgggcatgttcagcgcagccttggcctcggggcagctgggccccctcatgtgccagttcggtctgcctgcagaggctgtggaggccgccaacaagggcgatgtggaagcgtttgccaaagccatgcagaacaacgccaagcccgagcagaaagagggcgacacgaaggacaagaaggacgaagaggaggacatgagcctggactgagccacgcgccgtcctccgaggaactgggcgcttgcagtgcgttgcacaccctcacctcccacccactgattattaataaagtcttttcttttacctgccaaaaaaa

SEQ ID NO: 1818 - DNA, 1021 bp, Homo sapiens
cgggaagcgccgggcgagcccactgtgcggccgtcgtgggggaagcgaaggttcctgattccacctacctcctaagtgaaggcttccgtccctggagaggaggcggcgccctgtatcggccttcgtcctccgcgggtgtgctagcgttgggacggtcctttgttgccgcgaggggtaggagtgggcgtggcggagccagctccgttcggaacactcccgggccgacccgactcgctcatcctgcaggagctgcggcgccaagatgagtggagaggagaacccagccagcaagcccacgccggtgcaggacgtacagggcgacgggcgctggatgtccctgcaccatcggttcgtggctgacagcaaagataaggaacccgaagtcgtcttcatcggggactccttggtccagctcatgcaccagtgcgagatctggcgcgagctcttctctcctctgcatgcacttaactttggcattggtggtgacggcacacagcatgtactgtggcggctggagaatggggagctggaacacatccggcccaagattgtggtggtctgggtgggcaccaacaaccacggacacacagcagagcaggtgactggtggcatcaaggccattgtgcaactggtgaatgagcgacagccccaggcccgggttgtggtgctgggcctgcttccgcgaggccaacatcccaacccacttcgggagaagaaccgacaggtgaacgagctggtacgggcggcactggctggccaccctcgggcccacttcctagatgccgaccctggctttgtgcactcagatggcaccatcagccatcatgacatgtatgattacctgcatctgagccgcctgggctacacacctgtttgccgggctctgcactccctgcttctgcgtctgctggcccaagaccagggccaaggtgctcccctgctggagcccgcaccctaagcatcctgctgccttcccacaacattaaactctccttcctcagtgaaaaaaaaaaaaaaaaaa

SEQ ID NO: 1819 - DNA, 3539 bp, Homo sapiens
gtgcgcgtgtgcgtgtgcgcgtgtgcgagtgtgaagtgcagcgctggagtgcaacatgctgtaatgggaggaaacccagcggcgtcggagcgcccgggaccgccgcggccgttctgagcgcagtggcgccgagcagcccctcccgcagccggtgtgacctgtcccttcaggctccaaccaggaatggagacgccattggatgttttgtccagggcagcatctctggtgcatgctgatgacgaaaaacgcgaagctgctctcaggggagaacccagaatgcagaccctgccggtggcctctgccctcagcagtcaccgcaccggccctcccccaatcagccccagcaagaggaagttcagcatggagccaggtgacgaggacctagactgtgacaacgaccacgtctccaaaatgagtcgcatcttcaacccccatctgaacaagactgccaatggagactgccgcagagacccccgggagcggagccgcagccccatcgagcgcgctgtggcccccaccatgagcctgcacggcagccacctgtacacctccctccccagccttggcctggagcagcccctcgcactgaccaagaacagcctggacgccagcaggccagccggcctctcgcccacactgaccccgggggagcggcagcagaaccggccctccgtgatcacctgtgcctcggctggcgcccgcaactgcaacctctcgcactgccccatcgcgcacagcggctgtgccgcgcccgggcctgccagctaccggaggccaccgagcgctgccaccacctgtgaccccgtggtggaggagcatttccgcaggagcctgggcaagaattacaaggagcccgagccggcacccaactccgtgtccatcacgggctccgtggacgaccactttgccaaagctctgggtgacacgtggctccagatcaaagcggccaaggacggagcatccagcagccctgagtccgcctctcgcaggggccagcccgccagcccctctgcccacatggtcagccacagtcactccccctctgtggtctcctgaagggagcgcctcctccaacaacacgtggatctgcatggtttgcctgagctttgaacagtcagtacttaaaaaaaaaaaaaatcatgggggtggggtggggggaagggaagggatggtttatttgcaaaaaccatgttgttgggatttgtgttctgtttttgtacttgcttggtatccgtacaagggggccctcaaacatgatagcaggaactacgcgtggaacatctgtctaatgtagcatccttacttcctgcctcagttaccaaagaaacctctgatgcaggtctgctgccccgatggggccaggactccacagcgctttctcagtcacaagccatgatgaattggtgactcagacgctttgtgctttttcctttgcttcttgagaccggggtgtgtgtggctcagcttccacggcgtgtttggttcggtccatgtgtgtgcgtgtgtatacttgaagagaactgtcgtgtctgatttgcactattggaggaggactaaagttgcctgacaactttatgtgttatgccagaactctgagggcaaactgctgaaaaacaaagggtttaaggatgacatttctgaccatttgtgtgtttgttgttgttactgtttttgttttttttaatgtagacaatacagctttggaaggggaagtctcatacaggttataggtctttctctctctagatttcaggtgcttgcaactggactgcagactctaccaatcacgggcattttatcttctctgaacactgcagtttgttagactagagctgaggttggaggattccatagtgctttaaacgtgatgcatgttttaatggagaaaaaatagctggtttctattaattatatagacagtaaacaaaaaccttaatacttactatcttcttttcagaattagtttatttttgtcagttacagtcctagatatacttactgctggtacagttgtactctaagattggtatttgatattcactttactcacaagtagtgcgggaggccagctcctggcaggccctcgcgatgagcagtgggtcagctgcggtgtgggatgctggagtttggctgcaggctgacatcatttatttttgcatccctgtctgctttgttacaagctcccaggggaggtggggtttgtgtcttccaacttccctacatgcagaaactgctccctttgaactctcttggctgaacagcagattactgacaatctgtgatatggtgttttatacgcttcctcgtacgctggggccaaggcagtatacattcctctgactttatactgttattactgcatttattatttgctatattaatagctactaactagaaattagatgaagcaagcatgacagacacagctgtggaggtcacagctgctcctttttggtcaatgagcgtttctatcccctccccctggggtgtgctgtgtcccacctggcccaccagaggctcacgacgatggcacctgaccaggtgacgtgggcgtggtcacctcacctgcaaggctttgtggactctgcacaccgtatgacccccggttttacagtttttagctgttgaattttggaaattggcactgggtgaaaaggtcggaggactggctcttgtagtcacagagtggctgcaggcctttgaagagtggaggaaagaaaagcccttctccttgccccgcacacatttcactcccactgtactgggcttccaagctttggcattcaggcccctatattttctgtaggaaaaatcgttgagaacacttttctatatgggtgattttgagaccatcgttacgctgtgcgtaaagaatgtacagagaaatttgtaggtattttttgaagaacattaatttgttaatgatatgtagctatttaatttttccctttcctattgtaatcattcattttttttgttgttcggaaaaaaaaagttgatctttttttttgtcgtagatttgtctgtaaaagtgcaggaacagttattctatgagaacactgcatctgcattcatagccacgagtttgttattgctacaggctactgagcgtcgtaacaggaaaaccacccacagctgaccggctcggtggaggacactcctgggacaggtctctttgtcagtgaacaagggcgtcactctgggaggggtcggcggtgctggcggccgggtccctggtgcactgacctatctgggataggcagtaccctggaggggggcctggggcagaggaggcagcagaaaaccaaacatttcactgagaaagccccctccctgctctaagaaggggctccgtgaagttcttcccagagccgcgctgcctgcagtgcgctctgaccttctcttcatgtgtgtaaatctgtaatataccattctctgtggcctgtttttcctggaagaagaaaaaaaaaggtttggcaggccatctttttttgtacttaaaagtagccttaagaacaataataaagtgctcttaaacc

SEQ ID NO: 1820 - DNA, 4800 bp, Homo sapiens
agctcagtgtcacagacctttgtggaagcaacaacagctcccatccttccaacctttctggagaagccgtggcctgatggtgagccgaatgggctggggggggagaagaaggcggctggggcggtggggagatctggggcccggatcggtgcccctcctccccatgccactgccacctcctcctcctccttcatgccggggacctgggggagggaggatctccatcttctctctgtcccctgcccctcatacaagaagctccccctcctcattttcccctcccaccgcagggcccccttgctcagtgctacaggggacaggggcttctcagtcttgccacagtgctctccctatcccagccacccccccaacacaggctcaacctgcaatgacacctgcctctgcatctccctcctggggatcccactccaccccacccctggccccggcaacccccactccctcacagcagtgcccccaggactctcctgggctgcgggtaggccctttgatccctgaacaggattatgagcggctggaggactgtgaccctgaggggtcccaagactcacccatccacggggaggagcagcaacccctgcttcatgtccctgaagggctccgaggctcctggcatcacatccagaacctggacagtttcttcaccaagatctacagctaccaccagcggaatggctttgcctgcatcttgctggaggatgtcttccagctgggacaatttattttcattgtcaccttcacaaccttcctccttcgatgcgtggattacaatgttctctttgccaaccaaccaagtaaccataccagacctgggccgttccacagcaaagtgaccctgtcagatgccatcctaccctcagcccagtgtgctgagaggatccgctccagcccgctgctggtcctcctcctggtcctggctgccggcttctggctggtccaactgcttcgctcagtctgcaacctcttcagctactgggacatccaggtgttttacagggaggccctgcacatccccccggaggagctgagctcggttccctgggcagaggtgcagtcccgcctcttggcactgcagcggagcgggggcctgtgcgtgcagccgcggcccctgacggagctggacatccaccaccgcatcctgcgctacaccaactaccaggtggcgctggccaacaaaggcctgctgccggcccgctgcccgctgccctggggaggcagtgcggctttcctcagccgcggcctggcgctcaatgtcgacctgctgctcttccgcggtcccttctcgctcttccgcgggggctgggagctgccgcacgcctacaagcgcagcgaccagcggggcgccctagcagcgcgctgggggcgcacagtgctgctgctggccgccctgaacctggcgctgagcccgctggtgctggcctggcaggttctgcacgtcttctatagccacgtggagctgctgcggcgcgagcctggcgcgctgggggcgcgcggctggtcccgcctggcgcgcttgcagctgcgccacttcaacgagctgccgcacgagctgcgcgcgcgcctggcccgcgcctaccgccccgccgccgccttcctgcgcaccgctgcgccccccgcgcccctgcgcacgctgctggcccgccagctcgttttcttcgcgggtgcactcttcgccgcgctgcttgtgctcaccgtctacgacgaggacgtgctagccgtggagcacgtgctcaccgccatgaccgcgctcggggtcaccgccaccgtcgccaggtctttcattccggaagagcagtgccagggtcgtgcgccgcagctcctgctgcagacagccctggcccacatgcactacctcccggaggagcccggccccggcggcagggaccgcgcctaccggcagatggcgcagctgctgcagtaccgagcggtctccctcctggaggagctcctgtccccgctcctcaccccgctgtttctgcttttctggttccgccctcgtgccctggagattatcgacttttttcatcacttcactgtggatgtggctggggttggggacatctgttcctttgcccttatggatgtgaagcgccacggacaccctcagtggctctcggcgggacagactgaggcctcgctgtctcagcgtgcggaggacggcaagactgagctttctttgatgcggttctccctggcgcatccactctggcgccccccagggcacagctctaagtttcttgggcacctctggggccgagtacaacaagatgcagctgcctggggtgccacctcggctcgcggcccctccaccccgggggtgctcagcaactgcacctcgcccctgcctgaggccttcctggccaacctcttcgtgcaccctctcctgcctccgagagatctgagcccgacagccccctgtccagctgcggccacagccagcctccttgcctccatttcccgaattgcccaggaccccagctctgtgtccccaggaggcactgggggccagaagctggcccagctcccagaacttgcttctgccgagatgagtctccatgtcatctacctgcaccagcttcaccagcagcagcagcagcaggagccgtggggtgaggctgcagcctccatcctgtccaggccctgctccagcccctcacagccaccctcgcctgatgaggagaagccatcctggtcaagtgacggctccagtcctgcctctagccccagacaacagtggggaacccagaaggcccggaatctgttccccggagggtttcaggtgaccacagacacccagaaggagcctgaccgggcctcttgcactgactgagacgactcctcagggccccactcctggcagctgagtgctgcacctgccttctcgatcacgagcctgagaactgcacgggggagcagcccagactggctggaaaccatgttttcagagtgcagggtcaagtggcgtgtaggactctgtcaaaagaatgacccctttccccaccacatacccacaactgcacagcctctggacagatgtgagaaggcaccacctcaagaggggaggagcggggctgatcctggtcgggcggacctgagtcgggcagccgctctcccggaactggaagggaaagccaggcggctctcaggggctgttggtgtctgagccgggagggtcgaacgcccagggcactgcgccccgcaactgacgctcctgcaaggaaaagctctgggtgcgtatgcggcttgtcacctcctgggtgcgcagcgtgagcccgaaaatgtcttcgtggtagcgttgctgatcctgtcggaaaagagcacagtggatcagaacccgactcggagaccttagcaggaaccccgcacgctcaggcccggcccgcccctccgcacccgcagcacgccgatgacgtcgccggcctcgtccagctccatgtcgccctccgtcgccaggatgcgctgcacggtctgcaggacgttggttgccatggtaacatcgccgcagacaaacatgtggccccgctcgaggcacagcacgcggtgcacctccgcagccagctccgtcctcaggatgtcctgcacgttaccattgcgccctcagggtctcacaccttggggttgtcaggttcccgggagaaggcggtgaggactcggccaaacaccccgcgctgctgggcgttctgcacctcgtcgcggtagagatggtcaagttgggagcatcggcagccgaacaccaaagtcatgggagtgggctgcagccctgcaagcaaccccgcgcttgggaaggctcttctccggggcacagtgctagtggggcctccccacaggccaccgtcgcccagcctggcagcccagcgttttgggctgaaaccaccattactttggctgtttcatctctaagagagtgtagaatgctttcacagagaccctgcacagccctgatttacagagggaagggaagcgcgggtgaggtggtggcccctggtggagctgcgctagaatgcgcggcttcggactcagaattccatgccctttgcattgtgtgacatcgcagtccccttccccgctcccacttcatattctcccatacttataactctcctcccagtcacagccctcttcttttgattgacagaccaccctgggcaccccatgctcaatatgaacaccttgtagcatccttaggtcttggacagacctcggtcagctctggcacagtcaagaatccaccttgggcagttcttctttgagtcttagccctaatccctttgaaaattctattttcctttgtcctcaatccagtcaacacctactatgtaccaggcaccaggaagccagaagctcagggcccagcccttgcctttggtacctgccctccccttggtctcatgagcgtcttttcagctttgtggactttgtttcctgccctctctttcctatttcctgccttccagccccacccctctgtccctagattgtgtgactcccttcaggcagtcctttagtccccagcctcacctttgctctcaatgtcatgcagccgctcctgccagaatccccggaagggggcaatgccagtgcctggacccaccaggatgcagggcaagctgggatcgggtggcagccggaaggagggagccctggcaggagagacactccatcaggtcccctttgcctttcctgctccaccattctcaccatgcagggtgggtggagcaaggaggacccaagttcttcccatctcaaaaaaaaattaaaaaaaaaacaaaaaacaaaaaa

SEQ ID NO: 1821 - DNA, 1287 bp, Homo sapiens
aggcggcaggaggcgggtgggtcaaggtaactctgggctacagagtccttgctgggggttcggggagcgcttggaccccggcttctgggacgcgtcagaatattatccagcaatgcaaatgaacaaactataactacacacagctgcatggataaatgtcagaaacatgacgttgagtgtgagaagccagatgcaaacgaggactcactgtgcaattctgtgcatgtacagtggccaggagaagggagcactggctttgctttcatcaggccaaagatgcctttctttgggaatacgttcagtccgaagaagacacctcctcggaagtcggcatctctctccaacctgcattctttggatcgatcaacccgggaggtggagctgggcttggaatacggatccccgactatgaacctggcagggcaaagcctgaagtttgaaaatggccagtggatagcagagacaggggttagtggcggtgtggaccggagggaggttcagcgccttcgcaggcggaaccagcagttggaggaagagaacaatctcttgcggctgaaagtggacatcttattagacatgctttcagagtccactgctgaatcccacttaatggagaaggaactggatgaactgaggatcagccggaagagaaaatgaagaccccagagacatttattggggagtaggatgtggctgagtgctttttttttggccagactagcggattcagtcctggaagagagtatcatataatgagacccacaggcactggcacccttgggttggcaatagaaggtgacatggaatggagaaaaccaagattccagatggggatagtaactagaaggtgcttcagatgcactgcctgcgggtgccagtctgaaaaccagaccgcacagaggcctggggctgctgatgagctttttggtgctctccacacacaagctcgcaaacacacatgtcccagaatagctctgttgggttgtgttgggagaagcggctggagttcattctctcacccccttatgttggtgtttggcgtgtgacagcagttctacagagctctgtgttggggtcatggatgagcggctctcttggctcttaaaggcaggcctctctcttcttgcctttaaagaatcctccttcctcacacctggcctcctctggcttcagcttctcagcagcaagcaccagccttccacaacaacactatatttttatgctactttcctgtttgcactactacttttttattaaacgatgttaaataaaaaaaaaaaaaaaaaa

SEQ ID NO: 1822 - DNA, 1147 bp, Homo sapiens
aggcggcaggaggcgggtgggtcaaggtaactctgggctacagagtccttgctgggggttcggggagcgcttggaccccggcttctgggacgcgtcaggagaagggagcactggctttgctttcatcaggccaaagatgcctttctttgggaatacgttcagtccgaagaagacacctcctcggaagtcggcatctctctccaacctgcattctttggatcgatcaacccgggaggtggagctgggcttggaatacggatccccgactatgaacctggcagggcaaagcctgaagtttgaaaatggccagtggatagcagagacaggggttagtggcggtgtggaccggagggaggttcagcgccttcgcaggcggaaccagcagttggaggaagagaacaatctcttgcggctgaaagtggacatcttattagacatgctttcagagtccactgctgaatcccacttaatggagaaggaactggatgaactgaggatcagccggaagagaaaatgaagaccccagagacatttattggggagtaggatgtggctgagtgctttttttttggccagactagcggattcagtcctggaagagagtatcatataatgagacccacaggcactggcacccttgggttggcaatagaaggtgacatggaatggagaaaaccaagattccagatggggatagtaactagaaggtgcttcagatgcactgcctgcgggtgccagtctgaaaaccagaccgcacagaggcctggggctgctgatgagctttttggtgctctccacacacaagctcgcaaacacacatgtcccagaatagctctgttgggttgtgttgggagaagcggctggagttcattctctcacccccttatgttggtgtttggcgtgtgacagcagttctacagagctctgtgttggggtcatggatgagcggctctcttggctcttaaaggcaggcctctctcttcttgcctttaaagaatcctccttcctcacacctggcctcctctggcttcagcttctcagcagcaagcaccagccttccacaacaacactatatttttatgctactttcctgtttgcactactacttttttattaaacgatgttaaataaaaaaaaaaaaaaaaaa

SEQ ID NO: 1823 - DNA, 2037 bp, Homo sapiens
ctcttccggacgtgacgcaagggcggggttgccggaagaagtggcgaagttacttttgagggtatttgagtagcggcggtgtgtcaggggctaaagaggaggacgaagaaaagcagagcaagggaacccagggcaacaggagtagttcactccgcgagaggccgtccacgagacccccgcgcgcagccatgagccccgccccccgctgttgcttggagaggggcgggacctggagagaggctgctccgtgaccccaccatgtcctctcctaccacgagttccctggatacccccctgcctggaaatggcccccctcagcctggcgccccttcttcttcacccactgtaaaggaggagggtccggagccgtggcccgggggtccggaccctgatgtcccaggcactgatgaggccagctcagcctgcagcacagactgggtcatcccagatcccgaagaggaaccagagcgcaagcgaaagaagggcccagccccgaagatgctgggccacgagctttgccgtgtctgtggggacaaggcctccggcttccactacaacgtgctcagctgcgaaggctgcaagggcttcttccggcgcagtgtggtccgtggtggggccaggcgctatgcctgccggggtggcggaacctgccagatggacgctttcatgcggcgcaagtgccagcagtgccggctgcgcaagtgcaaggaggcagggatgagggagcagtgcgtcctttctgaagaacagatccggaagaagaagattcggaaacaacagcagcaggagtcacagtcacagtcgcagtcacctgtggggccgcagggcagcagcagctcagcctctgggcctggggcttcccctggtggatctgaggcaggcagccagggctccggggaaggcgagggtgtccagctaacagcggctcaagaactaatgatccagcagttggtggcggcccaactgcagtgcaacaaacgctccttctccgaccagcccaaagtcacgccctggcccctgggcgcagacccccagtcccgagatgcccgccagcaacgctttgcccacttcacggagctggccatcatctcagtccaggagatcgtggacttcgctaagcaagtgcctggtttcctgcagctgggccgggaggaccagatcgccctcctgaaggcatccactatcgagatcatgctgctagagacagccaggcgctacaaccacgagacagagtgtatcaccttcttgaaggacttcacctacagcaaggacgacttccaccgtgcaggcctgcaggtggagttcatcaaccccatcttcgagttctcgcgggccatgcggcggctgggcctggacgacgctgagtacgccctgctcatcgccatcaacatcttctcggccgaccggcccaacgtgcaggagccgggccgcgtggaggcgttgcagcagccctacgtggaggcgctgctgtcctacacgcgcatcaagaggccgcaggaccagctgcgcttcccgcgcatgctcatgaagctggtgagcctgcgcacgctgagctctgtgcactcggagcaggtcttcgccttgcggctccaggacaagaagctgccgcctctgctgtcggagatctgggacgtccacgagtgaggggctggccacccagccccacagccttgcctgaccaccctccagcagatagacgccggcaccccttcctcttcctagggtggaaggggccctgggccgagcctgtagacctatcggctctcatcccttgggataagccccagtccaggtccaggaggctccctccctgcccagcgagtcttccagaaggggtgaaagggttgcaggtcccgaccactgacccttcccggctgccctccctccccagcttacacctcaagcccagcacgcagtgcaccttgaacagagggaggggaggacccatggctctcccccctagcccgggagaccaggggccttcctcttcctctgcttttatttaataaaaactaaaaacagaaaaaaaaaaaaaaa

SEQ ID NO: 1824 - DNA, 3778 bp, Homo sapiens
tttttaaattttgcatttgacttaaagtgccatgagaaaatttgcatactgcaaggtggtcctagccacctccttgatttgggtactcttggatatgttcctgctgctttacttcagtgaatgcaacaaatgtgatgaaaaaaaggagagaggacttcctgctggagatgttctagagccagtacaaaagcctcatgaaggtcctggagaaatggggaaaccagtcgtcattcctaaagaggatcaagaaaagatgaaagagatgtttaaaatcaatcagttcaatttaatggcaagtgagatgattgcactcaacagatctttaccagatgttaggttagaagggtgtaaaacaaaggtgtatccagataatcttcctacaacaagtgtggtgattgttttccacaatgaggcttggagcacacttctgcgaactgtccatagtgtcattaatcgctcaccaagacacatgatagaagaaattgttctagtagatgatgccagtgaaagagactttttgaaaaggcctttagagagttatgtgaaaaaactaaaagtaccagttcatgtaattcgaatggaacaacgttctggattgatcagagctagattaaaaggagctgctgtgtctaaaggccaagtgatcaccttcctggatgcccattgtgagtgtacagtgggatggctggagcctctcttggccaggatcaaacatgacaggagaacagtggtgtgtcccatcatcgatgtgatcagtgatgatacttttgagtacatggcaggctctgatatgacctatggtgggttcaactggaagctcaattttcgctggtatcctgttccccaaagagaaatggacagaaggaaaggtgatcggactcttcctgtcaggacacctaccatggcaggaggccttttttcaatagacagagattactttcaggaaattggaacatatgatgctggaatggatatttggggaggagaaaacctagaaatttcctttaggatttggcagtgtggaggaactttggaaattgttacatgctcacatgttggacatgtgtttcggaaagctacaccttacacgtttccaggaggcacagggcagattatcaataaaaataacagacgacttgcagaagtgtggatggatgaattcaagaatttcttctatataatttctccaggtgttacaaaggtagattatggagatatatcgtcaagagttggtctaagacacaaactacaatgcaaacctttttcctggtacctagagaatatatatcctgattctcaaattccacgtcactatttctcattgggagagatacgaaatgtggaaacgaatcagtgtctagataacatggctagaaaagagaatgaaaaagttggaatttttaattgccatggtatggggggtaatcaggttttctcttatactgccaacaaagaaattagaacagatgacctttgcttggatgtttccaaacttaatggcccagttacaatgctcaaatgccaccacctaaaaggcaaccaactctgggagtatgacccagtgaaattaaccctgcagcatgtgaacagtaatcagtgcctggataaagccacagaagaggatagccaggtgcccagcattagagactgcaatggaagtcggtcccagcagtggcttcttcgaaacgtcaccctgccagaaatattctgagaccaaatttacaaaaaaacgaaaaaaataaggattgactgggctacctcagcatacatttctgccacattcttaagtagcaaaaaaggaaaagtgctttcctcctctgcaggatgtaaggtttatcagccattaaaacttagacttctctagcttttcactagctgtgaaccagccttcctgtccatggacgtgaaactgcatagtaatgagactgtgcacactgatgtttacaagattgaaagagtctttctccgaaaatcatggtaaagaatactgagacaatgaaaaaaaatcaacaaaatatgctttctggagaactgtaccttctatggtttgcttgcacatcagtagtttctgctgaacgtgctgtcataatgaagagatttccaagattttttttcctgattagaacgggtagccagtatattaaatattgatagaaaaataaaagaactggaaccagattcagaatcttgaaaacaacattttttacaacaaacaaaaaaactatattaaacagggtttaaaggaaaattaaaacagaactatgaagaagtacaatttgttatagtatagtatcaaatttctatatagattttatacctcagtggggaaaaataactgattccaatgacattcattttgttttcatctgtgatagtcatggatgcttttattttccttggggtgctgaaattgagctgaaaaaaaaaggctctttgaatatagttttaatttctctctacagttttttttgtttggtttgtgggctgttggaattgtaatttttaattgccttctaaaaaatggaaatttaacaatgtctgatctcagctgaacaaattagatgtttcagttgctcttgggtcaactggcttacagatttacatgtgcacacacacacaaatttcttatcacattttcgacttcttcacttgacctaactgattatgcgaaatacccaagattcatgctactgttccacatttgttttcacagcaataaatcttcagttctgttgtttatgattccacttaacaaggggcctgcaaatgtgatttattatttgggtatttggagataatacatttgagggttttttggaaaacctttttcactccatactcaaatatgcttcattgtcaaatgcatatttaaattaaattattgaattgtaatgtttatctgctgctttttttaaataaaatttgactgaaaatgtttaattggcattttttaatgacttacccaagaaaagtgcagctattattccatattaataggcttgcatttcttttcctaaatcttatttaggctaaatcagttttattgtcctctgattttttttaataccacagaaatcacctgagtgtcaattgaaaagttgtcaattaaaaggtaaccttttaactctcgtaggaggaatctcattaagacatttttcctgatatgtagagcagtctgttggcaaaaatgcatatattttctttcatatttgtaaaattatatttaatggaattcttttctttgattatcaaggactttcactgcaggcagtgctatttcttgtgcctaagaatgtttccaaaagtcgcatcgctaatgatatttgccaagttgagtgtacacaaagtttctcatatcctgttcaagttaatcaacatcaaacacatggggatgctttagggtgagtctataatacaaaatgcataaaccatgtccccaggaaatttgaaaggaagcaagtgctgaatggaatttttttccttttccatgagctgtgttaattctatctccagtaggcctaatgcttgaaataagcaagatgtctaatcaataaattattttcatgctcagaatttcaggtttttgtactccagcatagcttggtcttatttcttactgtatgaaagcttaacagcaatgtgatttaaggttttgttttaaatgggagatgtaagtgatttaattcatgggtacttttagaacctgatagataatcccattgcctttatttttctaattaaagaatcctaaatactttgaaaatacaaaatattcctg

SEQ ID NO: 1825 - DNA, 3521 bp, Homo sapiens
ggggggcgtgagagggcacggggaaaaggtggctctggccggggtggctcggtttcctggggctatgtaactgagctcgtcgacttaggggtccttcttcgctgccctcgccgcgtgctagcagggagtttccgctcgggagagagactgtcctcacgcccgctgcgcctcctcgacggcagagcaggcttgctcgcccgtgggagcgtcccggccgagaagccctgaggggggaggggaggccattttgtcccgaccgactccccggaaccgggcggagcggctgggagaggctgcggagccgcggtcgccgccctcggaggcactggacgccgccactgtcggggcttcctcaaagctgttcgtaggtcgcccgcgccgtctcgagccttttacccacgcttccccggtcctccggcctgagaacgcccgagtgaggagttggccgtagtgagagggaccgatcccttggggccgccggcggcgagagcccgagccgctcctcccaatggcgaagaagacgtacgacctgcttttcaagctgctcctgatcggggattccggagtggggaagacctgcgtcctttttcgtttttcggatgatgccttcaatactacctttatttccaccataggaatagacttcaagatcaaaacagttgaattacaaggaaagaagatcaagctacagatatgggatacagcaggccaggagcgatttcacaccatcacaacctcctactacagaggcgcaatgggtatcatgctagtatatgacatcaccaatggtaaaagttttgaaaacatcagcaaatggcttagaaacatagatgagcatgccaatgaagatgtggaaagaatgttactgggaaacaagtgtgatatggacgacaaaagagttgtacctaaaggaaaaggaggacagattgcaagggagcatggtattaggttttttgagactagtgcaaaagcaaatataaacatcgaaaaggcgttcctcacgttagctgaagatatccttcgaaagacccctgtaaaagagcccaacagtgaaaatgtagatatcagcagtggaggaggcgtgacaggctggaagagcaaatgctgctgagcattctcctgttccatcagttgccatccactaccccgttttctcttcttgctgcaaaataaaccactctgtccatttttaactctaaacagatatttttgtttctcatcttaactatccaagccacctattttatttgttctttcatctgtgactgcttgctgactttatcataattttcttcaaacaaaaaaatgtatagaaaaatcatgtctgtgacttcatttttaaatgtacttgctcagctcaactgcatttcagttgtattatagtccagttcttatcaacattaaaacctatagcaatcatttcaaatctattctgcaaattgtataagaataaagttagaattaacaattttattttgtacaacagtggaattttctgtcatggataatgtgcttgagtccctataatctatagacatgtgatagcaaaagaaacaaacaaaagccaggaaaacactcattttcgccttgaatatgtaaatgggattaattttgtcctgtgccttatgtggaaaggaacttctttggttttccttttttgttctggtggaagcatgtgcaggagacatatcatccaaacataaaccattaaaatgtttgtggtttgcttggctgtaattttcaaagtagttaattgaggacaaagggtaatgcagaagtgatagctttggtttgctgagtcttgttttaagtggccttgatatttaaaactattcctgccaccatttcttctccttggccacttcttccttgcgtctccctgcatgctgctttatttgcttctccctccccaaccacctcatggtatatttaagagtgaaagggacaaactagtaggtttgtcaagtttaatataaagcactgatgtaacttgctaggtaaacggaaagataagttctaactgcctactatccaatgtcagttaattggtgtcttcccccctcatttgctctcttccctaaaatgtgtcccagatgccttcatttgctgttttacttctatgttctgcttttcctcctctctttgttcccttcctgtctatccattgagtttatgaaatggaagagttaactgcatgcactagtgtttggagggtgttgtggtttgtctttctaattaggtgtatagcctattcactttcctagaataaatctcttaacctaaatttgagtagtctgcattttggcaactcctctagcagcttggtagcctagtacaggttgttttttaaaaaaaggaaaagcaggaaggaggagtgaattttattaacatgtttgccaaatgtattgagatttggcctctgaagaacactttttcagtgttaagtttctttaccttaagattcagaaatactttagaatattattaattttaagtcctgtctttacatccttttggaaaacttgtattaccatgagtttggaaaaaggacaacgaaaggcttttcatgtaaagataagatctttggctatctctaaccctgtccttttttcactgcattttttctagttttgcttcattgcttatcattaggatagggtaagtgaagtttgctatgctgctagcatcctaagatgatacctttgttgaaagaattgtgaatagcatgattcatttctagcagaggctgagtttaggactgcagcttccattgagaagtctttctgtgtcgtgaatagcattttaatgacctcttggctcacataagcaaacaacatagggacgtatctgctatgaaaatccacaaatttttcagatagtgccctaaaaacaattttatatgcctcactggttgttattcttaggttattcccacacttgactttatcattgtttactactagtaaaaagcagcattgccaaataatccctaattttccactaaaaatataatgaaatgatgttaagctttttgaaaagtttaggttaaacctactgttgttagattaatgtatttgttgcttccctttatctggaatgtggcattagcttttttattttaaccctctttaattcttattcaattccatgacttaaggttggagagctaaacactgggatttttggataacagactgacagttttgcataattataatcggcattgtacatagaaaggatatggctaccttttgttaaatctgcactttctaaatatcaaaaaagggaaatgaagtataaatcaatttttgtataatctgtttgaaacatgagttttatttgcttaatattagggctttgccccttttctgtaagtctcttgggatcctgtgtagaagctgttctcattaaacaccaaacagttaagtccattctctggtactagctacaaattcggtttcatattctacttaacaatttaaataaactgaaatatttccaaaaaaaaaaaaaaaaaaaac

SEQ ID NO: 1826 - DNA, 1201 bp, Homo sapiens
gccattaacaaagatggtgcttatggggcaggttccctaacagtcaggattccggttgcagtttttctcccccgccccaaagatacgtggttgcagacggagaaatggaggccagagacaaacaagtactccgctcacttcgcctggagctgggtgcagaggtattggtggagggactggttcttcagtacctctaccaggaaggaatcttgacggaaaaccatattcaagaaatcaatgctcaaaccacaggcctccggaaaacaatgctcctgctggatatcctaccttccaggggccctaaagcatttgatacattcctagattccctacaggagtttccctgggtcagggagaagctgaagaaggcaagggaagaggccatgaccgacctgcctgcaggtgacagattgactgggatcccctcgcacatcctcaacagctccccatcagaccggcagattaaccagctggcccagaggctgggccctgagtgggagcccatggtgctgtctctgggactgtcccagacggatatctaccgctgtaaggccaaccacccccacaacgtgcagtcgcaggtggtggaggccttcatccgttggcggcagcgcttcgggaagcaggccaccttccagagcctgcacaacgggctgcgggctgtggaggtggacccctcgctgctcctgcacatgttggagtgatggtgcctccagcaaccgctggggagtgtgtccctgagtcatgtgggctgaatcctgactttcactcagagcaggtggttttttgtgtaggtttgttttttatttttgatgatcttcagatggaaggagaaaacagggtttccactagacattacttgaaaggccagattactcagcagatctcccatgttggctcaacaattctttgtttttaattgcttgaagattgcattgttgtaattgttcagtttttaaatgtgtaatggcattttaatagactagtaaatcacagtggttcaaaatatatatccatatatatatatatccatatatatatctcatgtcatcacattacaggcaggtgtctcatatgtaaaacatttacctgaatgttgtctgaggactgaactgtggactttactattcataatgataaaataataaaatgcgaattactatatataatgtgcctcactcatgagaaaaaaaaaaaaaaa

SEQ ID NO: 1827 - DNA, 2974 bp, Homo sapiens
gcccctgcctcggccagaggtttcatttttaactgaatatttacgaaagctggaagcgtgcgaggggggtggggtggggtggaaatagcggctgcttcttttccagggatttatttaatggggatgtgttcaaggcaagagcgaattcagaaggatatcgacgtcgtgatccagaagtccagagctgagaaggactgcctgtttgcagatttcagatactctgactccacctttacttttacctacgttggcggccccagaagtgtatcctactcagtacatgtatctgaagattacccagataatacatatgtgtcaagttcagagaatgatgaagatgtgctagttactacagagccaataccagtaatttttcatagaatagcaacagaattaagaaaaacaaatgacattaactgttgcttatccataaaatccaaattacaaaaggaaaatggggaggaatcaagacagaatagtacagtggaggaagattctgaaggtgacaatgattccgaagaattttattacggaggacaggtgaactatgatggggaactgcacaagcacccacaactggaagctgatttgtcagcagttagagagatatatgggccacatgcagtttctctcagggaatatggagccattgatgatgtagatattgatctgcatatcgatgttagctttcttgatgaggagattgctgtggcttgggaagtaattcgaacagaacctataattgttcgactacactgttcacttacacagtatttaaatggcccagtgcccactgttgatgtctttcagatttccacaaaagagcgatttggattgggacatcagctgaaaaaaatcatgcagacatttgttacacagcagtggaaacagagcaaagaaaaatccaattgcctgcacaataaaaagttgtcagagaagaaagtgaagtctcccctgcatttattttctactttgcgcaggtcgccaagttatcctccccctggttgtggcaaaagcaaatccaaactgaaatctgagcaggacggaatctccaaaacgcataagctgctgcggaggacttgttccagcacagtcaagactgatgatgtgtgtgtcacaaagtcacacaggacctttggccgctccttgtccagcgatcccagggcggagcaggctatgacagcaattaaatcgcacaaacttttgaaccgtccttgccctgcagctgttaagtcagaggaatgcctaactctaaagtcgcatagactattgactcgatcttgttctggagatccacgatgtgagcacaacacaaacttgaagccccataaactgttaagcaggtcttactctagtaatctcagaatggaagaattatatggactgaaaaatcacaaattgctcagcaagtcctactccagtgcccccaagtcatccaaaactgagcttttcaaggaacctaacgcagagggcaggaggctctctcttacctcagggcttattggtatcctaacaccatcttcatcttcatcttctcagcttgctccaaatggtgcaaaatgcattccagtacgagaccgtggcttcctggtgcagacaattgagtttgctgaacagcggatccctgtattaaatgaatattgtgtggtttgtgatgagccacatgtgtttcaaaatggccctatgcttaggcctaccgtatgtgaacgggagctgtgtgtgtttgcttttcaaaccctgggagtaatgaatgaagctgctgatgaaatagcaactggagctcaggtggtagatctactagtatccatgtgtaggtctgcgttggaatctcctagaaaagttgtgattttcgagccatatccttctgtggtagatcctaatgatcctcagatgttggccttcaaccccaggaaaaagaactatgatcgagtaatgaaagcactggatagcataacttctatcagagaaatgacacaagcaccatatctggaaatcaagaagcaaatggataaacaggacccccttgctcatcccttactgcaatgggttatatcaagtaatagatcacatattgtgaaactgccagttaacaggcaattgaagtttatgcatactccacatcagttccttcttctcagcagtccaccagccaaagaatccaattttagagctgctaaaaaactctttggaagcacctttgcatttcatggctcacacattgaaaactggcactccatcctgaggaatggtctggttgttgcttctaatacacgattgcagctccatggtgcaatgtatggaagtggaatctatcttagtccaatgtcaagcatatcatttggttactcagggatgaacaagaaacagaaggtgtcagccaaggacgagccagcttcaagcagtaaaagcagcaatacatcacagtcacagaaaaaaggacagcaatcccaattcctgcaaagccgtaacttaaaatgcatagccttatgtgaagtgatcacctcatctgacctgcacaaacatggagagatatgggttgtccccaatactgaccatgtctgcacacgattctttttcgtctatgaagacggccaagtgggagatgcaaatattaatacacaagaaggaggcattcacaaagagatcctccgagtaattggtaatcaaactgctactggttaaaggaccaccatttaattaacatgattcgaaagccttcctcgggttcaaagctggattttgaactgaagaagattataaaattatttattgttattataaacaaaattaaccctttgaatactgattttttttcttagtatttctaagtatctcattaaatacctaaaatggtataagatttatcaattgtagggttatggaatctagtaataaaatttcaacagcacttaaactgaagtttgggttgctcatacaataaacagattgaaaaaacaaaaaaaaaaaaaaaaag

SEQ ID NO: 1828 - DNA, 3337 bp, Homo sapiens
attgctccaagatggcggcggcggcggcagcgggagcgcagctcagctgggctggaactgccctcctggaactcccccagcctacaacctaggaggtgcagggactgaggctcaggccaaatcgcaactcagacccagtgaacccaaggcctgaagagaatttggattcatttaccttgttttgtggggactggagagacaagtaaactctcagagtaactgtcccctctgactaccatttctaaggatgccccggaggcccagctagccccagacttcggccccatgcggctcacccgctgccaggctgccctggcggccgccatcaccctcaaccttctggtcctcttctatgtctcgtggctgcagcaccagcctaggaattcccgggcccgggggccccgtcgtgcctctgctgccggcccccgtgtcaccgtcctggtgcgggagttcgaggcatttgacaacgcggtgcccgagctggtagactccttcctgcagcaagacccagcccagcccgtggtggtggcagccgacacgctcccctacccgcccctggccctgccccgcatccccaacgtgcgtctggcgctgctccagcccgccctggaccggccagccgcagcctcgcgcccggagacctacgtggccaccgagtttgtggccctagtacctgatggggcgcgggctgaggcacctggcctgctggagcgcatggtggaggcgctccgcgcaggaagcgcacgtctggtggccgccccggttgccacggccaaccctgccaggtgcctggccctgaacgtcagcctgcgagagtggaccgcccgctatggcgcagcccccgccgcgccccgctgcgacgccctggacggagatgctgtggtgctcctgcgcgcccgcgacctcttcaacctctcggcgcccctggcccggccggtgggcaccagcctctttctgcagaccgcccttcgcggctgggcggtgcagctgctggacttgaccttcgccgcggcgcgccagcccccgctggccacggcccacgcgcgctggaaggctgagcgcgagggacgcgctcggcgggcggcgctgctccgcgcgctgggcatccgcctagtgagctgggaaggcgggcggctggagtggttcggctgcaacaaggagaccacgcgctgcttcggaaccgtggtgggcgacacgcccgcctacctctacgaggagcgctggacgcccccctgctgcctgcgcgcgctgcgcgagaccgcccgctatgtggtgggcgtgctggaggctgcgggcgtgcgctactggctcgagggcggctcactgctgggggccgcccgccacggggacatcatcccatgggactacgacgtggacctgggcatctacttggaggacgtgggcaactgcgagcagctgcggggggcagaggccggctcggtggtggatgagcgcggcttcgtatgggagaaggcggtcgagggcgactttttccgcgtgcagtacagcgaaagcaaccacttgcacgtggacctgtggcccttctacccccgcaatggcgtcatgaccaaggacacgtggctggaccaccggcaggatgtggagtttcccgagcacttcctgcagccgctggtgcccctgccctttgccggcttcgtggcgcaggcgcctaacaactaccgccgcttcctggagctcaagttcgggcccggggtcatcgagaacccccagtaccccaacccggcactgctgagtctgacgggaagcggctgaagccctgataacctcgcctttgtttttcgggggtctgtctggatgtggagaagctctgtgtgagcggtgaggggtggagggatgtcgcggagaggggaagggggaaactgaccaagaaagaaattctaaggagagcatgagagaaggctggcattggcaggaggagagcaccaggacgaggatgggaagcgacctccagatttatcaaatggtcatgcccactgggagccgtggatatgcgtggggacatcctgggtcatctcagtcatggagggagacggggatgtcacgccgtcccgcagggcccagcacagccccagacccgaaaaaagtgttctgcccaagattccgagagccctgcgctctagggcaggggcagagttttggaaacagtgcaggctctggagccagactggcgagattcaaatcctggctctatcgcttcggagccaggtgggcctgggggggcgtcgcagtctctctgtgcctcagttgcttccaggatgcgggacccttggctgcaggggttgcttccgccactagagggcgcgccggtcccgctcctggtggcccactgtggctgcccgggcgacagtacgcccagggcctgtgttccatagccatctactctcttgagcctttggacttctctccaagcccctgtgggaggcggacagcagtgaccacctccccttcttttggactgcgacctccttccctcctgggagagccctgtgacctgcatgctactcttaactgttctattcaagactgaatagaagtatttcagtcttgcagaggaggaaatgctcagagctccgaggtgcggctgtggtcgagaaccgggtgctgggccgggcgcgggggctcacgcctgtaatcccagcactttgggaggccgaggtgggaggatcgcttgagcccaggagtctgagaccagcctcggcaacatgccaagaccccgtctctatttttaaaaaagaaaaagaaccgacttctgaatcgcagctccactcatgactaatacctcattatttcagctgtctgcacctaattccccacttgcacggcagtgtagacaataaccatagctcacactcactgagcacctactgggtaccaggcaccattctcagtgtttcacctggatcaactaatgcgtccctcacctcagccctctgaagtgacagctgctattattttcattacacagatgaaaaagctgaggccagaatcgtgaagtcacttgctcaaggtcaggcagcttaggaaggggcagatcgggggcttgaacccaggtggtcaggctctggagcccacaattgtcttacccactatgcccctctctagtcatggtccccaagaggggcttggagacccacttagcaggtgaaagcaatggcagccttccttatttgattatgcacctaagaataaatggtatttgggcatgtattcccaatatgtgtatatttatttataaatatatacagatactattatctgtatgttagtaataaagcttaaattattccattttaaaattaaaaaaaaaaaaaaaaaa

SEQ ID NO: 1829 - DNA, 2213 bp, Homo sapiens
ccggcaaagcccagctacaggcgggcgactgcggggggcccctgaggcggcgggggccatggctggggtcgcgtgcttgggaaaagctgccgacgcagatgaatggtgcgacagcggcctgggctccctgggtccggacgcagcggcccccggaggacctgggttgggcgcggagttgggcccggggctgtcgtgggctcccctcgtcttcggctacgtcactgaggatggggacacgcttctcggccggcactgagtacatggacctgcagaatgacctaggccagacagccctgcacctggcagccatcctgggggagacatccacggtggagaagctgtacgcagcaggcgccgggctgtgtgtggcggagcgtaggggccacacggcgctgcacctggcctgccgtgtgggggcacacgcctgtgcccgtgccctgcttcagccccgcccccggcgccccagggaagcccccgacacctacctcgctcagggccctgaccgtactcccgacaccaaccatacccctgtcgccttgtaccccgattccgacttggagaaggaagaagaggagagtgaggaggactggaagctgcagctggaggctgaaaactacgagggccacaccccactccacgtggccgttatccacaaagatgtggagatggtccggctgctccgagatgctggagctgaccttgacaaaccggagcccacgtgcggccggagcccccttcatttggcagtggaggcccaggcagccgatgtgctggagcttctcctgagggcaggcgcgaaccctgctgcccgcatgtacggtggccgcaccccactcggcagtgccatgctccggcccaaccccatcctcgcccgcctcctccgtgcacacggagcccctgagcccgagggcgaggacgagaaatccggcccctgcagcagcagtagcgacagcgacagcggagacgagggcgtgagtcaggaggagagacagggcagcccagctggggggtcaggatagaccggcaggcaagaagcccaagaagataattaggcaccgaccttgggctgctgttagagaactcaggcagcagcgccagtgacacggggcactagtcaggagagacctggacaggggtggtgggaagagcttgggcagaagtggctgaaaaactaaggcagtggcaaaggtagaactcaggcaggggtggagaaaaggcgttggtcgcagtgattggtgaacacagcgggggtgggtggtagcgctgggggtgattttaggcagcaagaattggagaactcacactgcgaaaagaaaaccttgggtggcagtgatttgaacaccggcagtgctggggcaggacccgagccagcggtggggagagatatagtcagagaacccagcaatacagatccgtccttgggcaaggcgcggtgctggatgatgggtgcggaggaatttgggtaaaggcagagggaaggggtggaggagggccagctcagttgccgaaactctggagtggcggctggctagaaattggtctgtagaaatgaccttgaaaatggagttctggccaggtgcggtggctcacgcctgtaatcccagcactttgggaggccgaggcaggcagatcacgaggtcaggagttcgagaccagcctggccaacatggcaagaccctgtctctactaaaaatacaaaaattagctgggcgtggtggcgcatgcctataatcccagctacttgggaggctgaggtaggagaattgcttgaacctgggaggtggaggttgcagtgaacctagatcacgccactgcattccagcctgggcaacagagcgagactccatcttaaaaaaaaaaaaaaaaaaaagaaagaaaagaaaatggagttctgagagctaggaaactgggaggttgagccaggagcaggggaacttgggctttgaggcgagacctaattcttagggtgctctatgaggacatgggtggtgggcaaagtgacagccgcctgagcccctctgcctggtcccctttgcccccaggatgaatacgacgacattgtggttcacagcagccgcagccaaacccggctgcctcccaccccagcctcaaaacctcttcctgacgacccccgccccgtgtgatttgtttcattgttaatataatttccagtttaataaacaaaaccctagttctgacaaccagaaaaaaaa

SEQ ID NO: 1830 - DNA, 1198 bp, Homo sapiens
ccggcaaagcccagctacaggcgggcgactgcggggggcccctgaggcggcgggggccatggctggggtcgcgtgcttgggaaaagctgccgacgcagatgaatggtgcgacagcggcctgggctccctgggtccggacgcagcggcccccggaggacctgggttgggcgcggagttgggcccggggctgtcgtgggctcccctcgtcttcggctacgtcactgaggatggggacacggcactgcacttggctgtgattcatcagcatgaacccttcctggattttcttctaggcttctcggccggcactgagtacatggacctgcagaatgacctaggccagacagccctgcacctggcagccatcctgggggagacatccacggtggagaagctgtacgcagcaggcgccgggctgtgtgtggcggagcgtaggggccacacggcgctgcacctggcctgccgtgtgggggcacacgcctgtgcccgtgccctgcttcagccccgcccccggcgccccagggaagcccccgacacctacctcgctcagggccctgaccgtactcccgacaccaaccatacccctgtcgccttgtaccccgattccgacttggagaaggaagaagaggagagtgaggaggactggaagctgcagctggaggctgaaaactacgagggccacaccccactccacgtggccgttatccacaaagatgtggagatggtccggctgctccgagatgctggagctgaccttgacaaaccggagcccacgtgcggccggagcccccttcatttggcagtggaggcccaggcagccgatgtgctggagcttctcctgagggcaggcgcgaaccctgctgcccgcatgtacggtggccgcaccccactcggcagtgccatgctccggcccaaccccatcctcgcccgcctcctccgtgcacacggagcccctgagcccgagggcgaggacgagaaatccggcccctgcagcagcagtagcgacagcgacagcggagacgagggcgatgaatacgacgacattgtggttcacagcagccgcagccaaacccggctgcctcccaccccagcctcaaaacctcttcctgacgacccccgccccgtgtgatttgtttcattgttaatataatttccagtttaataaacaaaaccctagttctgacaaccagaaaaaaaa

SEQ ID NO: 1831 - DNA, 1035 bp, Homo sapiens
gcggctggtaccccggaagcagtcgctgcaacttccgggaggtgcttgtgtgcctggtgcgggagctacggggcccagggattgtgtttaaagtagtgcttctaccaacatgtcccgtggttccagcgccggttttgaccgccacattaccattttttcacccgagggtcggctctaccaagtagaatatgcttttaaggctattaaccagggtggccttacatcagtagctgtcagagggaaagactgtgcagtaattgtcacacagaagaaagtacctgacaaattattggattccagcacagtgactcacttattcaagataactgaaaacattggttgtgtgatgaccggaatgacagctgacagcagatcccaggtacagagggcacgctatgaggcagctaactggaaatacaagtatggctatgagattcctgtggacatgctgtgtaaaagaattgccgatatttctcaggtctacacacagaatgctgaaatgaggcctcttggttgttgtatgattttaattggtatagatgaagagcaaggccctcaggtatataagtgtgatcctgcaggttactactgtgggtttaaagccactgcagcgggagttaaacaaactgagtcaaccagcttccttgaaaaaaaagtgaagaagaaatttgattggacatttgaacagacagtggaaactgcaattacatgcctgtctactgttctatcaattgatttcaaaccttcagaaatagaagttggagtagtgacagttgaaaatcctaaattcaggattcttacagaagcagagattgatgctcaccttgttgctctagcagagagagactaaacattgtcgttagtttaccagatccgtgatgccacttacctgtgtgtttggtaacaacaaaccaacatcatggaggtccctggattgaaaaaggagcctctcccactcctcctaccaccgaagtggttaggactctatataaataaaaacaaggcttttggaaaataaaaaaaaaaaaaaaaaaa

SEQ ID NO: 1832 - DNA, 4390 bp, Homo sapiens
ctctagctctcagcggctgcgaagtctgtaaacctggtggccaagtgattgtaagtcaggagactttccttcggtttctgcctttgatggcaatttccttcggtttctgcctttgatggcaagaggtggagattgtggcggcgattacagagaacgtctgggaagacaagttgctgtttttatgggaatcgcaggcttggaagagacagaagcaattccagaaataaattggaaattgaagatttaaacaatgttgttttaaaatattctaacttcaaagaatgatgccagaaacttaaaaaggggctgcgcagagtagcaggggccctggagggcgcggcctgaatcctgattgcccttctgctgagaggacacacgcagctgaagatgaatttgggaaaagtagccgcttgctactttaactatggaagagcagggccacagtgagatggaaataatcccatcagagtctcacccccacattcaattactgaaaagcaatcgggaacttctggtcactcacatccgcaatactcagtgtctggtggacaacttgctgaagaatgactacttctcggccgaagatgcggagattgtgtgtgcctgccccacccagcctgacaaggtccgcaaaattctggacctggtacagagcaagggcgaggaggtgtccgagttcttcctctacttgctccagcaactcgcagatgcctacgtggacctcaggccttggctgctggagatcggcttctccccttccctgctcactcagagcaaagtcgtggtcaacactgacccagtgagcaggtatacccagcagctgcgacaccatctgggccgtgactccaagttcgtgctgtgctatgcccagaaggaggagctgctgctggaggagatctacatggacaccatcatggagctggttggcttcagcaatgagagcctgggcagcctgaacagcctggcctgcctcctggaccacaccaccggcatcctcaatgagcagggtgagaccatcttcatcctgggtgatgctggggtgggcaagtccatgctgctacagcggctgcagagcctctgggccacgggccggctagacgcaggggtcaaattcttcttccactttcgctgccgcatgttcagctgcttcaaggaaagtgacaggctgtgtctgcaggacctgctcttcaagcactactgctacccagagcgggaccccgaggaggtgtttgccttcctgctgcgcttcccccacgtggccctcttcaccttcgatggcctggacgagctgcactcggacttggacctgagccgcgtgcctgacagctcctgcccctgggagcctgcccaccccctggtcttgctggccaacctgctcagtgggaagctgctcaagggggctagcaagctgctcacagcccgcacaggcatcgaggtcccgcgccagttcctgcggaagaaggtgcttctccggggcttctcccccagccacctgcgcgcctatgccaggaggatgttccccgagcgggccctgcaggaccgcctgctgagccagctggaggccaaccccaacctctgcagcctgtgctctgtgcccctcttctgctggatcatcttccggtgcttccagcacttccgtgctgcctttgaaggctcaccacagctgcccgactgcacgatgaccctgacagatgtcttcctcctggtcactgaggtccatctgaacaggatgcagcccagcagcctggtgcagcggaacacacgcagcccagtggagaccctccacgccggccgggacactctgtgctcgctggggcaggtggcccaccggggcatggagaagagcctctttgtcttcacccaggaggaggtgcaggcctccgggctgcaggagagagacatgcagctgggcttcctgcgggctttgccggagctgggccccgggggtgaccagcagtcctatgagtttttccacctcaccctccaggccttctttacagccttcttcctcgtgctggacgacagggtgggcactcaggagctgctcaggttcttccaggagtggatgccccctgcgggggcagcgaccacgtcctgctatcctcccttcctcccgttccagtgcctgcagggcagtggtccggcgcgggaagacctcttcaagaacaaggatcacttccagttcaccaacctcttcctgtgcgggctgttgtccaaagccaaacagaaactcctgcggcatctggtgcccgcggcagccctgaggagaaagcgcaaggccctgtgggcacacctgttttccagcctgcggggctacctgaagagcctgccccgcgttcaggtcgaaagcttcaaccaggtgcaggccatgcccacgttcatctggatgctgcgctgcatctacgagacacagagccagaaggtggggcagctggcggccaggggcatctgcgccaactacctcaagctgacctactgcaacgcctgctcggccgactgcagcgccctctccttcgtcctgcatcacttccccaagcggctggccctagacctagacaacaacaatctcaacgactacggcgtgcgggagctgcagccctgcttcagccgcctcactgttctcagactcagcgtaaaccagatcactgacggtggggtaaaggtgctaagcgaagagctgaccaaatacaaaattgtgacctatttgggtttatacaacaaccagatcaccgatgtcggagccaggtacgtcaccaaaatcctggatgaatgcaaaggcctcacgcatcttaaactgggaaaaaacaaaataacaagtgaaggagggaagtatctcgccctggctgtgaagaacagcaaatcaatctctgaggttgggatgtggggcaatcaagttggggatgaaggagcaaaagccttcgcagaggctctgcggaaccaccccagcttgaccaccctgagtcttgcgtccaacggcatctccacagaaggaggaaagagccttgcgagggccctgcagcagaacacgtctctagaaatactgtggctgacccaaaatgaactcaacgatgaagtggcagagagtttggcagaaatgttgaaagtcaaccagacgttaaagcatttatggcttatccagaatcagatcacagctaaggggactgcccagctggcagatgcgttacagagcaacactggcataacagagatttgcctaaatggaaacctgataaaaccagaggaggccaaagtctatgaagatgagaagcggattatctgtttctgagaggatgctttcctgttcatggggtttttgccctggagcctcagcagcaaatgccactctgggcagtcttttgtgtcagtgtcttaaaggggcctgcgcaggcgggactatcaggagtccactgcctccatgatgcaagccagcttcctgtgcagaaggtctggtcggcaaactccctaagtacccgctacaattctgcagaaaaagaatgtgtcttgcgagctgttgtagttacagtaaatacactgtgaagagactttattgcctattataattatttttatctgaagctagaggaataaagctgtgagcaaacagaggaggccagcctcacctcattccaacacctgccatagggaccaacgggagcgagttggtcaccgctcttttcattgaagagttgaggatgtggcacaaagttggtgccaagcttcttgaataaaacgtgtttgatggattagtattatacctgaaatattttcttccttctcagcactttcccatgtattgatactggtcccacttcacagctggagacaccggagtatgtgcagtgtgggatttgactcctccaaggttttgtggaaagttaatgtcaaggaaaggatgcaccacgggcttttaattttaatcctggagtctcactgtctgctggcaaagatagagaatgccctcagctcttagctggtctaagaatgacgatgccttcaaaatgctgcttccactcagggcttctcctctgctaggctaccctcctctagaaggctgagtaccatgggctacagtgtctggccttgggaagaagtgattctgtccctccaaagaaatagggcatggcttgcccctgtggccctggcatccaaatggctgcttttgtctcccttacctcgtgaagaggggaagtctcttcctgcctcccaagcagctgaagggtgactaaacgggcgccaagactcaggggatcggctgggaactgggccagcagagcatgttggacaccccccaccatggtgggcttgtggtggctgctccatgagggtgggggtgatactactagatcacttgtcctcttgcccgctcatttgttaataaaatactgaaaac

SEQ ID NO: 1833 - DNA, 3622 bp, Homo sapiens
aggggacgctgctttccgcgctggacggaccaagcgagggagggtgcgaggggaaaccggaaggaagaggcggcggcgccagccttcctcggccggaggcggaggcgagaccccaggcgaggccgcggcgggagggccacgcccccgccgccgcgccggaggggcccagtgtggacggggccacgggctggagcggatcccacacctccggaccgagggacgcggttactccacaggatccgctgaacataggatgttgccacaaaatctacctcgtgtatttttctctttcactcatgagctgcacaattgcagatttgagcacaatgtctgcagactgtgttgaaaaactctgaagaacctaattaacacaggatgacctaggagtgattctaagtctgtgtaacaagatattactcattagtgaatgtgtcagtcttggtactgaatgctgcagataacagcaagtaggttctcctttatttctgaagtattcacttgaccttccatcagtaagacggacttttctaatctgttcctggagatattaatggaatacagtcatgtccactcaagacgagaggcagatcaatactgaatatgctgtgtcattgttggaacagttgaaactgttttatgaacagcagttgtttactgacatagtgttaattgttgagggcactgaattcccttgtcataagatggttcttgcaacatgtagctcttatttcagggccatgtttatgagtggactaagtgaaagcaaacaaacccatgtacacctgaggaatgtcgatgctgccaccttacagataataataacttatgcatacacgggtaacttggcaatgaatgacagcactgtagaacagctttatgaaacagcttgcttcctacaggtagaagatgtgttacaacgttgtcgagaatatttaattaaaaaaataaatgcagagaattgtgtacgattgttgagttttgctgatctcttcagttgtgaggaattaaaacagagtgctaaaagaatggtggagcacaagttcactgctgtgtatcataaggacgcgttcatgcagctgtcacatgacctactgatagatattctcagtagtgacaatttaaatgtagaaaaggaagaaaccgttcgagaagctgctatgctgtggctagagtataacacagaatcacgatcccagtatttgtcttctgttcttagccaaatcagaattgatgcactttcagaagtaacacagagagcttggtttcaaggtctgccacccaatgataagtcagtggtggttcaaggtctgtataagtccatgcccaagtttttcaaaccaagacttgggatgactaaagaggaaatgatgattttcattgaagcatcttcagaaaatccttgtagtctttactcttctgtctgttacagcccccaagcagaaaaagtttacaagttatgtagcccaccagctgatttgcataaggttgggaccgttgtaactcctgataatgatatctacatagcagggggtcaagttcctctgaaaaacacaaaaacaaatcacagtaaaacaagcaaacttcagactgccttcagaactgtgaattgcttttattggtttgatgcacagcaaaatacctggtttccaaagaccccaatgctttttgtccgcataaagccatctttggtttgctgtgaaggctatatctatgcaattggaggagatagcgtaggtggagaacttaatcggaggaccgtagaaagatacgacactgagaaagatgagtggacgatggtaagccctttaccttgtgcttggcaatggagtgcagcagttgtggttcatgactgcatttatgtgatgacactgaacctcatgtactgttattttccaaggtctgactcatgggtagaaatggccatgagacagactagtaggtcctttgcttcagctgcagcttttggtgataaaattttctatattggagggttgcatattgctaccaattccggcataagactcccctctggcactgtagatgggtcttcagtaactgtggaaatttatgatgtgaataaaaatgagtggaaaatggcagccaacatccctgctaagaggtactctgacccctgtgttagagctgttgtgatctcaaattctctatgtgtgtttatgcgagaaacccacttaaatgagcgagctaaatatgtcacctaccaatatgacctggaacttgaccggtggtctctgcggcagcatatatctgaacgtgtactgtgggacttggggagagattttcgatgcactgtggggaaactctatccatcctgccttgaagagtatccatggaaaccaccaacttatcttttttcaacggatgggacagaagagtttgaactggatggagaaatggttgcactaccacctgtatagtggggaagttcagggagtgcacgcctgagttatgtgctttgtcattttctttgctaaacaaaagaggctatgaaagaactaaatatgagtacataaaattctatctttgataaattttatttttatgccctacttaatatttgcatcagtataatatatatcagtgagtcttacagaaagatatgcttccataatatgaaatagattattcaataattgagaaactttatgtgtaatcatgagagtataagaatctggattatctaacattgttagccctgtgtatgtacagttcaaaaagttcatttataaaagtagtttcctgttcctagtgtgatgtatcacaaattgtgctgaggttattttagtatgtgtgtttcattcccgtgcttctgttctgaagtcctggaatacagttttcagtgtaattaattcaactgcacttaacactaatgtccgtgttggtatagaaatgtctaaatcctatactctagttgaggaagatcttccataattttatggtattacacagggaaagctatgactgcaggatcagtctaactatactattaggtgcatgtattctcttttcactaacttatacttgtctatctagaatacaggtcttccagtcagctggtcatttaccaggtgtggacttaagttgctgggcttgcagtaagaattgccagccactcattgtgcgggtctgcgtggagctttaatcagaaaaagcctccactttctgtattatgttaacattggctcatgcatataactatctgctgctgatgtagttctccatcttcaagatttagagtgggttaaccaggtcattacatcttaatttaataacaagcattactgtagagtgattgtgtatagatctgttagctgtcagggtgtgttttttttaacctgttgtgtgcgtgtgggggttaggattagtaaggtgaactgttcaggaattctctgcactagctgtgcagaagagcagataactagcgctgctctggcattaatcccaggaaccactagcagtagtggggcgccgccaatctaacatgagcacaggtgcttcatgacaaacattactagcatgttcaactgcaccatgttctggcactgtattttgaatgacattaatttattaaataaattgtatatattcaaaaaaaaaaaaaaaa

SEQ ID NO: 1834 - DNA, 1567 bp, Homo sapiens
gaattcggcacgagggagaagccaaacgtaaagacaccaggagtttctcgggcccagctgtggctgctgccggggagccccaagccttggcggtccttgctgcgaataggagtctggtcaggcgtcaggctagtccgacgaagagtgggtgtgatcagcactggaaaagatgcctgcccctgctgccacatatgaaagagtagtttacaaaaacccttccgagtaccactacatgaaagtctgcctagaatttcaagattgtggagttggactgaatgctgcacagttcaaacagctgcttatttcggctgtgaaggacctgtttggggaggttgatgccgccttacctttggacatcctaacctatgaagagaagaccttgtcagccatcttgagaatatgtagcagtggtcttgtcaaattgtggagctctttgaccctgttaggatcctataaaggcaaaaaatgtgctttccgggtgattcaggtttctccatttcttcttgcattatctggtaatagtagggaactagtattggattgaatgaatagtcttccattttggaaacgttcatccactctcatatttattttttcggtgcctgcatgtttgaagactgaagcaggctaaaagctcttgatgaaatttgagggtgctgaagatgttcccactaatttccagccatcacctttggtggggtgggcttcggaggacagtctgtctgaacctgccagtgctgaccctgcagcactttcagcatatgcacatcaaagttggagaccgcgctgaacttaggagggccttcacacagactgatgtggctaccttctcagaattaacaggggatgttaatcctttgcatttgaatgaagactttgcaaaacacaccaagtttggaaatacaattgtacatggagttttgatcaacggacttatctcagctctcctaggaactaaaatgccagggccaggctgtgtatttctttcccaggaaattagctttccagcccctttatatattggagaagttgttttagcttctgcagaagtgaaaaagctgaagcggttcattgctattattgcagtgtcatgttctgtaatagaaagtaaaaagactgttatggaaggctgggttaaagttatggttccagaagcttccaaatcctgaaatagatgttttaaagatgcaacctcaaacaccaatgctgttgttaaagagcctatggggaattgctgctctttaccaaagaatggttgataggcccagaagcccatgttagttaggggaagggagcaggaagagggttgttcaaatgcccactttccagtttggccttatgctttatgcagacttgagtgtatgcaggatttcattatctgcctgggtttttttgtttgttttttgttttttaattcaagaagtaggctgggcccggtggctcatgcctgtaatcctggcactttgggaggctgcggcaggcggatcacttgaggtcaggagtccaagaccagcctggccaacatggtgaaaccccatctctaccaaaaaaaaaaaaaaaaaaaaaa

SEQ ID NO: 1835 - DNA, 5848 bp, Homo sapiens
agtggaggctgcggccggggctatgggcagaggcggccgggtctgcttcttccctgtcactgccgcagcagcttggggtgcaaggcggcctggggcggcggaaggggcgccccccgagttccgtctgaggaagcggcggctgccgaggaagtccacgagagccgggtcccgcacgcccctggggtccgggtgctgaggcgccgcctggccgcctccccgggccgcggcaccgctccgacctagccgccctctccaccggggccgcggcagcgccagtcggggcccttccctctaagcagcccaaacgtgcagaatgccccacaagattggatttgtagtcgtcagctcatctggacacgaagacggcttcagtgcccgggagctcatgatccacgcgccaactgtcagtgggtggcggtcacctagattttgccagtttccacaagaaattgtccttcaaatggtggagagatgtcgaataaggaaactgcagttacttgctcaccagtatatgatttcaagtaaaattgagttctacattagtgaaagcttgcctgaatattttgcaccctatcaagcagagcggtttcgaagacttggctacgtgtctctctgtgataatgaaaagacaggttgcaaagcccgggaactaaaatcagtttatgtggatgcagtaggacaatttcttaaactgatttttcaccaaaaccatgtcaacaaatacaacatatataatcaggttgctttggttgccataaatatcattggagaccctgcagatttcagtgatgaaagcaatactgcctctcgagagaagttgattgaccactaccttgggcacaacagcgaggaccctgctctagaaggaacgtacgccaggaaatctgactatatctctccgctagatgacttagcttttgatatgtaccaagatccagaagttgcacagatcatacgaaaattagatgaaagaaaacgggaagctgtccaaaaggaacgctatgattatgccaagaaactaaaacaagccattgctgatttgcaaaaggttggtgagcgccttgggaggtatgaggtagagaaacgctgtgccgtggagaaggaagactacgatctcgccaaggagaagaagcagcagatggagcagtatcgtgccgaggtgtacgagcagctggagctgcacagcctcctggatgccgagctgatgcgaagaccttttgatttgcccctccagcccctcgctcgttctggcagtccttgccaccaaaagccaatgccctcactaccacaactggaagaaagaggaacagaaaaccagtttgcagaacctttccttcaggaaaagccttcatcatattctctaactatttctcctcagcattctgcagtagacccgttactccctgccacagatcctcatccaaagatcaatgcagagtccctgccctacgatgagcggcctcttccagctattcgtaagcattatggggaggcagtggtggagccggaaatgagtaatgcagacatcagcgatgctcggaggggaggcatgttaggggagccagagcccttaaccgagaaggccttgagagaagccagctctgccatcgatgtgttgggagaaaccttggttgctgaggcctattgtaagacgtggtcctaccgagaggatgcactgcttgccttgtctaagaagttaatggaaatgcctgttggaaccccaaaagaagatttaaagaacacactgagagcatccgtctttctcgttagaagagccataaaggacattgtgacctccgtttttcaggcttctttgaaattgttgaaaatgatcattacacaatatattcctaaacataaactgagtaaacttgaaacagctcactgtgtggagaggaccattcccgttttgctcaccagaactggagattcttctgcccgcctccgcgtcacagctgcaaattttattcaggaaatggccttgtttaaagaagttaagtctctccaaattattccatcctacctggtgcagccattgaaagcaaactcttcagttcacctggcaatgagtcagatgggcctcctggcccggctgctgaaagacctgggcactggcagctcgggcttcaccattgacaacgtgatgaagttttcagtgagtgccctggagcatagagtgtatgaggtccgcgagacggcggttcgaattattttggacatgtacagacagcaccaggcttccatcctggagtaccttcctccagacgacagcaacacacgcaggaacattctctacaaaacaatttttgagggatttgctaaaatagatggcagagctacagatgctgagatgagggcacggagaaaagcggctacagaagaagcagaaaaacaaaagaaagaagaaataaaagctttacaagggcagctggcagcactgaaagaaattcaggctgaagttcaggaaaaagaaagtgatgctgtgaagccaaagaatcaggacattcaaggagggaaagcagcccctgctgaagctctgggaatcccggatgagcactatctagataatttgtgtattttttgtggggaaaggagtgaatccttcacagaggaaggtctggatctccactactggaagcactgtctcatgctgacaagatgtgaccactgcaaacaggtggtcgagatatccagtctgacggagcacttgctgacggaatgtgacaaaaaagacgggtttggaaagtgttaccgttgcagtgaggctgttttcaaggaagagctgcccagacacataaaacacaaggattgcaaccctgccaaaccggagaagctggcaaaccggtgtcccctgtgtcatgagaacttcagccctggagaagaggcatggaaagctcacctgatgggcccagccggctgcacgatgaacctgcgcaagacacacattctgcagaaggccccggcactgcagccagggaaaagctcagctgtggccgcatcaggccccttggggtcaaaggccggaagcaagatccccaccccgaagggcggactgagcaagagctccagcaggacgtacgccaagcgctgacgcggcgctcgggctccttggtctctgtgagggatggagcgggtctcctgattctacaccatctctccagaactctctggccttggtggccccatgctctggctgctgtccccagctccccgccgtgcacgcctcttacgcgtctgtgccgtcagctctcgtgcaaacgatatggatgcagctaaccaaagatcctgcgtgcagtgccaggacctggccgcactgtacattaagccttcagggctgtctcaggccttccttagaatcagagaaggaagcgtcctgtttggagagagccagagagcaccgccagggaggcgctcgcgcaaggccacggtcagcacaggcacggtcccgctttccttagtgcttggagcaatttccataaaacattcaccagaaaccttttgcacatcggtctctgccacacgcagtagaatttccgcagggctgtggctcggccagcagcggttccaggagagtggcggtgcgcacgggcctccagccgtgccttccccctgcaggccccgtctgctgggcctgctgcccagtgcactcagccccaggtagcagaactcacgttcccactatagcaagaaataaaggcaaaagagaacatcttttttttaatcgtagtttttttgagaattggtcccacctcagccgcaccttgctggatgcttctccagtagtgctgcccctgtgacaggcatcagctccctgctggaactgaggtagacacaggtgtgggcccttcccgtgcctttgctcagaggcgcttcactttctccacactttcgaattcctaaagacatgtggaggaagtcactgttaaatgaatttccacctgatcaccctgtgttcacagcaggcagaagcccactggtatgggcctcccgccccttccacatccatgttgtgattggatccataagtttactttcttcaaagagttgataggatgtttaaaacatcaacacattgcttaaaatgatgaaaccaaccctcaaaaaacagtctcctaaccagccatcccctcctgtgggagtgagctgggggttttgtccatagctttggttgggcctgtgtcacatccaggcagccatgtggagggagtcagggtctgtctggaagcatccaccctctcgctgccccagcctgtgctcccaggggcctaggctaccatggactgaagggcagtcccctcccacctggtgcccagggcttctgcttgcctcgctgatgttgcatgggcagacttcaaaaaggatagttagaaaggtttgggttgatggagtttgcattaatgcaattagtgtataaatatgttttaattgccaaccgtgtgaaacaacaaaatatctaaaaactaatcccgatttgaacaatgtactccctggcctggatacattaataaccataaatttgcatgaattaatctccacgtttggtaaactaatacctctggttgactgagaatactgagtaagatataagacctaccaggaacctttaagaatatgctctgctcggtgttgtttgtctgcttgtttgcgacagagcgagactccgtctcgaaaaaaaaaaaaaagtataaggagagaaataactttaaagtttattagacaaaacagagtatagatgccaagatgtctgtaaaatgattttttctggttttaaagagatgttggccattattttctaatccatttttaaaatacagacaaaacacttctttaaacagaacaagaatgagaaaagttaaccaaggaattattcttttctcaccaatcaacacttttaagaaatatatatatatatacacacacatatacacatgccttctatatattgtaacttaaagaaaatacttataaaaagacttcatttttagtgattgacaagcaaacgggttcatttaaaacaggttcctcttttgttagttacagggggtttttttgttgtttttttgtttttgtttttgttttgcgggggtggtggggtttgagacggagtcttgctctgttgcctaggctggagtgcagtggcgcgatcttggccccctgcaacctccgcctcccgggttcgagcaattctcctgcctcagcctcccgagtagctgggattacaggcgtgtgtcaccacgcctggctaatttttttgtatttttagtagagacggggtttcaccatattggccaggctggtctcaaactcctgaccttgtgatccacccacctccgcctcccaaagtgctggaattacaggcatgagccaccgcgcccggcccaatcatgtgtttttgttgaaatgatcctaccagtgattagtggctattgagagttttacagggttatacattgttaagggaccaagaatcaagtacaaaaaattaaaaaggaactgtaaaatcccttggtcattcataaataaatatctaaattaggaatactaattaattgaattttcactcatgagtatgttctgaatatttaatatttatttctattattttcatatgttaagatattccattaaatctaacttaaaagaattgtatgtataaattggcattaggatacaaatgtaaatgtttttaatgaaattttgcaactttttaatattttaacatagttttctatttgtctttatttcaagtaccagaattacaaaatatctaagtaatatatttttgttgtcgttttagggcttaagggttaattcacccagagtatattaatataataaaaagatcact

SEQ ID NO: 1836 - DNA, 2044 bp, Homo sapiens
ctggacgagtccgagcgcgtcacctcctcacgctgcggctgtcgcccgtgtcccgccggcccgttccgtgtcgccccgcagtgctgcggccgccgcggcaccatggctgtgtttgtcgtgctcctggcgttggtggcgggtgttttggggaacgagtttagtatattaaaatcaccagggtctgttgttttccgaaatggaaattggcctataccaggagagcggatcccagacgtggctgcattgtccatgggcttctctgtgaaagaagacctttcttggccaggactcgcagtgggtaacctgtttcatcgtcctcgggctaccgtcatggtgatggtgaagggagtgaacaaactggctctacccccaggcagtgtcatttcgtaccctttggagaatgcagttccttttagtcttgacagtgttgcaaattccattcactccttattttctgaggaaactcctgttgttttgcagttggctcccagtgaggaaagagtgtatatggtagggaaggcaaactcagtgtttgaagacctttcagtcaccttgcgccagctccgtaatcgcctgtttcaagaaaactctgttctcagttcactccccctcaattctctgagtaggaacaatgaagttgacctgctctttctttctgaactgcaagtgctacatgatatttcaagcttgctgtctcgtcataagcatctagccaaggatcattctcctgatttatattcactggagctggcaggtttggatgaaattgggaagcgttatggggaagactctgaacaattcagagatgcttctaagatccttgttgacgctctgcaaaagtttgcagatgacatgtacagtctttatggtgggaatgcagtggtagagttagtcactgtcaagtcatttgacacctccctcattaggaagacaaggactatccttgaggcaaaacaagcgaagaacccagcaagtccctataaccttgcatataagtataattttgaatattccgtggttttcaacatggtactttggataatgatcgccttggccttggctgtgattatcacctcttacaatatttggaacatggatcctggatatgatagcatcatttataggatgacaaaccagaagattcgaatggattgaatgttacctgtgccagaattagaaaagggggttggaaattggctgttttgttaaaatatatcttttagtgtgctttaaagtagatagtatactttacatttataaaaaaaaatcaaattttgttctttattttgtgtgtgcctgtgatgtttttctagagtgaattatagtattgacgtgaatcccactgtggtatagattccataatatgcttgaatattatgatatagccatttaataacattgatttcattctgtttaatgaatttggaaatatgcactgaaagaaatgtaaaacatttagaatagctcgtgttatggaaaaaagtgcactgaatttattagacaaacttacgaatgcttaacttctttacacagcataggtgaaaatcatatttgggctattgtatactatgaacaatttgtaaatgtcttaatttgatgtaaataactctgaaacaagagaaaaggtttttaacttagagtagccctaaaatatggatgtgcttatataatcgcttagttttggaactgtatctgagtaacagaggacagctgttttttaaccctcttctgcaagtttgttgacctacatgggctaatatggatactaaaaatactacattgatctaagaagaaactagccttgtggagtatatagatgcttttcattatacacacaaaaatccctgagggacattttgaggcatgaatataaaacatttttatttcagtaacttttccccctgtgtaagttactatggtttgtggtacaacttcattctatagaatattaagtggaagtgggtgaattctactttttatgttggagtggaccaatgtctatcaagagtgacaaataaagttaatgatgattccaaaaaaaaaa

SEQ ID NO: 1837 - DNA, 448 bp, Homo sapiens
caaggtcgtgaaaaaaaaggtcttggtgaggtgccgccatttcatctgtcctcattctctgcgcctttcgcagagcttccagcagcggtatgttgggccagagcatccggaggttcacaacctctgtggtccgtaggagccactatgaggagggccctgggaagaatttgccattttcagtggaaaacaagtggtcgttactagctaagatgtgtttgtactttggatctgcatttgctacacccttccttgtagtaagacaccaactgcttaaaacataaggatgtttcagttcctccatttaacagatatgaagagcattttaagaggtgcagcctctggaagtggatcaaactagaactcatatgccatactagatatgtttgtcaataaacttatgacgtgaaaaaaaaaaaaaaaaaaaaaaaaaaaaaaaaaaaaaaaaaaa

SEQ ID NO: 1838 - DNA, 3561 bp, Homo sapiens
agtgtagctgcgagaacctttgcacgcgcacaaactacggggacgatttctgattgatttttggcgctttcgatccaccctcctcccttctcatgggactttggggacaaagcgtcccgaccgcctcgagcgctcgagcagggcgctatccaggagccaggacagcgtcgggaaccagaccatggctcctggaccccaagatccttaagttcgtcgtcttcatcgtcgcggttctgctgccggtccgggttgactctgccaccatcccccggcaggacgaagttccccagcagacagtggccccacagcaacagaggcgcagcctcaaggaggaggagtgtccagcaggatctcatagatcagaatatactggagcctgtaacccgtgcacagagggtgtggattacaccattgcttccaacaatttgccttcttgcctgctatgtacagtttgtaaatcaggtcaaacaaataaaagttcctgtaccacgaccagagacaccgtgtgtcagtgtgaaaaaggaagcttccaggataaaaactcccctgagatgtgccggacgtgtagaacagggtgtcccagagggatggtcaaggtcagtaattgtacgccccggagtgacatcaagtgcaaaaatgaatcagctgccagttccactgggaaaaccccagcagcggaggagacagtgaccaccatcctggggatgcttgcctctccctatcactaccttatcatcatagtggttttagtcatcattttagctgtggttgtggttggcttttcatgtcggaagaaattcatttcttacctcaaaggcatctgctcaggtggtggaggaggtcccgaacgtgtgcacagagtccttttccggcggcgttcatgtccttcacgagttcctggggcggaggacaatgcccgcaacgagaccctgagtaacagatacttgcagcccacccaggtctctgagcaggaaatccaaggtcaggagctggcagagctaacaggtgtgactgtagagttgccagaggagccacagcgtctgctggaacaggcagaagctgaagggtgtcagaggaggaggctgctggttccagtgaatgacgctgactccgctgacatcagcaccttgctggatgcctcggcaacactggaagaaggacatgcaaaggaaacaattcaggaccaactggtgggctccgaaaagctcttttatgaagaagatgaggcaggctctgctacgtcctgcctgtgaaagaatctcttcaggaaaccagagcttccctcatttaccttttctcctacaaagggaagcagcctggaagaaacagtccagtacttgacccatgccccaacaaactctactatccaatatggggcagcttaccaatggtcctagaactttgttaacgcacttggagtaatttttatgaaatactgcgtgtgataagcaaacgggagaaatttatatcagattcttggctgcatagttatacgattgtgtattaagggtcgttttaggccacatgcggtggctcatgcctgtaatcccagcactttgataggctgaggcaggtggattgcttgagctcgggagtttgagaccagcctcatcaacacagtgaaactccatctcaatttaaaaagaaaaaaagtggttttaggatgtcattctttgcagttcttcatcatgagacaagtctttttttctgcttcttatattgcaagctccatctctactggtgtgtgcatttaatgacatctaactacagatgccgcacagccacaatgctttgccttatagttttttaactttagaacgggattatcttgttattacctgtattttcagtttcggatatttttgacttaatgatgagattatcaagacgtagccctatgctaagtcatgagcatatggacttacgagggttcgacttagagttttgagctttaagataggattattggggcttacccccaccttaattagagaaacatttatattgcttactactgtaggctgtacatctcttttccgatttttgtataatgatgtaaacatggaaaaactttaggaaatgcacttattaggctgtttacatgggttgcctggatacaaatcagcagtcaaaaatgactaaaaatataactagtgacggagggagaaatcctccctctgtgggaggcacttactgcattccagttctccctcctgcgccctgagactggaccagggtttgatggctggcagcttctcaaggggcagcttgtcttacttgttaattttagaggtatatagccatatttatttataaataaatatttatttatttatttataagtagatgtttacatatgcccaggattttgaagagcctggtatctttgggaagccatgtgtctggtttgtcgtgctgggacagtcatgggactgcatcttccgacttgtccacagcagatgaggacagtgagaattaagttagatccgagactgcgaagagcttctctttcaagcgccattacagttgaacgttagtgaatcttgagcctcatttgggctcagggcagagcaggtgtttatctgccccggcatctgccatggcatcaagagggaagagtggacggtgcttgggaatggtgtgaaatggttgccgactcaggcatggatgggcccctctcgcttctggtggtctgtgaactgagtccctgggatgccttttagggcagagattcctgagctgcgttttagggtacagattccctgtttgaggagcttggcccctctgtaagcatctgactcatctcagagatatcaattcttaaacactgtgacaacaggatctaaaatggctgacacatttgtccttgtgtcacgttccattattttatttaaaaacctcagtaatcgttttagcttctttccagcaaactcttctccacagtagcccagtcgtggtaggataaattacggatatagtcattctaggggtttcagtcttttccatctcaaggcattgtgtgttttgttccgggactggtttggctgggacaaagttagaactgcctgaagttcgcacattcagattgttgtgtccatggagttttaggaggggatggcctttccggtcttcgcacttccatcctctcccacttccatctggcgtcccacaccttgtcccctgcacttctggatgacacagggtgctgctgcctcctagtctttgcctttgctgggccttctgtgcaggagacttggtctcaaagctcagagagagccagtccggtcccagctcctttgtcccttcctcagaggccttccttgaagatgcatctagactaccagccttatcagtgtttaagcttattcctttaacataagcttcctgacaacatgaaattgttggggttttttggcgttggttgatttgtttaggttttgctttatacccgggccaaatagcacataacacctggttatatatgaaatactcatatgtttatgaccaaaataaatatgaaacctcatattaaaaaaaaaaaaaaaaaaaaaaaaaaaaaaa

SEQ ID NO: 1839 - DNA, 2577 bp, Homo sapiens
cacatgtcggcgcaggcggccaaagtcagtaaaaaggagctcaactccaaccacgacggggccgacgagacctcagaaaaagaacagcaagaagcgattgaacacattgatgaagtacaaaatgaaatagacagacttaatgaacaagccagtgaggagattttgaaagtagaacagaaatataacaaactccgccaaccattttttcagaagaggtcagaattgatcgccaaaatcccaaatttttgggtaacaacatttgtcaaccatccacaagtgtctgcactgcttggggaggaagatgaagaggcactgcattatttgaccagagttgaagtgacagaatttgaagatattaaatcaggttacagaatagatttttattttgatgaaaatccttactttgaaaataaagttctctccaaagaatttcatctgaatgagagtggtgatccatcttcgaagtccaccgaaatcaaatggaaatctggaaaggatttgacgaaacgttcgagtcaaacgcagaataaagccagcaggaagaggcagcatgaggaaccagagagcttctttacctggtttactgaccattctgatgcaggtgctgatgagttaggagaggtcatcaaagatgatatttggccaaacccattacagtactacttggttcccgatatggatgatgaagaaggagaaggagaagaagatgatgatgatgatgaagaggaggaaggattagaagatattgacgaagaaggggatgaggatgaaggtgaagaagatgaagatgatgatgaaggggaggaaggagaggaggatgaaggagaagatgactaaatagaacactgatggattccaaccttcctttttttaaattttctccagtccctgggagcaagttgcagtctttttttttttttttttttttttccctcttgtgctcagtcgccctgttcttgaggtctcttttctctactccatggttctcaatttatttggggggaaataccttgagcagaatacaatgggaaaagagtctctacccctttctgttcgaagttcatttttatcccttcctgtctgaacaaaaactgtatggaatcaacaccaccgagctctgtgggaaaaaagaaaaacctgctccctttgctctgctggaagctggagggtgctaggcccctgtgtagtagtgtatagaattctagcttttttcctcctttctctgtatattgggctcagagagtacactgtgtctctatgtgaatatggacagttagcatttaccaacatgtatctgtctactttctcttgtttaaaaaaagaaaaaaaaacttaaaaaaatggggttatagaaggtcagcaaaggggtggggtttgagatgtttgggtgggttagtgggcattttgacaacatggcttctcctttggcatgtttaattgtgatatttgacagacatccttgcagtttaagatgacacttttaaaataaattctctcctaatgatgacttgagccctgccactcaatgggagaatcagcagaacctgtaggatcttatttggaattgacattctctattgtaattttgttcctgtttatttttgggtttctttttgtttcactggaaaggaaagatgatgctcagttttaaacgttaaaagtgtacaagttgctttgttacaataaaactaaatgtgtacacaaaggatttgatgcttttctctcagcataggtatgcttactatgaccttccaagtttgacttgtataacatcactgtcaaactttgtcaccctaacttcgtattttttgatacgcacttttgcaggatgacctcagggctatgtggattgagtaatgggatttgaatcaatgtattaatatctccatagctgggaaacgtgggttcaatttgccattggtttctgaaaagtattcacatcatttgggataccagatagctcaatactctctgagtacattgtgcccttgatttttatctccaagtggcagtttttaaaattggccttttacctggatataaattaattgtgcctgccaccaccatccaacagacctggtgctctaatgccaagttatacacgggacagttgctggcatgtcttcattggctctctaaaatgtggccaagaagataggctctcagtaagaagtctgatggtgagcagtaactgtccctgctttctggtataaagctctcaaatgtgaccatgtgaatctgggtgggataatggactcagctctgtctgctcaatgccattgtgcagagaagcaccctaatgcataagctttttaatgctgtaaaatatagtcgctgaaattaaatgccactttttcagaggtgaattaatggacagtctggtgaacttcaaaagctttttgatgtataaaacttgataaatggaactattccatcaataggcaaaagtgtaacaacctatctagatggatagtatgtaatttctgcacaggtctctgtttagtaaatacatcactgtataccgatcaggaatcttgctccaataaaggaacataaagatttaaaaaaaaaaaaaaa

SEQ ID NO: 1840 - DNA, 1203 bp, Homo sapiens
gtcgtcacgcgtcccgcgcctcctcgcgcctgcaccgtggttggaaggtcgtcccctgtgaccggttgggcggttggagcggctgtcgccatgttgtcggtagcagcccgctcgggcccgttcgcgcccgtcctgtcggccacgtcccgcggggtggcgggcgcgctgcggcccttggtgcaggccacggtgcccgccaccccggagcagcctgtgttggacctgaagcggcccttcctcagccgggagtcgctgagcggccaggccgtgcgccggcctttggtcgcctccgtgggcctcaatgtccctgcttctgtttgttattcccacacagacatcaaggtgcctgacttctctgaataccgccgccttgaagttttagatagtacgaagtcttcaagagaaagcagcgaggctaggaaaggtttctcctatttggtaactggagtaactactgtgggtgtcgcatatgctgccaagaatgccgtcacccagttcgtttccagcatgagtgcttctgctgatgtgttggccctggcgaaaatcgaaatcaagttatccgatattccagaaggcaagaacatggctttcaaatggagaggcaaacccctgtttgtgcgtcatagaacccagaaggaaattgagcaggaagctgcagttgaattatcacagttgagggacccacagcatgatctagatcgagtaaagaaacctgaatgggttatcctgataggtgtttgcactcatcttggctgtgtacccattgcaaatgcaggagattttggtggttattactgcccttgccatgggtcacactatgatgcatctggcaggatcagattgggtcctgctcctctcaaccttgaagtccccacgtatgagttcaccagtgacgatatggtgattgttggttaagagacttggactcaagtcataggcttctttcagtctttatgtcacctcaggagacttatttgagaggaagccttctgtacttgaagttgatttgaaatatgtaagaattgatgatgtatttgcaaacattaatgtgaaataaattgaatttaatgttgaatactttcaggcattcacttaataaagacactgttaagcactgttatgctcagtcatacacgcgaaaggtacaatgtcttttagctaattctaattaaaaattacagactggtgtacaagatacttgtg

SEQ ID NO: 1841 - DNA, 566 bp, Homo sapiens
caagcaagcaggctatataagtttcagaaggctgggctccactcagatcttttccagcagctgctgccgtgccagagaggcgccttcagagacccagcgcttacacaatacccaccatgtcccaggctggtgctcaggaagcccctatcaagaagaagcgcccccctgtgaaggaggaggacctgaagggggcccgaggaaacctgaccaagaaccaggaaatcaagtccaagacctaccaggtcatgcgagagtgtgagcaagctggctcggccgccccgtcggtgttcagccgcacccgcacaggtaccgagactgtctttgagaagcccaaagccggacccaccaagagtgtcttcggctgagaagtgtgcgccactccccttgctgcccgaatgctcggaaacaggagccttacccaggaactcttttttatgccagaacgcttcctctcccctgctgtctctggggctgccaccctcccccacagtccaggcccttcagccaagggctctgcaccagcaccttggaagcaccaataaagaggatgcccacgtggccccagc

SEQ ID NO: 1842 - DNA, 3034 bp, Homo sapiens
tggtttctaaatcttattcagtgagcacgtgttcctttttttaattagagaaaacttgacagtagcccctttttgtgtttcacagaggagctaacattccttctgtacctgtagttcatgcgggagatggcaggggcctggcacatgacggtggagcagaaatttggcctgttttctgctgagataaaggaagcagaccccctggctgcctcggaagcaagtcaacccaaaccctgtccccccgaagtgaccccccactacatctggatcgacttcctggtgcagcggtttgagatcgccaagtactgcagctctgaccaagtggagatcttctccagcctgctgcagcgctccatgtccctgaacatcggcggggccaaggggagcatgaaccggcacgtggcggccatcgggccccgcttcaagctgctgaccctggggctgtccctcctgcatgccgatgtggttccaaatgcaaccatccgcaatgtgcttcgcgagaagatctactccactgcctttgactacttcagctgtcccccaaagttccctactcaaggagagaagcggctgcgtgaagacataagcatcatgattaaattttggaccgccatgttctcagataagaagtacctgaccgccagccagcttgttcccccagataatcaggacacccggagcaacctggacataactgtcggctctcggcaacaagccacccaaggctggatcaacacataccccctgtccagcggcatgtccaccatctccaagaaatcaggcatgtctaagaaaaccaaccggggctcccagctgcacaaatactacatgaagcgcaggacgctgctgctgtccctgctggccactgagatcgagcgtctcatcacatggtacaacccgctgtcagccccggaactggaactagaccaggccggagagaacagcgtggccaactggagatctaagtacatcagcctgagtgagaagcagtggaaggacaacgtgaacctcgcctggagcatctctccctacctagccgtgcagctgcctgccaggtttaagaacacagaagccattgggaacgaagtgacccgtctcgttcggttggacccgggagccgttagtgatgtgcctgaagcaatcaagttcctggtcacctggcacaccatcgacgccgatgctccagagctcagccatgtgctgtgctgggcgcccacggacccacccacaggcctctcctacttctccagcatgtacccgccgcaccctctcacggcgcagtacggggtgaaagtcctgcggtccttccctccggacgccatcctcttctacatcccccagattgtgcaggccctcaggtacgacaagatgggctatgtgcgggagtatattctgtgggcagcgtctaaatcccagcttctggcacaccagttcatctggaacatgaagactaacatttatctagatgaagagggccaccagaaagaccctgacatcggcgacctcctggatcagttggtagaggagatcacaggctccttgtccggcccagcgaaggacttttaccagcgggagtttgatttctttaacaagatcaccaacgtgtcggctatcatcaagccctaccctaaaggcgacgagagaaagaaggcttgtctgtcggccctgtctgaagtgaaggtgcagccgggctgctacctgcccagcaaccctgaggccattgtgctggacatcgactacaagtctgggaccccgatgcagagtgctgcaaaagccccatatctggccaagttcaaggtgaagcgatgtggagttagtgaacttgaaaaagaaggtctgcggtgccgctcagactccgaggatgagtgcagcacgcaggaggccgacggccagaagatctcctggcaggcagccatcttcaaggtgggagacgactgccggcaggacatgctggccctgcagatcatcgacctcttcaagaacatcttccagctggtcggcctggacctctttgtttttccctaccgcgtggtggccactgcccctgggtgcggggtgatcgagtgcatccccgactgcacctcccgggaccagctgggccgccagacagacttcggcatgtacgactacttcacacgccagtacggggatgagtccactctggccttccagcaggcccgctacaacttcatccgaagcatggccgcctacagcctcctgctgttcctgctgcagatcaaggacagacacaacggcaacattatgctggacaagaagggtcatatcatccacatcgactttgggttcatgtttgaaagctcgccgggcggcaatctcggctgggaacccgacatcaagctgacggatgagatggtgatgatcatggggggcaagatggaggccacacccttcaagtggttcatggagatgtgtgtccgaggctacctggctgtgcggccctacatggacgcggtcgtctccctggtcactctcatgttggacacgggcctgccctgttttcgcggccagacaatcaagctcttgaagcacaggtttagccccaacatgactgagcgcgaggctgcaaatttcatcatgaaggtcatccagagctgcttcctcagcaacaggagccggacctacgacatgatccagtactatcagaatgacatcccctactgaggaggggaccttcgagggcctctgccccatgtgccctcaaagctgtcccacaatcatggagccctgcgacctccctgccctgccgccacatgcagtggaggagaggcctgtggcccaaagaacctggtagcgcctcctggggcagcacgtgggtggcgcagccttggtaacgccatggactgcagcgacaatcaatggatggtgctgtctatgcacaggtgtgagtcctctgtttgcactggacatattccctacctgtcttatttcataggtacatgaagtattgtgtataaaaaaagagataagatttaaccaacatcaacaaaataaaaacccaaaatagtaaaaaccc

SEQ ID NO: 1843 - DNA, 6502 bp, Homo sapiens
atgtgcccagtagattttcatgggatcttccagttagatgaaagacggagagatgcagtgattgcattgggcatttttctgattgaatctgatcttcagcacaaagattgtgtggttccttaccttcttcgacttctcaaaggtcttccaaaagtgtattgggtagaagaaagcacagctcggaaaggcagaggtgccctcccggttgcagagagcttcagcttctgcttggtaactctgctgtctgatgtggcctatagggatccttcacttagggatgagattttagaggtgcttttgcaggttttgcatgtcctcttggggatgtgccaggccttggagattcaagacaaagaatacctttgcaagtatgctatcccatgcctgataggaatctcgcgagcatttgggcgttacagcaacatggaagagtctctcctctcaaagctctttcccaaaatccctcctcattccctccgtgtcctggaagagcttgaaggtgttcgaaggcgttcctttaatgacttccgctccatcctccccagcaatctgctgactgtctgtcaggagggtaccctgaagaggaaaaccagcagtgtgtccagcatctctcaggtcagccctgaacgcggcatgccccctcccagttcccctggaggatctgcctttcactactttgaagcctcctgtttgcccgatgggactgccctagagcctgagtactacttttcaaccatcagctccagcttctcagtctctccccttttcaacggtgtcacatataaggagtttaacattccattggaaatgcttcgggaactcttaaacctggtgaagaagatcgttgaggaggctgttctcaaatctttggatgccattgtagccagtgtgatggaggccaaccccagtgctgatctttactacacttccttcagtgaccctctctacctgaccatgttcaagatgctgcgtgacactctgtactacatgaaggacctcccgacctcttttgtgaaggagatccatgattttgtgctggagcagttcaacacgagccagggggagctccagaagattctacatgacgcagaccggatccacaatgagctgagccccctcaaactgcgctgtcaggcgagtgctgcctgtgtggacctcatggtgtgggctgtgaaggacgagcagggtgcagaaaacctttgcatcaagctatctgagaagctgcagtccaagacgtccagcaaagtcattattgctcacttgcccctgctgatctgctgtctgcagggtttgggccgcctgtgcgagaggttcccggtggtggtgcactctgtgacaccgtccttgcgagacttcctggtcatcccgtccccagttctggtgaagctctacaagtaccacagtcagtaccacacagttgctggcaatgatataaaaatcagtgtgaccaatgagcattccgagtcaaccctgaacgtcatgtcgggtaagaagagccagccctccatgtacgagcagctccgagacatcgctattgacaacatctgcaggtgcctgaaggctggattgacggtggacccagtgattgtggaggcgttcttggccagcctgtccaaccggctctacatctctcaggagagcgacaaggacgctcacttgattcccgaccacacaatccgagccttgggacacattgcggtggccttgagggacaccccgaaggtcatggagcccattctgcagatcctacagcagaaattttgccagccaccctcccccctcgatgtgctgattattgaccagctgggctgcctggttatcaccggaaatcaatacatctatcaggaagtgtggaacctcttccagcagatcagtgtgaaggccagctccgttgtatactcagccaccaaagattacaaggaccacggctataggcattgctccctggcagtgattaatgccctggccaacatcgcggccaacatccaagacgagcacctggtggatgagctgctcatgaacctgttggagttgtttgtgcagctggggctggaggggaagcgagccagcgagagggcaagcgagaagggccctgccctaaaggcttctagcagtgcagggaacttgggagtactcattcctgtaatagctgtgctcacccgacgactgccacccatcaaagaagctaagcctcggttacagaagctcttccgagacttctggctgtattccgttctgatgggattcgctgtggagggctcaggactctggccagaagaatggtacgagggggtctgtgaaatagccactaagtcccccttgctcacctttcccagcaaggagccactgcggtccgtcctccagtataactcagccatgaagaatgacacggtcacccccgctgagctgagtgagctccgcagcactatcatcaacctgctggacccccctcccgaggtgtccgcactcatcaacaagctggacttcgccatgtccacctacctcctctctgtgtaccggctggagtacatgagggtactgcgttcaacagatcctgatcgcttccaggtaatgttctgctactttgaggataaagctattcagaaagacaaatctgggatgatgcagtgtgtgattgcagtcgcggacaaagtattcgatgccttcctgaacatgatggcggataaagccaagaccaaggagaacgaggaggagctggagcggcacgctcagttcctgttggtgaacttcaaccacatccacaagaggataaggagggtggcagacaagtatctatctggtctggtggataagtttccccacttgctctggagcgggactgtgctgaagaccatgctggacatcctgcagaccctgtcactgtcactgagcgctgatattcacaaggatcagccttactatgacatccccgacgccccctaccggatcacggttcctgacacgtacgaagcccgtgagagcattgtgaaggacttcgctgcacgctgtgggatgatcctccaggaggccatgaagtgggcacctaccgtcaccaagtcccacctgcaggaatatctgaacaaacatcagaactgggtatcgggactgtcccagcacacagggctggccatggccactgagagcatccttcactttgctggctacaacaagcagaacacaactcttggggcaactcagctgagcgagcgcccggcctgtgtgaagaaagactactccaacttcatggcatccctgaatctgcgcaaccgctacgcgggcgaggtgtatggaatgattcggttctcaggcaccacaggccagatgtctgacctgaacaaaatgatggtccaggatctacattcagctttagaccgcagtcatcctcagcactacacgcaggccatgttcaagctgaccgcaatgctcattagcagtaaagattgtgacccgcagctccttcatcatctgtgctggggtcccctccggatgttcaatgagcatggcatggagacggccctggcctgctgggagtggctgctggctggcaaggatggagtggaagtgccgttcatgcgggagatggcaggggcctggcacatgacggtggagcagaaatttggcctgttttctgctgagataaaggaagcagaccccctggctgcctcggaagcaagtcaacccaaaccctgtccccccgaagtgaccccccactacatctggatcgacttcctggtgcagcggtttgagatcgccaagtactgcagctctgaccaagtggagatcttctccagcctgctgcagcgctccatgtccctgaacatcggcggggccaaggggagcatgaaccggcacgtggcggccatcgggccccgcttcaagctgctgaccctggggctgtccctcctgcatgccgatgtggttccaaatgcaaccatccgcaatgtgcttcgcgagaagatctactccactgcctttgactacttcagctgtcccccaaagttccctactcaaggagagaagcggctgcgtgaagacataagcatcatgattaaattttggaccgccatgttctcagataagaagtacctgaccgccagccagcttgttcccccagataatcaggacacccggagcaacctggacataactgtcggctctcggcaacaagccacccaaggctggatcaacacataccccctgtccagcggcatgtccaccatctccaagaaatcaggcatgtctaagaaaaccaaccggggctcccagctgcacaaatactacatgaagcgcaggacgctgctgctgtccctgctggccactgagatcgagcgtctcatcacatggtacaacccgctgtcagccccggaactggaactagaccaggccggagagaacagcgtggccaactggagatctaagtacatcagcctgagtgagaagcagtggaaggacaacgtgaacctcgcctggagcatctctccctacctagccgtgcagctgcctgccaggtttaagaacacagaagccattgggaacgaagtgacccgtctcgttcggttggacccgggagccgttagtgatgtgcctgaagcaatcaagttcctggtcacctggcacaccatcgacgccgatgctccagagctcagccatgtgctgtgctgggcgcccacggacccacccacaggcctctcctacttctccagcatgtacccgccgcaccctctcacggcgcagtacggggtgaaagtcctgcggtccttccctccggacgccatcctcttctacatcccccagattgtgcaggccctcaggtacgacaagatgggctatgtgcgggagtatattctgtgggcagcgtctaaatcccagcttctggcacaccagttcatctggaacatgaagactaacatttatctagatgaagagggccaccagaaagaccctgacatcggcgacctcctggatcagttggtagaggagatcacaggctccttgtccggcccagcgaaggacttttaccagcgggagtttgatttctttaacaagatcaccaacgtgtcggctatcatcaagccctaccctaaaggcgacgagagaaagaaggcttgtctgtcggccctgtctgaagtgaaggtgcagccgggctgctacctgcccagcaaccctgaggccattgtgctggacatcgactacaagtctgggaccccgatgcagagtgctgcaaaagccccatatctggccaagttcaaggtgaagcgatgtggagttagtgaacttgaaaaagaaggtctgcggtgccgctcagactccgaggatgagtgcagcacgcaggaggccgacggccagaagatctcctggcaggcagccatcttcaaggtgggagacgactgccggcaggacatgctggccctgcagatcatcgacctcttcaagaacatcttccagctggtcggcctggacctctttgtttttccctaccgcgtggtggccactgcccctgggtgcggggtgatcgagtgcatccccgactgcacctcccgggaccagctgggccgccagacagacttcggcatgtacgactacttcacacgccagtacggggatgagtccaccctggccttccagcaggcccgctacaacttcatccgaagcatggccgcctacagcctcctgctgttcctgctgcagatcaaggacagacacaacggcaacattatgctggacaagaagggccatatcatccacatcgactttggcttcatgtttgaaagctcgccgggcggcaatctcggctgggaacccgacatcaagctgacggatgagatggtgatgatcatggggggcaagatggaggccacacccttcaagtggttcatggagatgtgtgtccgaggctacctggctgtgcggccctacatggacgcggtcgtctccctggtcactctcatgttggacacgggcctgccctgttttcgcggccagacaatcaagctcttgaagcacaggtttagccccaacatgactgagcgcgaggctgcaaatttcatcatgaaggtcatccagagctgcttcctcagcaacaggagccggacctacgacatgatccagtactatcagaatgacatcccctactgaggaggggaccttcgagggcctctgccccatgtgccctcaaagctgtcccacaatcatggagccctgcgacctccctgccctgccgccacatgcagtggaggagaggcctgtggcccaaagaacctggtagcgcctcctggggcagcacgtgggtggcgcagccttggtaacgccatggactgcagcgacaatcaatggatggtgctgtctatgcacaggtgtgagtcctctgtttgcactggacatattccctacctgtcttatttcataggtacatgaagtattgtgtataaaaaaagagataagatttaaccaacatcaacaaaataaaaacccaaaatagtaaaaacccaaaaaaaaaaaaaaa

SEQ ID NO: 1844 - DNA, 902 bp, Homo sapiens
gggtagccgactggggtctcctggcgacgaccatggcgggggatgtgggcggtcgcagctgcacggactcggaactgctgctgcacccggagctgctgtcccaggagttccttctcctcactctggagcagaagaacatagctgttgaaactgatgtaagagtaaacaaagacagtcttactgacctttatgtccaacatgcaataccattgcctcagagggatttgccgaagaatagatgggggaaaatgatggaaaagaaaagagaacaacatgagattaaaaatgagactaaaaggagtagcactgtagatgggttaaggaaaagacccctcatcgtatttgatggaagttcaacaagtacaagcataaaagtgaaaaagacagagaatggagataatgatcgactgaagcctcccccgcaggcaagctttaccagtaatgcctttagaaaattatcaaattcctcttcgagtgtttcacccctaattttgtcttccaatttgcctgtgaacaataaaacggaacacaataataatgacgctaaacagaaccatgacttaacgcataggaaaagtccttcaggccctgtgaagtcgccaccattgtcccctgttggaactactccagtgaagttaaagagagctgctcctaaagaagaggcagaggccatgaataacctgaagcccccacaagcaaaaaggaagatacaacatgttacttggccctgaagaaaagtttccaaaaatgtaaatatactgtaactgtagtttttcaaatatgttcatatatattgacaatatttacagaaatcctgattattgtggaattttcttaagaggtttcaaataggtttaaaaaaataaaggatttattttccttcccttaaaaaaaaaaaaaaa

SEQ ID NO: 1845 - DNA, 1890 bp, Homo sapiens
ggcacccagggtccggcctgcgccttcccgccaggcctggacactggttcaacacctgtgacttcatgtgtgcgcgccggccacacctgcagtcacacctgtagccccctctgccaagagatccataccgaggcagcgtcggtggctacaagccctcagtccacacctgtggacacctgtgacacctggccacacgacctgtggccgcggcctggcgtctgctgcgacaggagcccttacctcccctgttataacacctgaccgccacctaactgcccctgcagaaggagcaatggccttggctcctgagagggcagccccacgcgtgctgttcggagagtggctccttggagagatcagcagcggctgctatgaggggctgcagtggctggacgaggcccgcacctgtttccgcgtgccctggaagcacttcgcgcgcaaggacctgagcgaggccgacgcgcgcatcttcaaggcctgggctgtggcccgcggcaggtggccgcctagcagcaggggaggtggcccgccccccgaggctgagactgcggagcgcgccggctggaaaaccaacttccgctgcgcactgcgcagcacgcgtcgcttcgtgatgctgcgggataactcgggggacccggccgacccgcacaaggtgtacgcgctcagccgggagctgtgctggcgagaaggcccaggcacggaccagactgaggcagaggcccccgcagctgtcccaccaccacagggtgggcccccagggccattcttggcacacacacatgctggactccaagccccaggccccctccctgccccagctggtgacaagggggacctcctgctccaggcagtgcaacagagctgcctggcagaccatctgctgacagcgtcatggggggcagatccagtcccaaccaaggctcctggagagggacaagaagggcttcccctgactggggcctgtgctggaggcccagggctccctgctggggagctgtacgggtgggcagtagagacgacccccagccccgggccccagcccgcggcactaacgacaggcgaggccgcggccccagagtccccgcaccaggcagagccgtacctgtcaccctccccaagcgcctgcaccgcggtgcaagagcccagcccaggggcgctggacgtgaccatcatgtacaagggccgcacggtgctgcagaaggtggtgggacacccgagctgcacgttcctatacggccccccagacccagctgtccgggccacagacccccagcaggtagcattccccagccctgccgagctcccggaccagaagcagctgcgctacacggaggaactgctgcggcacgtggcccctgggttgcacctggagcttcgggggccacagctgtgggcccggcgcatgggcaagtgcaaggtgtactgggaggtgggcggacccccaggctccgccagcccctccaccccagcctgcctgctgcctcggaactgtgacacccccatcttcgacttcagagtcttcttccaagagctggtggaattccgggcacggcagcgccgtggctccccacgctataccatctacctgggcttcgggcaggacctgtcagctgggaggcccaaggagaagagcctggtcctggtgaagctggaaccctggctgtgccgagtgcacctagagggcacgcagcgtgagggtgtgtcttccctggatagcagcagcctcagcctctgcctgtccagcgccaacagcctctatgacgacatcgagtgcttccttatggagctggagcagcccgcctagaacccagtctaatgagaactccagaaagctggagcagcccacctagagctggccgcggccgcccagtctaataaaaagaactccag

SEQ ID NO: 1846 - DNA, 1816 bp, Homo sapiens
ggcacccagggtccggcctgcgccttcccgccaggcctggacactggttcaacacctgtgacttcatgtgtgcgcgccggccacacctgcagtcacacctgtagccccctctgccaagagatccataccgaggcagcgtcggtggctacaagccctcagtccacacctgtggacacctgtgacacctggccacacgacctgtggccgcggcctggcgtctgctgcgacaggagcccttacctcccctgttataacacctgaccgccacctaactgcccctgcagaaggagcaatggccttggctcctgagagggcagccccacgcgtgctgttcggagagtggctccttggagagatcagcagcggctgctatgaggggctgcagtggctggacgaggcccgcacctgtttccgcgtgccctggaagcacttcgcgcgcaaggacctgagcgaggccgacgcgcgcatcttcaaggcctgggctgtggcccgcggcaggtggccgcctagcagcaggggaggtggcccgccccccgaggctgagactgcggagcgcgccggctggaaaaccaacttccgctgcgcactgcgcagcacgcgtcgcttcgtgatgctgcgggataactcgggggacccggccgacccgcacaaggtgtacgcgctcagccgggagctgtgctggcgagaaggcccaggcacggaccagactgaggcagaggcccccgcagctgtcccaccaccacagggtgggcccccagggccattcttggcacacacacatgctggactccaagccccaggccccctccctgccccagctggtgacaagggggacctcctgctccaggcagtgcaacagagctgcctggcagaccatctgctgacagcgtcatggggggcagatccagtcccaaccaaggctcctggagagggacaagaagggcttcccctgactggggcctgtgctggaggcgaggccgcggccccagagtccccgcaccaggcagagccgtacctgtcaccctccccaagcgcctgcaccgcggtgcaagagcccagcccaggggcgctggacgtgaccatcatgtacaagggccgcacggtgctgcagaaggtggtgggacacccgagctgcacgttcctatacggccccccagacccagctgtccgggccacagacccccagcaggtagcattccccagccctgccgagctcccggaccagaagcagctgcgctacacggaggaactgctgcggcacgtggcccctgggttgcacctggagcttcgggggccacagctgtgggcccggcgcatgggcaagtgcaaggtgtactgggaggtgggcggacccccaggctccgccagcccctccaccccagcctgcctgctgcctcggaactgtgacacccccatcttcgacttcagagtcttcttccaagagctggtggaattccgggcacggcagcgccgtggctccccacgctataccatctacctgggcttcgggcaggacctgtcagctgggaggcccaaggagaagagcctggtcctggtgaagctggaaccctggctgtgccgagtgcacctagagggcacgcagcgtgagggtgtgtcttccctggatagcagcagcctcagcctctgcctgtccagcgccaacagcctctatgacgacatcgagtgcttccttatggagctggagcagcccgcctagaacccagtctaatgagaactccagaaagctggagcagcccacctagagctggccgcggccgcccagtctaataaaaagaactccagaacaaaaaaaaaa

SEQ ID NO: 1847 - DNA, 1646 bp, Homo sapiens
ggctctggcacccagggtccggcctgcgccttcccgccaggcctggacactggttcaacacctgtgacttcatgtgtgcgcgccggccacacctgcagtcacacctgtagccccctctgccaagagatccataccgaggcagcgtcggtggctacaagccctcagtccacacctgtggacacctgtgacacctggccacacgacctgtggccgcggcctggcgtctgctgcgacaggagcccttacctcccctgttataacacctgaccgccacctaactgcccctgcagaaggagcaatggccttggctcctgagagggcagccccacgcgtgctgttcggagagtggctccttggagagatcagcagcggctgctatgaggggctgcagtggctggacgaggcccgcacctgtttccgcgtgccctggaagcacttcgcgcgcaaggacctgagcgaggccgacgcgcgcatcttcaaggcctgggctgtggcccgcggcaggtggccgcctagcagcaggggaggtggcccgccccccgaggctgagactgcggagcgcgccggctggaaaaccaacttccgctgcgcactgcgcagcacgcgtcgcttcgtgatgctgcgggataactcgggggacccggccgacccgcacaaggtgtacgcgctcagccgggagctgtgctggcgagaaggcccaggcacggaccagactgaggcagaggcccccgcagctgtcccaccaccacaggcccagggctccctgctggggagctgtacgggtgggcagtagagacgacccccagccccgggccccagcccgcggcactaacgacaggcgaggccgcggccccagagtccccgcaccaggcagagccgtacctgtcaccctccccaagcgcctgcaccgcggtgcaagagcccagcccaggggcgctggacgtgaccatcatgtacaagggccgcacggtgctgcagaaggtggtgggacacccgagctgcacgttcctatacggccccccagacccagctgtccgggccacagacccccagcaggtagcattccccagccctgccgagctcccggaccagaagcagctgcgctacacggaggaactgctgcggcacgtggcccctgggttgcacctggagcttcgggggccacagctgtgggcccggcgcatgggcaagtgcaaggtgtactgggaggtgggcggacccccaggctccgccagcccctccaccccagcctgcctgctgcctcggaactgtgacacccccatcttcgacttcagagtcttcttccaagagctggtggaattccgggcacggcagcgccgtggctccccacgctataccatctacctgggcttcgggcaggacctgtcagctgggaggcccaaggagaagagcctggtcctggtgaagctggaaccctggctgtgccgagtgcacctagagggcacgcagcgtgagggtgtgtcttccctggatagcagcagcctcagcctctgcctgtccagcgccaacagcctctatgacgacatcgagtgcttccttatggagctggagcagcccgcctagaacccagtctaatgagaactccagaaagctggagcagcccacctagagctggccgcggccgc

SEQ ID NO: 1848 - DNA, 1940 bp, Homo sapiens
acccagggtccggcctgcgccttcccgccaggcctggacactggttcaacacctgtgacttcatgtgtgcgcgccggccacacctgcagtcacacctgtagccccctctgccaagagatccataccgaggcagcgtcggtggctacaagccctcagtccacacctgtggacacctgtgacacctggccacacgacctgtggccgcggcctggcgtctgctgcgacaggagcccttacctcccctgttataacacctgacagccacctaactgcccctgcagaaggagcaatggccttggctcctgagaggtaagagcccggcccaccctctccagatgccagtccccgagcgccctgcagccggccctgactctccgcggccgggcacccgcagggcagccccacgcgtgctgttcggagagtggctccttggagagatcagcagcggctgctatgaggggctgcagtggctggacgaggcccgcacctgtttccgcgtgccctggaagcacttcgcgcgcaaggacctgagcgaggccgacgcgcgcatcttcaaggcctgggctgtggcccgcggcaggtggccgcctagcagcaggggaggtggcccgccccccgaggctgagactgcggagcgcgccggctggaaaaccaacttccgctgcgcactgcgcagcacgcgtcgcttcgtgatgctgcgagataactcgggggacccggccgacccgcacaaggtgtacgcgctcagccgggagctgtgctggcgagaaggcccaggcacggaccagactgaggcagaggcccccgcagctgtcccaccaccacagggtgggcccccagggccattcctggcacacacacatgctggactccaagccccaggccccctccctgccccagctggtgacgagggggacctcctgctccaggcagtgcaacagagctgcctggcagaccatctgctgacagcgtcatggggggcagatccagtcccaaccaaggctcctggagagggacaagaagggcttcccctgactggggcctgtgctggaggcccagggctccctgctggggagctgtacgggtgggcagtagagacgacccccagccccgggccccagcccgcggcactaacgacaggcgaggccgcggccccagagtccccgcaccaggcagagccgtacctgtcaccctccccaagcgcctgcaccgcggtgcaagagcccagcccaggggcgctggacgtgaccatcatgtacaagggccgcacggtgctgcagaaggtggtgggacacccgagctgcacgttcctatacggccccccagacccagctgtccgggccacagacccccagcaggtagcattccccagccctgccgagctcccggaccagaagcagctgcgctacacggaggaactgctgcggcacgtggcccctgggttgcacctggagcttcgggggccacagctgtgggcccggcgcatgggcaagtgcaaggtgtactgggaggtgggcggccccccaggctccgccagcccctccaccccagcctgcctgctgcctcggaactgtgacacccccatcttcgacttcagagtcttcttccgagagctggtggaattccgggcacggcagcgccgtggctccccacgctataccatctacctgggcttcgggcaggacctgtcagctgggaggcccaaggagaagagcctggtcctggtgaagctggaaccctggctgtgccgagtgcacctagagggcacgcagcgtgagggtgtgtcttccctggatagcagcagcctcagcctctgcctgtccagcgccaacagcctctatgacgacatcgagtgcttccttatggagctggagcagcccgcctagaacccagtctaatgagaactccagaaagctggagcagcccacctagagctggcc

SEQ ID NO: 1849 - DNA, 2547 bp, Homo sapiens
accgctacacatgcgccttgcaaggaagggcgagatttcgggggcggggcggggggcgggcctaggccggggtctcacagcgactgcgcggacgggttcctgagtggaacatggcgacttgcgccgaaatcctgcggagcgagttccccgaaattgacggacaggtcttcgactacgtgaccggcgtcttgcacagcggcagcgcggacttcgagtctgtggatgacctggtggaagctgtaggggaactattgcaagaggtgtccggggacagcaaggatgacgcgggcatcagggccgtgtgccagcgcatgtacaacactctgcgtctggctgagccacaaagccagggaaatagccaggtgctactggacgcccctatccagttgtcaaagataacggagaactacgactgtggaaccaaacttccaggactgctaaagagggaacagtcctcgacagtgaatgcaaagaagttagagaaggccgaggctcgacttaaggcaaagcaggagaagcgctcagagaaggacacgctcaagaccagcaaccctctagtcttagaagaggcatcagccagccaggcaggcagcagaaaggagagtcggttggaatcatctggcaagaacaaatcctatgatgtgcgaattgagaactttgatgtgtcttttggcgatagagtactgctggctggagcggatgtgaacctggcatggggccgccgttacgggctggtggggcggaatgggttggggaagacaacgttactgaagatgctggccacccggagtctgcgggttccagcccacatttccctgctgcacgttgagcaagaggttgctggagatgacactcctgccctgcagagtgtgctggagagtgacagtgtgcgagaggatttgctacggagggagcgggagctcactgcccagattgctgctggcagggcggagggctctgaagctgcagagctggcagaaatctatgccaaactggaggagattgaggctgacaaggcacctgccagggcatcagtcattctcgctgggcttggctttacccctaaaatgcagcagcagcccacccgggagttctcaggtggctggaggatgaggctggccctggcccgggccctctttgctaggccagatcttctgctgttagatgaacctacaaacatgctggatgtcagggccatcctgtggctggagaattacctgcagacgtggccctccaccatcctagtcgtctcccacgaccgcaacttcttgaatgccatcgccacagacatcatccacctgcacagccagcggctagatggttaccggggagactttgagaccttcatcaagagtaagcaggagcggctgctcaaccagcagcgtgaatatgaggcgcagcagcagtatcgccagcacatccaggttttcattgaccggtttcgctacaatgccaacagggcctctcaagtgcagagtaaactcaagatgctggagaagctgcctgagctgaggcctgtggacaaggaatcagaggtcgtaatgaagttccctgatgggtttgagaagttctcgccgccaattctgcagctagatgaggtggatttctactacgatccgaagcacgtcatcttcagtcgcctctctgtgtctgctgatctcgagtctcgcatctgtgtggttggagagaatggggctgggaagtctaccatgctgaagctgcttttgggggacctggcacctgttcggggcatcagacacgctcacaggaatctgaagattggctatttcagccagcaccatgtggagcagctggacctaaacgtcagtgctgtggaactgctggcacgcaagtttcctgggcggcctgaggaggagtaccgtcaccagctgggtcggtatggcatctccggagaactggccatgcgtcctcttgccagcctgtctgggggccagaagagccgagtggcctttgctcagatgactatgccctgccccaacttctacattctggatgaacccacaaaccacctggacatggagaccattgaggctctgggccgtgccctcaacaatttcaggggtggtgtgattctggtgtcccacgatgagcgctttatcaggctggtgtgccgggagttgtgggtgtgcgaaggaggcggcgtcacccgtgtggaaggaggatttgaccagtaccgcgccctcctccaggaacagttccgccgcgaaggcttcctctagggccaccaggctgaggactcgcccaggacatggactggtctctcagacccctgggccaccatgtaggccaccactccaggccgtggacttcccccaacttggggacagccttattcccaaatgtctctatccttttgactggagcatcttctgcacaaccttgggagcccatccaagggttggtgaggactggtctcccgggggtgggggtctggggggtaccctctggggttatagattcccccactgccccagctctgactggaccccaagtggctgctatgtaaattaaatctctccccgcgtc

SEQ ID NO: 1850 - DNA, 1438 bp, Homo sapiens
agcacttcctcatagaccttggatgtgggaggattgcattcagtctagttcctggttgccggctgaaataacctgaattcaagccaggaagaagcagcaatctgtcttctggattaaaactgaagatcaacctactttcaacttactaagaaaggggatcatggacattgaagcatatcttgaaagaattggctataagaagtctaggaacaaattggacttggaaacattaactgacattcttcaacaccagatccgagctgttccctttgagaaccttaacatccattgtggggatgccatggacttaggcttagaggccatttttgatcaagttgtgagaagaaatcggggtggatggtgtctccaggtcaatcatcttctgtactgggctctgaccactattggttttgagaccacgatgttgggagggtatgtttacagcactccagccaaaaaatacagcactggcatgattcaccttctcctgcaggtgaccattgatggcaggaactacattgtcgatgctgggtttggacgctcataccagatgtggcagcctctggagttaatttctgggaaggatcagcctcaggtgccttgtgtcttccgtttgacggaagagaatggattctggtatctagaccaaatcagaagggaacagtacattccaaatgaagaatttcttcattctgatctcctagaagacagcaaataccgaaaaatctactcctttactcttaagcctcgaacaattgaagattttgagtctatgaatacatacctgcagacatctccatcatctgtgtttactagtaaatcattttgttccttgcagaccccagatggggttcactgtttggtgggcttcaccctcacccataggagattcaattataaggacaatacagatctaatagagttcaagactctgagtgaggaagaaatagaaaaagtgctgaaaaatatatttaatatttccttgcagagaaagcttgtgcccaaacatggtgatagattttttactatttagaataaggagtaaaacaatcttgtctatttgtcatccagctcaccagttatcaactgacgacctatcatgtatcttctgtacccttaccttattttgaagaaaatcctagacatcaaatcatttcacctataaaaatgtcatcatatataattaaacagctttttaaagaaacataaccacaaaccttttcaaataataataataataataataaaaaatgtattttaaagatggcctgtggttatcttggaaattggtgatttatgctagaaagcttttaatgttggtttattgttgaattcctagaaaagttttattggtagatgagtaaataaaatattgtaaaaaaacttattgtctataaagtatattaaaacattgttggctaataaaaaaaaaaaaaaa

SEQ ID NO: 1851 - DNA, 1723 bp, Homo sapiens
agcggcggaggccagagggaggagaggaccggaagtccttcatctcaagcatccaatgctgaaagcggcctgattttctctaccggaagcccttttccagaggctgggaacacggcccacctagcaggaagtcccacctccttgagctccgccacccttcccgaagtttttctgtcacctgtgttaggctccgtcccctttccgcgttttatccccgtaccagaaaaggatacatttagtgcctcccacccagctccactaaacgggttggatatctcattctttgagttggtgttccttccccggcgcccccatgtagctgggaagtgggacctgggggtggttggacccctgggatcctaaaggaggggcagggagggcgcagaactccgcttctgctccttgctaccaggacgcgcggcctcctcagcctctttcctcccgctgccatgcaccctgcagccttcccgcttcctgtggttgtggccgctgtgctgtggggagcggccccgacccgggggctcattcgagcgacctcggaccacaatgccagcatggactttgcagaccttccagctctgtttggggctaccttgagccaggagggcctccaggggttccttgtggaggctcacccagacaatgcctgcagccccattgccccaccacccccagccccggtcaatgggtcagtctttattgcgctgcttcgaagattcgactgcaactttgacctcaaggtcctaaatgcccagaaggctggatatggtgccgctgtagtacacaatgtgaattccaatgaacttctgaacatggtgtggaatagtgaggaaatccagcagcagatctggatcccgtctgtatttattggggagagaagctccgagtacctgcgtgccctctttgtctacgagaagggggctcgggtgcttctggttccagacaataccttccccttgggctattacctcatccctttcacagggattgtgggactgctggttttggccatgggagcagtaatgatagctcgttgtatccagcaccggaaacggctccagcggaatcgacttaccaaagagcaactgaaacagattcctacacatgactatcagaagggagaccagtatgatgtctgtgccatttgcctggatgaatatgaggatggggacaagctgcgggtactcccctgtgctcatgcctaccacagccgctgcgtggacccctggctcactcagacccggaagacctgccccatttgcaagcagcctgttcatcggggtcctggggacgaagaccaagaggaagaaactcaagggcaagaggagggtgatgaaggggagccaagggaccaccctgcctcagaaaggaccccacttttgggttctagccccactcttcccacctcctttggttccttagccccagctccccttgtttttcctgggccttcaacagatcccccactgtcccctccctcttcccctgttatcctggtctaataaccccccacacatacacctctggtgacctatttgcacagaccgtcgtcttccctccagtcttctgagggataggggacattccatcccaagcttctcccttacccacacctatccttttgaggggctttggggtggagctggggcaagcagagggactgggtcttcacttcttgggctaataaaattgtttctttgtggactaaaaaaaaaaaaaaaaa

SEQ ID NO: 1852 - DNA, 9312 bp, Homo sapiens
atgccgccgctcctggcgcccctgctctgcctggcgctgctgcccgcgctcgccgcacgaggcccgcgatgctcccagcccggtgagacctgcctgaatggcgggaagtgtgaagcggccaatggcacggaggcctgcgtctgtggcggggccttcgtgggcccgcgatgccaggaccccaacccgtgcctcagcaccccctgcaagaacgccgggacatgccacgtggtggaccgcagaggcgtggcagactatgcctgcagctgtgccctgggcttctctgggcccctctgcctgacacccctggacaatgcctgcctcaccaacccctgccgcaacgggggcacctgcgacctgctcacgctgacggagtacaagtgccgctgcccgcccggctggtcagggaaatcgtgccagcaggctgacccgtgcgcctccaacccctgcgccaacggtggccagtgcctgcccttcgaggcctcctacatctgccactgcccacccagcttccatggccccacctgccggcaggatgtcaacgagtgtggccagaagcccgggctttgccgccacggaggcacctgccacaacgaggtcggctcctaccgctgcgtctgccgcgccacccacactggccccaactgcgagcggccctacgtgccctgcagcccctcgccctgccagaacgggggcacctgccgccccacgggcgacgtcacccacgagtgtgcctgcctgccaggcttcaccggccagaactgtgaggaaaatatcgacgattgtccaggaaacaactgcaagaacgggggtgcctgtgtggacggcgtgaacacctacaactgccgctgcccgccagagtggacaggtcagtactgtaccgaggatgtggacgagtgccagctgatgccaaatgcctgccagaacggcgggacctgccacaacacccacggtggctacaactgcgtgtgtgtcaacggctggactggtgaggactgcagcgagaacattgatgactgtgccagcgccgcctgcttccacggcgccacctgccatgaccgtgtggcctccttctactgcgagtgtccccatggccgcacaggtctgctgtgccacctcaacgacgcatgcatcagcaacccctgtaacgagggctccaactgcgacaccaaccctgtcaatggcaaggccatctgcacctgcccctcggggtacacgggcccggcctgcagccaggacgtggatgagtgctcgctgggtgccaacccctgcgagcatgcgggcaagtgcatcaacacgctgggctccttcgagtgccagtgtctgcagggctacacgggcccccgatgcgagatcgacgtcaacgagtgcgtctcgaacccgtgccagaacgacgccacctgcctggaccagattggggagttccagtgcatctgcatgcccggctacgagggtgtgcactgcgaggtcaacacagacgagtgtgccagcagcccctgcctgcacaatggccgctgcctggacaagatcaatgagttccagtgcgagtgccccacgggcttcactgggcatctgtgccagtacgatgtggacgagtgtgccagcaccccctgcaagaatggtgccaagtgcctggacggacccaacacttacacctgtgtgtgcacggaagggtacacggggacgcactgcgaggtggacatcgatgagtgcgaccccgacccctgccactacggctcctgcaaggacggcgtcgccaccttcacctgcctctgccgcccaggctacacgggccaccactgcgagaccaacatcaacgagtgctccagccagccctgccgccacgggggcacctgccaggaccgcgacaacgcctacctctgcttctgcctgaaggggaccacaggacccaactgcgagatcaacctggatgactgtgccagcagcccctgcgactcgggcacctgtctggacaagatcgatggctacgagtgtgcctgtgagccgggctacacagggagcatgtgtaacatcaacatcgatgagtgtgcgggcaacccctgccacaacgggggcacctgcgaggacggcatcaatggcttcacctgccgctgccccgagggctaccacgaccccacctgcctgtctgaggtcaatgagtgcaacagcaacccctgcgtccacggggcctgccgggacagcctcaacgggtacaagtgcgactgtgaccctgggtggagtgggaccaactgtgacatcaacaacaatgagtgtgaatccaacccttgtgtcaacggcggcacctgcaaagacatgaccagtggctacgtgtgcacctgccgggagggcttcagcggtcccaactgccagaccaacatcaacgagtgtgcgtccaacccatgtctgaaccagggcacgtgtattgacgacgttgccgggtacaagtgcaactgcctgctgccctacacaggtgccacgtgtgaggtggtgctggccccgtgtgcccccagcccctgcagaaacggcggggagtgcaggcaatccgaggactatgagagcttctcctgtgtctgccccacgggctggcaagcagggcagacctgtgaggtcgacatcaacgagtgcgttctgagcccgtgccggcacggcgcatcctgccagaacacccacggcggctaccgctgccactgccaggccggctacagtgggcgcaactgcgagaccgacatcgacgactgccggcccaacccgtgtcacaacgggggctcctgcacagacggcatcaacacggccttctgcgactgcctgcccggcttccggggcactttctgtgaggaggacatcaacgagtgtgccagtgacccctgccgcaacggggccaactgcacggactgcgtggacagctacacgtgcacctgccccgcaggcttcagcgggatccactgtgagaacaacacgcctgactgcacagagagctcctgcttcaacggtggcacctgcgtggacggcatcaactcgttcacctgcctgtgtccacccggcttcacgggcagctactgccagcacgatgtcaatgagtgcgactcacagccctgcctgcatggcggcacctgtcaggacggctgcggctcctacaggtgcacctgcccccagggctacactggccccaactgccagaaccttgtgcactggtgtgactcctcgccctgcaagaacggcggcaaatgctggcagacccacacccagtaccgctgcgagtgccccagcggctggaccggcctttactgcgacgtgcccagcgtgtcctgtgaggtggctgcgcagcgacaaggtgttgacgttgcccgcctgtgccagcatggagggctctgtgtggacgcgggcaacacgcaccactgccgctgccaggcgggctacacaggcagctactgtgaggacctggtggacgagtgctcacccagcccctgccagaacggggccacctgcacggactacctgggcggctactcctgcaagtgcgtggccggctaccacggggtgaactgctctgaggagatcgacgagtgcctctcccacccctgccagaacgggggcacctgcctcgacctccccaacacctacaagtgctcctgcccacggggcactcagggtgtgcactgtgagatcaacgtggacgactgcaatccccccgttgaccccgtgtcccggagccccaagtgctttaacaacggcacctgcgtggaccaggtgggcggctacagctgcacctgcccgccgggcttcgtgggtgagcgctgtgagggggatgtcaacgagtgcctgtccaatccctgcgacgcccgtggcacccagaactgcgtgcagcgcgtcaatgacttccactgcgagtgccgtgctggtcacaccgggcgccgctgcgagtccgtcatcaatggctgcaaaggcaagccctgcaagaatgggggcacctgcgccgtggcctccaacaccgcccgcgggttcatctgcaagtgccctgcgggcttcgagggcgccacgtgtgagaatgacgctcgtacctgcggcagcctgcgctgcctcaacggcggcacatgcatctccggcccgcgcagccccacctgcctgtgcctgggccccttcacgggccccgaatgccagttcccggccagcagcccctgcctgggcggcaacccctgctacaaccaggggacctgtgagcccacatccgagagccccttctaccgttgcctgtgccccgccaaattcaacgggctcttgtgccacatcctggactacagcttcgggggtggggccgggcgcgacatccccccgccgctgatcgaggaggcgtgcgagctgcccgagtgccaggaggacgcgggcaacaaggtctgcagcctgcagtgcaacaaccacgcgtgcggctgggacggcggtgactgctccctcaacttcaatgacccctggaagaactgcacgcagtctctgcagtgctggaagtacttcagtgacggccactgtgacagccagtgcaactcagccggctgcctcttcgacggctttgactgccagcgtgcggaaggccagtgcaaccccctgtacgaccagtactgcaaggaccacttcagcgacgggcactgcgaccagggctgcaacagcgcggagtgcgagtgggacgggctggactgtgcggagcatgtacccgagaggctggcggccggcacgctggtggtggtggtgctgatgccgccggagcagctgcgcaacagctccttccacttcctgcgggagctcagccgcgtgctgcacaccaacgtggtcttcaagcgtgacgcacacggccagcagatgatcttcccctactacggccgcgaggaggagctgcgcaagcaccccatcaagcgtgccgccgagggctgggccgcacctgacgccctgctgggccaggtgaaggcctcgctgctccctggtggcagcgagggtgggcggcggcggagggagctggaccccatggacgtccgcggctccatcgtctacctggagattgacaaccggcagtgtgtgcaggcctcctcgcagtgcttccagagtgccaccgacgtggccgcattcctgggagcgctcgcctcgctgggcagcctcaacatcccctacaagatcgaggccgtgcagagtgagaccgtggagccgcccccgccggcgcagctgcacttcatgtacgtggcggcggccgcctttgtgcttctgttcttcgtgggctgcggggtgctgctgtcccgcaagcgccggcggcagcatggccagctctggttccctgagggcttcaaagtgtctgaggccagcaagaagaagcggcgggagcccctcggcgaggactccgtgggcctcaagcccctgaagaacgcttcagacggtgccctcatggacgacaaccagaatgagtggggggacgaggacctggagaccaagaagttccggttcgaggagcccgtggttctgcctgacctggacgaccagacagaccaccggcagtggactcagcagcacctggatgccgctgacctgcgcatgtctgccatggcccccacaccgccccagggtgaggttgacgccgactgcatggacgtcaatgtccgcgggcctgatggcttcaccccgctcatgatcgcctcctgcagcgggggcggcctggagacgggcaacagcgaggaagaggaggacgcgccggccgtcatctccgacttcatctaccagggcgccagcctgcacaaccagacagaccgcacgggcgagaccgccttgcacctggccgcccgctactcacgctctgatgccgccaagcgcctgctggaggccagcgcagatgccaacatccaggacaacatgggccgcaccccgctgcatgcggctgtgtctgccgacgcacaaggtgtcttccagatcctgatccggaaccgagccacagacctggatgcccgcatgcatgatggcacgacgccactgatcctggctgcccgcctggccgtggagggcatgctggaggacctcatcaactcacacgccgacgtcaacgccgtagatgacctgggcaagtccgccctgcactgggccgccgccgtgaacaatgtggatgccgcagttgtgctcctgaagaacggggctaacaaagatatgcagaacaacagggaggagacacccctgtttctggccgcccgggagggcagctacgagaccgccaaggtgctgctggaccactttgccaaccgggacatcacggatcatatggaccgcctgccgcgcgacatcgcacaggagcgcatgcatcacgacatcgtgaggctgctggacgagtacaacctggtgcgcagcccgcagctgcacggagccccgctggggggcacgcccaccctgtcgcccccgctctgctcgcccaacggctacctgggcagcctcaagcccggcgtgcagggcaagaaggtccgcaagcccagcagcaaaggcctggcctgtggaagcaaggaggccaaggacctcaaggcacggaggaagaagtcccaggacggcaagggctgcctgctggacagctccggcatgctctcgcccgtggactccctggagtcaccccatggctacctgtcagacgtggcctcgccgccactgctgccctccccgttccagcagtctccgtccgtgcccctcaaccacctgcctgggatgcccgacacccacctgggcatcgggcacctgaacgtggcggccaagcccgagatggcggcgctgggtgggggcggccggctggcctttgagactggcccacctcgtctctcccacctgcctgtggcctctggcaccagcaccgtcctgggctccagcagcggaggggccctgaatttcactgtgggcgggtccaccagtttgaatggtcaatgcgagtggctgtcccggctgcagagcggcatggtgccgaaccaatacaaccctctgcgggggagtgtggcaccaggccccctgagcacacaggccccctccctgcagcatggcatggtaggcccgctgcacagtagccttgctgccagcgccctgtcccagatgatgagctaccagggcctgcccagcacccggctggccacccagcctcacctggtgcagacccagcaggtgcagccacaaaacttacagatgcagcagcagaacctgcagccagcaaacatccagcagcagcaaagcctgcagccgccaccaccaccaccacagccgcaccttggcgtgagctcagcagccagcggccacctgggccggagcttcctgagtggagagccgagccaggcagacgtgcagccactgggccccagcagcctggcggtgcacactattctgccccaggagagccccgccctgcccacgtcgctgccatcctcgctggtcccacccgtgaccgcagcccagttcctgacgcccccctcgcagcacagctactcctcgcctgtggacaacacccccagccaccagctacaggtgcctgagcaccccttcctcaccccgtcccctgagtcccctgaccagtggtccagctcgtccccgcattccaacgtctccgactggtccgagggcgtctccagccctcccaccagcatgcagtcccagatcgcccgcattccggaggccttcaagtaaacggcgcgccccacgagaccccggcttcctttcccaagccttcgggcgtctgtgtgcgctctgtggatgccagggccgaccagaggagcctttttaaaacacatgtttttatacaaaataagaacgaggattttaattttttttagtatttatttatgtacttttattttacacagaaacactgcctttttatttatatgtactgttttatctggccccaggtagaaacttttatctattctgagaaaacaagcaagttctgagagccagggttttcctacgtaggatgaaaagattcttctgtgtttataaaatataaacaaagattcatgatttataaatgccatttatttattgattccttttttcaaaatccaaaaagaaatgatgttggagaagggaagttgaacgagcatagtccaaaaagctcctggggcgtccaggccgcgccctttccccgacgcccacccaaccccaagccagcccggccgctccaccagcatcacctgcctgttaggagaagctgcatccagaggcaaacggaggcaaagctggctcaccttccgcacgcggattaatttgcatctgaaataggaaacaagtgaaagcatatgggttagatgttgccatgtgttttagatggtttcttgcaagcatgcttgtgaaaatgtgttctcggagtgtgtatgccaagagtgcacccatggtaccaatcatgaatctttgtttcaggttcagtattatgtagttgttcgttggttatacaagttcttggtccctccagaaccaccccggccccctgcccgttcttgaaatgtaggcatcatgcatgtcaaacatgagatgtgtggactgtggcacttgcctgggtcacacacggaggcatcctacccttttctggggaaagacactgcctgggctgaccccggtggcggccccagcacctcagcctgcacagtgtcccccaggttccgaagaagatgctccagcaacacagcctgggccccagctcgcgggacccgaccccccgtgggctcccgtgttttgtaggagacttgccagagccgggcacattgagctgtgcaacgccgtgggctgcgtcctttggtcctgtccccgcagccctggcagggggcatgcggtcgggcaggggctggagggaggcgggggctgcccttgggccacccctcctagtttgggaggagcagatttttgcaataccaagtatagcctatggcagaaaaaatgtctgtaaatatgtttttaaaggtggattttgtttaaaaaatcttaatgaatgagtctgttgtgtgtcatgccagtgagggacgtcagacttggctcagctcggggagccttagccgcccatgcactggggacgctccgctgccgtgccgcctgcactcctcagggcagcctcccccggctctacgggggccgcgtggtgccatccccagggggcatgaccagatgcgtcccaagatgttgatttttactgtgttttataaaatagagtgtagtttacagaaaaagactttaaaagtgatctacatgaggaactgtagatgatgtatttttttcatcttttttgttaactgatttgcaataaaaatgatactgatggtgaaaaaaaaaaaaaaa

SEQ ID NO: 1853 - DNA, 1263 bp, Homo sapiens
cacattaaccggcaggatgtcggaggtgcggctgccaccgctacgcgccctggacgactttgttctggggtcggcgcgtctggcggctccggatccatgcgacccgcagcgatggtgccaccgcgtcatcaacaacctcctctactaccaaaccaactaccttctctgcttcggcatcggcctcgctctcgccgggtacgtgcggccacttcatacgctcctgagcgcgctggtagtggcggtggccctcggcgtgctggtgtgggcagctgagacccgcgcagctgtgcgccgctgccgccgcagccaccctgcagcctgcctggccgcagtgcttgccgtcggcctcctggtgctctgggtcgcgggcggcgcttgcaccttcctgttcagcatcgccgggccggtgcttctgatcctggtgcacgcctcgttgcgcctgcgcaaccttaagaacaagattgagaacaagatcgagagcattggtctcaagcggacgccaatgggcctgctactagaggcactgggacaagagcaggaggctggatcctaggcccctgggatctgtacccaggacctggagaataccaccccacccccagcccataattgggacccagagccctttcccagcacttaaaacaggagcctagagccccctgcccaaacaaaacaggacatctgtgaccgccctacccccacgccagccccaaactaagatatccctcacacccagcccccattacctagggacaagagtcttccccagccttgaacctaggaccaagagccacctacatccagccccaaaactggggcttcaggccagagcatccatggccaatttcaaattgtgaacccagagacactcccatccacccttctccatgctcatccccaaactggggcctggagcaaggcactctcaaatcttgaaccctggaccaaagcttttccagaccccaccctaccttccaacccaggtcaagacattgccaaatcttgaactcagaacccaagtgttccatgcccctgtgtggatggagtcgggtatcctgactgttggacccctggtccaggtgatcccgaccctcaccagtcccatttgcctccctccagctctgcttaggcattttgcccctcaccccaatgttccacaccatcgacaaccaaggggtgaggtggggacaggcctcagcagggaatggggcgtatatgttagtgttgctgcaacaataaagcctgttgcatctctcatgccaa

SEQ ID NO: 1854 - DNA, 2678 bp, Homo sapiens
gggaaaacactttaggttgagtgctgagagaaaggctctctgagtaggtgacatctgaactaagagctgaagcagaagaataagccatcctctgtggaccaaaggggacaagattctctacttttctgctacgcactaggaatatagcagagaagacaagtggctgctaccttctgttatcgtgggtggcagtgactagtttttctagatcttgactccctgccgtaactaaagatggagtacactgatgctgaagtactatgagccttcggaacttgtggagagactacaaagttttggttgttatggtccctttagttgggctcatacatttggggtggtacagaatcaaaagcagccctgttttccaaatacctaaaaacgacgacattcctgagcaagatagtctgggactttcaaatcttcagaagagccaaatccaggggaagtagcaggcttgcaatcttcaggtaaagaagcagctttgaatctgagcttcatatcgaaagaagagatgaaaaataccagttggattagaaagaactggcttcttgtagctgggatatctttcataggtgtccatcttggaacatactttttgcagaggtctgcaaagcagtctgtaaaatttcagtctcaaagcaaacaaaagagtattgaagagtgaagtaaaataaatatttggaattactaatttgtcattaaatcattctatgctgattagcttcataaacattgaactttttgattttatagccacaatgctgcatattcatactttaattcctaaagaataatttttaatgttaaaacgtgataatgcaataaatagaaaaatgtggtttacaaaataaaaacggtcttcactagttaccacctgaagtaagatgtctcgtttggaagctaagaagccatcattgtgtaagagtgaaccactgacaactgagagagtcaggaccacactttctgtcttgaaaagaattgtaacatcatgctatggcccctcaggtaggctgaagcagctgcacaatggctttggaggttacgtgtgtacaacctcacagtcctcagctctgctcagtcaccttttggtcacacatcccattttaaagatcctgacagcctccatacagaatcatgtgtcaagcttcagtgattgtggcttattcacagctattctttgctgcaacctgattgaaaatgttcagagattaggcttgacacccaccactgtcattagattaaataaacatcttttgagtctttgcatcagttatctcaagtctgagacctgtggttgtcgaatcccagtggactttagtagtactcagatcctcctttgtttggtgcgtagtatattaacaagtaaacctgcctgtatgctcaccagaaaggaaacagagcatgtcagtgctttgatcctgagagcctttttgcttacaattccagaaaatgctgaaggccacatcattttaggaaagagtttaattgtacctttaaaaggtcaaagagttatagattccactgtattacctgggatactcattgaaatgtcagaagttcaattaatgaggctattacctatcaaaaaatcaactgccctcaaggtggcactcttttgtacaactttatccggagacacttctgacactggagaaggaactgtggtggtcagttatggggtttctcttgaaaatgcagtcttggaccagctgcttaacctaggaaggcagctaatcagtgaccacgtagatcttgtcctgtgccaaaaagttatacatccatctttgaagcagtttctcaatatgcatcgtattattgccatagacagaattggagtgactctgatggaacccctgactaaaatgacaggaacacagcctattggatccctaggctcaatatgtcctaatagttatggaagtgtgaaagatgtgtgcactgcaaaatttggctccaaacatttttttcatcttattcctaatgaagcaacaatctgcagcttgcttctctgcaacagaaatgacactgcctgggatgagctgaagctcacgtgtcagacggcactgcatgtcctgcagttaacactcaaggaaccatgggctttgttgggaggtggctgtactgaaactcatttggctgcatatatcagacacaagactcacaacgacccagaaagcattctcaaagatgatgaatgtactcaaacagaacttcaattaattgctgaagcattttgcagtgccctagaatctgttgttggctctttagaacatgatggaggtgaaattctcactgacatgaagtatggacacctttggtcagttcaggcagattctccctgtgttgctaactggccagatttgctttcacagtgtggctgtggattatacaatagccaggaagaactcaactggtctttcttaagaagcacacgtcgtccatttgtgccacaaagctgccttccacatgaagctgtgggctcagccagcaacctgaccttggactgtttgactgcaaagcttagtggcctacaggtggctgtagagacagccaatttgattttggatctttcatatgttattgaagataaaaactaagagaatagcatgttcgtattacaagagaaacaaataaactagtctgttggcaattgagaaaaaaaaaaaaaaaaaaaa

SEQ ID NO: 1855 - DNA, 2540 bp, Homo sapiens
cctcgcgcgacgcgaaggttgtcgggatccgcggcagcagcggctgcttgagatctgtttctggggcctctggcggtggcggcctggggcggcgcgacggctggtgcgcaggtacactgatgctgaagtactatgagccttcggaacttgtggagagactacaaagttttggttgttatggtccctttagttgggctcatacatttggggtggtacagaatcaaaagcagccctgttttccaaatacctaaaaacgacgacattcctgagcaagatagtctgggactttcaaatcttcagaagagccaaatccaggggaagtagcaggcttgcaatcttcaggtaaagaagcagctttgaatctgagcttcatatcgaaagaagagatgaaaaataccagttggattagaaagaactggcttcttgtagctgggatatctttcataggtgtccatcttggaacatactttttgcagaggtctgcaaagcagtctgtaaaatttcagtctcaaagcaaacaaaagagtattgaagagtgaagtaaaataaatatttggaattactaatttgtcattaaatcattctatgctgattagcttcataaacattgaactttttgattttatagccacaatgctgcatattcatactttaattcctaaagaataatttttaatgttaaaacgtgataatgcaataaatagaaaaatgtggtttacaaaataaaaacggtcttcactagttaccacctgaagtaagatgtctcgtttggaagctaagaagccatcattgtgtaagagtgaaccactgacaactgagagagtcaggaccacactttctgtcttgaaaagaattgtaacatcatgctatggcccctcaggtaggctgaagcagctgcacaatggctttggaggttacgtgtgtacaacctcacagtcctcagctctgctcagtcaccttttggtcacacatcccattttaaagatcctgacagcctccatacagaatcatgtgtcaagcttcagtgattgtggcttattcacagctattctttgctgcaacctgattgaaaatgttcagagattaggcttgacacccaccactgtcattagattaaataaacatcttttgagtctttgcatcagttatctcaagtctgagacctgtggttgtcgaatcccagtggactttagtagtactcagatcctcctttgtttggtgcgtagtatattaacaagtaaacctgcctgtatgctcaccagaaaggaaacagagcatgtcagtgctttgatcctgagagcctttttgcttacaattccagaaaatgctgaaggccacatcattttaggaaagagtttaattgtacctttaaaaggtcaaagagttatagattccactgtattacctgggatactcattgaaatgtcagaagttcaattaatgaggctattacctatcaaaaaatcaactgccctcaaggtggcactcttttgtacaactttatccggagacacttctgacactggagaaggaactgtggtggtcagttatggggtttctcttgaaaatgcagtcttggaccagctgcttaacctaggaaggcagctaatcagtgaccacgtagatcttgtcctgtgccaaaaagttatacatccatctttgaagcagtttctcaatatgcatcgtattattgccatagacagaattggagtgactctgatggaacccctgactaaaatgacaggaacacagcctattggatccctaggctcaatatgtcctaatagttatggaagtgtgaaagatgtgtgcactgcaaaatttggctccaaacatttttttcatcttattcctaatgaagcaacaatctgcagcttgcttctctgcaacagaaatgacactgcctgggatgagctgaagctcacgtgtcagacggcactgcatgtcctgcagttaacactcaaggaaccatgggctttgttgggaggtggctgtactgaaactcatttggctgcatatatcagacacaagactcacaacgacccagaaagcattctcaaagatgatgaatgtactcaaacagaacttcaattaattgctgaagcattttgcagtgccctagaatctgttgttggctctttagaacatgatggaggtgaaattctcactgacatgaagtatggacacctttggtcagttcaggcagattctccctgtgttgctaactggccagatttgctttcacagtgtggctgtggattatacaatagccaggaagaactcaactggtctttcttaagaagcacacgtcgtccatttgtgccacaaagctgccttccacatgaagctgtgggctcagccagcaacctgaccttggactgtttgactgcaaagcttagtggcctacaggtggctgtagagacagccaatttgattttggatctttcatatgttattgaagataaaaactaagagaatagcatgttcgtattacaagagaaacaaataaactagtctgttggcaattgagaaaaaaaaaa

SEQ ID NO: 1856 - DNA, 1040 bp, Homo sapiens
cgacgagccatggttgctgggagcgacgcggggcgggccctgggggtcctcagcgtggtctgcctgctgcactgctttggtttcatcagctgtttttcccaacaaatatatggtgttgtgtatgggaatgtaactttccatgtaccaagcaatgtgcctttaaaagaggtcctatggaaaaaacaaaaggataaagttgcagaactggaaaattctgaattcagagctttctcatcttttaaaaatagggtttatttagacactgtgtcaggtagcctcactatctacaacttaacatcatcagatgaagatgagtatgaaatggaatcgccaaatattactgataccatgaagttctttctttatgtgcttgagtctcttccatctcccacactaacttgtgcattgactaatggaagcattgaagtccaatgcatgataccagagcattacaacagccatcgaggacttataatgtactcatgggattgtcctatggagcaatgtaaacgtaactcaaccagtatatattttaagatggaaaatgatcttccacaaaaaatacagtgtactcttagcaatccattatttaatacaacatcatcaatcattttgacaacctgtatcccaagcagcggtcattcaagacacagatatgcacttatacccataccattagcagtaattacaacatgtattgtgctgtatatgaatggtattctgaaatgtgacagaaaaccagacagaaccaactccaattgattggtaacagaagatgaagacaacagcataactaaattattttaaaaactaaaaagccatctgatttctcatttgagtattacaatttttgaacaactgttggaaatgtaacttgaagcagctgctttaagaagaaatacccactaacaaagaacaagcattagttttggctgtcatcaacttattatatgactaggtgcttgctttttttgtcagtaaattgtttttactgatgatgtagatacttttgtaaataaatgtaaatatgtacacaagtg

SEQ ID NO: 1857 - DNA, 815 bp, Homo sapiens
gcggcgttgtagttaagctcgtgtaacggcggcggtgtcggcagctgctgtagcgaagagagtttggcgcgatgtctcacaccattttgctggtacagcctaccaagaggccagaaggcagaacttatgctgactacgaatctgtgaatgaatgcatggaaggtgtttgtaaaatgtatgaagaacatctgaaaagaatgaatcccaacagtccctctatcacatatgacatcagtcagttgtttgatttcatcgatgatctggcagacctcagctgcctggtttaccgagctgatacccagacataccagccttataacaaagactggattaaagagaagatctacgtgctccttcgtcggcaggcccaacaggctgggaaataattgtgttggaagcactgggggggttggggtgggcttggaacacaggtgtgtacagcgtgctgtagtggaagttttgtatcatagtaatcctgtttccactttgttatactctagccaagattgactgtattagatgaaatgtgaggatcttgttcaatcggaaacccccgttacctcctctttttctttctctttcttttttttttttttacttaaacatttttatgatgatttagatggaagttgttcttcgtcacttaatgttggttccagtccttcaactgttcatatctactttataacattcacatactaacccttcttcaagatggggtggggggtggaaatgcagtttagccatgtcctcaagataaagtcttggtaaaaataaataaatgtcctttagttataaaaaaaaaaaaaaaaaaa

SEQ ID NO: 1858 - DNA, 1884 bp, Homo sapiens
gccttgcacatggagatgcttagctgagggggtggctttgttagactatttgcaggtcgtgagatagagcctgagatgggggactgggcccctgcctgggggattgggtcgtgacctgtgtggagccccacactgagctgcagtgggtggggagggtggtttacaggggtgctctgtgcagcccctctgattttcccctgggagtcccaggtccaggggaaggaggacagtggcccaggccacacagctcactgggcggctctcactcccccagggctggctgctggcgggatggacaccctggaggaggtgacttgggccaatgggagcacagcgctacccccacccctggcaccaaacatcagtgtgcctcatcgctgcctgctgctgctctacgaagacattggcacctccagggtccggtactgggacctcttgctgctcatccccaatgtgctcttcctcatcttcctgctctggaagcttccatctgctcgggcgaagatccgcatcacctccagccccatttttatcaccttctacatcctggtgtttgtggtggcgctggtgggcattgcccgggccgtggtatccatgacggtgagcacctcgaacgctgcaactgttgctgataagatcctgtgggagatcacccgcttcttcctgctggccatcgagctgagtgtgatcatcctgggcctggcctttggcacctgggagagtaagtccagcatcaagcgggtgctggccatcaccacagtgctgtccctggcctactctgtcacccaggggaccctggagatcctgtaccctgatgcccatctctcagctgaggactttaatatctatggccatgggggccgccagttctggctggtcagctcctgcttcttcttcctggtctactctctggtggtcatccttcccaagaccccgctgaaggagcgcatctccctgccttctcggaggagcttctacgtgtatgcgggcatcctggcactgctcaacctactgcaggggctggggagtgtgctgctgtgcttcgacatcatcgaggggctctgctgtgtagatgccacaaccttcctgtacttcagcttcttcgctccgctcatctacgtggctttcctccggggcttcttcggctcggagcccaagatcctcttctcctacaaatgccaagtggacgagacagaggagccagatgtacacctaccccagccctacgctgtggcccggcgggagggcctggaggctgcaggggctgctggggcctcagctgccagctactcgagcacgcagttcgactctgccggcggggtggcctacctggatgacatcgcttccatgccctgccacactggcagcatcaacagcacagacagcgagcgctggaaggccatcaatgcctgagggcagctgccagggcctgtggaggacaggccagagaggaggccagcaggcccagagtccccaggggaggaggaccaggtcaagggacgttctgtgggcagtagccctgtgtggccctgttcccaccatgagtctggaggccccacctccctggggctcccaatcccctttgccatctctgctctcactggggaccctcctccccttcccacctgctctcatactgctcagtgacatggcccaggctttccttccagggccatgcttggcaaggttggctgagggcaccctccttctctgcacccttggcacgagggcagggctggctctcccaatgcctccatcccatccccatggtgctttggcctcctcaaagcatccaccatggtggatggactgaagtgtgtatattttcttgatctattttttaataaaaaggaaaaggagcaaaaaaaaaaaaaaaaagttttg

SEQ ID NO: 1859 - DNA, 1936 bp, Homo sapiens
ccccgcgtgtctgctaggagagggcgggcagcgccgcggcgcgcgcgatccggctgacgcatctggccccggttccccaagaccagagcggggccgggagggagggggaagaggcgagagcgcggagggcgcgcgtgcgcattggcgcggggaggagcagggatcttggcagcgggcgaggaggctgcgagcgagccgcgaaccgagcgggcggcgggcgcgcgcaccatgggggagaaacccgggaccagggtcttcaagaagtcgagccctaactgcaagctcaccgtgtacttgggcaagcgggacttcgtagatcacctggacaaagtggaccctgtagatggcgtggtgcttgtggaccctgactacctgaaggaccgcaaagtgtttgtgaccctcacctgcgccttccgctatggccgtgaagacctggatgtgctgggcttgtccttccgcaaagacctgttcatcgccacctaccaggccttccccccggtgcccaacccaccccggccccccacccgcctgcaggaccggctgctgaggaagctgggccagcatgcccaccccttcttcttcaccataccccagaatcttccatgctccgtcacactgcagccaggcccagaggatacaggaaaggcctgcggcgtagactttgagattcgagccttctgtgctaaatcactagaagagaaaagccacaaaaggaactctgtgcggctggtgatccgaaaggtgcagttcgccccggagaaacccggcccccagccttcagccgaaaccacacgccacttcctcatgtctgaccggtccctgcacctcgaggcttccctggacaaggagctgtactaccatggggagcccctcaatgtaaatgtccacgtcaccaacaactccaccaagaccgtcaagaagatcaaagtctctgtgagacagtacgccgacatctgcctcttcagcaccgcccagtacaagtgtcctgtggctcaactcgaacaagatgaccaggtatctcccagctccacattctgtaaggtgtacaccataaccccactgctcagcgacaaccgggagaagcggggtctcgccctggatgggaaactcaagcacgaggacaccaacctggcttccagcaccatcgtgaaggagggtgccaacaaggaggtgctgggaatcctggtgtcctacagggtcaaggtgaagctggtggtgtctcgaggcggggatgtctctgtggagctgccttttgttcttatgcaccccaagccccacgaccacatccccctccccagaccccagtcagccgctccggagacagatgtccctgtggacaccaacctcattgaatttgataccaactatgccacagatgatgacattgtgtttgaggactttgcccggcttcggctgaaggggatgaaggatgacgactatgatgatcaactctgctaggaagcggggtgggaagaagggaggggatggggttgggagaggtgagggcaggattaagatccccactgtcaatgggggattgtcccagcccctcttcccttcccctcacctggaagcttcttcaaccaatcccttcacactctctcccccatccccccaagatacacactggaccctctcttgctgaatgtgggcattaattttttgactgcagctctgcttctccagccccgccgtgggtggcaagctgtgttcatacctaaattttctggaaggggacagtgaaaagaggagtgacaggagggaaagggggagacaaaactcctactctcaacctcacaccaacacctcccattatcactctctctgcccccattccttcaagaggagaccctttggggacaaggccgtttctttgtttctgagcataaagaagaaaataaatcttttactaagcatgaaaaaaaaaaaaaaaaaa

SEQ ID NO: 1860 - DNA, 1891 bp, Homo sapiens
ccccgcgtgtctgctaggagagggcgggcagcgccgcggcgcgcgcgatccggctgacgcatctggccccggttccccaagaccagagcggggccgggagggagggggaagaggcgagagcgcggagggcgcgcgtgcgcattggcgcggggaggagcagggatcttggcagcgggcgaggaggctgcgagcgagccgcgaaccgagcgggcggcgggcgcgcgcaccatgggggagaaacccgggaccagggtcttcaagaagtcgagccctaactgcaagctcaccgtgtacttgggcaagcgggacttcgtagatcacctggacaaagtggaccctgtagtgtttgtgaccctcacctgcgccttccgctatggccgtgaagacctggatgtgctgggcttgtccttccgcaaagacctgttcatcgccacctaccaggccttccccccggtgcccaacccaccccggccccccacccgcctgcaggaccggctgctgaggaagctgggccagcatgcccaccccttcttcttcaccataccccagaatcttccatgctccgtcacactgcagccaggcccagaggatacaggaaaggcctgcggcgtagactttgagattcgagccttctgtgctaaatcactagaagagaaaagccacaaaaggaactctgtgcggctggtgatccgaaaggtgcagttcgccccggagaaacccggcccccagccttcagccgaaaccacacgccacttcctcatgtctgaccggtccctgcacctcgaggcttccctggacaaggagctgtactaccatggggagcccctcaatgtaaatgtccacgtcaccaacaactccaccaagaccgtcaagaagatcaaagtctctgtgagacagtacgccgacatctgcctcttcagcaccgcccagtacaagtgtcctgtggctcaactcgaacaagatgaccaggtatctcccagctccacattctgtaaggtgtacaccataaccccactgctcagcgacaaccgggagaagcggggtctcgccctggatgggaaactcaagcacgaggacaccaacctggcttccagcaccatcgtgaaggagggtgccaacaaggaggtgctgggaatcctggtgtcctacagggtcaaggtgaagctggtggtgtctcgaggcggggatgtctctgtggagctgccttttgttcttatgcaccccaagccccacgaccacatccccctccccagaccccagtcagccgctccggagacagatgtccctgtggacaccaacctcattgaatttgataccaactatgccacagatgatgacattgtgtttgaggactttgcccggcttcggctgaaggggatgaaggatgacgactatgatgatcaactctgctaggaagcggggtgggaagaagggaggggatggggttgggagaggtgagggcaggattaagatccccactgtcaatgggggattgtcccagcccctcttcccttcccctcacctggaagcttcttcaaccaatcccttcacactctctcccccatccccccaagatacacactggaccctctcttgctgaatgtgggcattaattttttgactgcagctctgcttctccagccccgccgtgggtggcaagctgtgttcatacctaaattttctggaaggggacagtgaaaagaggagtgacaggagggaaagggggagacaaaactcctactctcaacctcacaccaacacctcccattatcactctctctgcccccattccttcaagaggagaccctttggggacaaggccgtttctttgtttctgagcataaagaagaaaataaatcttttactaagcatgaaaaaaaaaaaaaaaaaa

SEQ ID NO: 1861 - DNA, 3069 bp, Homo sapiens
ggcgagggtcggggccaccgcgcggcgacctcgggtcccggagcgaccgcagggcagccccgggcgccggccccggtgcgcgtctcctgtgcgcgcccctccgcgcgcggccccgatgctggacatgagcgaggcccgctcccagccgccctgcagcccgtccggcaccgccagctccatgtcgcacgtggaggactcggactcggacgcgccgccgtctcccgccggctccgagggcctgggccgcgcgggggtcgcggtggggggcgcccggggcgacccggcggaggcggcggacgagcgcttcccggcctgcatccgcgacgccgtgtcgcaggtgctcaagggctacgactggagtctggtgcccatgccggtgcgcggcggcggcggcggcgcgctcaaagccaagccgcatgtgaagcggcccatgaacgcattcatggtgtgggcgcaggcggcgcgccgcaagctggccgaccagtacccgcacctgcacaacgccgagctcagcaagacgctgggcaagctgtggcgcttgctgagcgagagcgagaagcggcccttcgtggaggaggcagagcgccttcgcgtgcagcacaagaaggaccaccccgactacaagtaccagccacggcgcaggaagagcgccaaagccggccacagcgactccgactcgggcgcggagctgggaccccaccctggcggcggtgccgtgtacaaggctgaagcagggcttggagatgggcaccaccatggcgaccacacagggcagacccacgggccgcccaccccgcccaccacccccaagacggagctgcagcaggcgggcgccaagccggagctgaagctggagggacgccggccggtggacagcgggcgccagaacatcgacttcagcaacgtggacatctcggagctcagcagcgaggtcatgggcaccatggacgccttcgacgtccacgagttcgaccagtacctgcccctgggcggccccgccccacccgagccgggccaggcctatgggggcgcctacttccacgccggggcgtcccccgtgtgggcccacaagagtgccccgtcggcctccgcgtcgcccaccgagacgggtcccccacggccgcacatcaagacggagcagccgagccccggccactacggcgaccagccccgaggctcgcccgactacggttcctgcagcggccagtccagcgccaccccggccgcccccgccggccccttcgccggctcacagggcgactatggcgacctgcaggcctccagctactatggtgcctaccctggctacgcacccggcctctaccagtacccctgcttccactcgccgcgccggccctacgcctcacccctgctcaacggcctggccctgccgcccgcccacagccccaccagtcactgggaccagccggtgtacaccaccctgaccaggccctgagggcccagccgcggggagggactcgcaggcgtcagggggcagccttgtcccggcccagtgtgtgtgaccagggcgggaggggccccagtggctgagctccaagtgcctgctgaagtctgcagggaaacacgcttgctgcccgtggccctcggcctccagatggccacacctctgccgacgacggaccagctccctctcccttctatctttctttttgaggtggtgggattattccacaaagaagggctgccgtttggtccctcttccgtgaggactggcggcaccagcaccttcgctttgcatctcggtagaggagaaacggcagcacagcccaaggaccaaaggagggggtggcaggggccttgcagggcgctgtgaggtccaggccggtcttggcgccgagagcccctgcactcaaggccacattccctcgacaacggctgcacgggctgtccgggatccggggtgtctgtccgcagactgggatgagtctactcgagcatctccgggacctgcctgtcagatctgaggtgtctccttgctggcagagtgcgctcacgcgagggctggctgtgatgaacacatctctcttttatttttatgtttttgataatttttatttttgaagcttaaatgtgtttcttctgaaagctgttaaagatgtatttatgttctgtgttattttatctttaattaatgaggtaattcgggcaaagagtagaatttaagacaaaacggaagctgggaagcttcccttgagggcaggcaggaggtggagttgcagctgttggccggcatcacgttgctcgttgctcggcttatgggaggccgccctggagggcccggaggtcccaaggtccctgggaggactgggcccctcatgcctcgagcttggcaaccgaaaacccgagggaggagaagggacctgccttgtgacatctctgatcaggttggggtgccccagcacccagtaccagtttggggtttgggaagcaggactccgtccctgtccccgactgtgccacgtggtaggacacataggacacaggaattcctgggtccttgcccatgactgtgccatgtggtaggacacaggacacaggaattcctggaaagtggtggcttcagaagtgatcttggctcgcaggcaccagtgccacctaccaagctgtgaaactaaaccttctccactaaacgtcgttagggcctcagttctagacgagtcatacctgattcacctgcactgcttcccctgtgtgctgagcatagagcatacaatagcgcctacttcacggaaacttgtgcctttaaactttgtaaacttaaacacagccgagaagttgcttctttgtactttttctacttttcctacttttttgtagaaaaaaaagataatgcctctgcttctatttctctgggggtgggggtgggggccgggagccgtcgcagacccgtttcatgcagcgtctcccttggcaccgcgttcggaggacgcaccctcactcccctgctgccttcactcctttctgaccaagcaacgctaacttttgtacagatcgatttgataaaattaaacaaagtgctttttatggaaaaaaaaaaaaaaaaaaaaa

SEQ ID NO: 1862 - DNA, 3832 bp, Homo sapiens
cggcggcggcggcgcctggagcggcgtgcgtaatgtcggcactttgctggggccgcggagcggcggggctcaaacgagccctacggccttgcggccgcccgggactccccggcaaagaagggaccgccggtggcgtctgcggccccaggaggagctcgtccgccagcccccaggagcaagaccaagaccgcaggaaggactggggccacgtggagctgctggaggtgctccaggcgcgggtgcggcagctgcaggctgagagcgtgtcggaggtggtggtgaacagggtggatgtggcgcggctcccagaatgtggcagtggagatggtagcctccagccacccaggaaggtccagatgggggccaaggatgccaccccggtgccctgtggccgctgggcaaagatactggagaaggataagcggacccagcagatgcgtatgcagcggttgaaggcgaagctgcagatgccattccagagcggggagttcaaggcgctgaccaggcgcctgcaggtggagccccggctcctgagcaagcagatggccgggtgcctggaggactgcacgcgccaggcccccgagagcccctgggaggagcagctggcccggctgctgcaggaggcccctgggaagctgagcctcgatgtggagcaggccccgtcggggcagcactcgcaggcccagctctcaggtcagcagcagaggctcctggccttcttcaagtgctgcctgctcactgaccagctgcccctcgcccaccacctgctggtcgtccaccacggccagcggcagaagcggaagctgctcacgctggacatgtacaacgccgtgatgcttggctgggcgcggcagggtgccttcaaggagctggtatatgtgttattcatggtgaaggatgccggcttgaccccggacctgctgtcctatgcggctgccctccagtgcatggggaggcaggaccaggacgccgggaccatcgaaaggtgtctggaacagatgagccaggaggggctgaagctgcaggcactcttcaccgccgttctgctgtctgaggaggatcgggccactgttctgaaggccgtgcacaaggtgaagcccaccttcagcctcccgccgcagctgccgcccccggtcaacacctccaagctgctcagggacgtgtatgccaaggatgggcgtgtgtcctacccgaagctgcacctgcccttgaagaccctgcagtgcttctttgagaagcagctccacatggagctggccagcagggtgtgcgtggtgtccgtggagaagcccacgttgccaagcaaggaggtcaagcacgcgcggaagaccctgaagaccctgcgggaccaatgggagaaagcactgtgccgggcgctgcgggagaccaagaaccgcctagagcgcgaggtgtacgagggccggttctcactttaccccttcctgtgcctgctggacgagcgcgaggtggtgcggatgctcctgcaggtcctgcaggcgctgcccgcccaaggtgagtccttcaccaccctggcccgggagctgagtgcgcgcactttcagccggcacgtggtgcagaggcagcgggtcagtggccaggtgcaggcgctgcagaaccactacaggaagtacctctgcttgctggcctccgacgccgaggtgcccgagccctgcctgccgcggcagtactgggaggagctgggggcgcccgaggccctgcgggagcagccctggcccctgccagtgcagatggagctgggcaagctgctggcggagatgctggtgcaggctacgcagatgccatgcagcctggacaagccgcatcgttcctctcggcttgtccccgtgctctaccacgtgtattccttccgcaacgtccagcaaatcggcatcctgaagccgcacccggcctacgtgcagctgctggagaaggccgcggaacccacgctgaccttcgaggcggtggatgtacccatgctttgccccccgctgccctggacatcgccgcactctggtgctttcctgctcagccccaccaagctgatgcgcacggtggaaggcgccacgcagcaccaggagctgctggaaacctgcccgcccaccgcgctgcatggcgcactggacgccctcacccaactgggcaactgcgcctggcgcgtcaacgggcgcgtgctggacctggtgctgcagctcttccaggccaagggctgcccccagctaggcgtgccggccccgccctccgaggcgccccagccgcccgaggcccacctgccgcacagcgccgcgcccgcccgcaaggccgagctgcgccgtgagctggcgcactgccagaaggtggcccgggagatgcacagcctgcgggcggaggcgctgtaccgcctctcgctggcgcagcacctgcgggaccgcgtcttctggctgccgcacaacatggacttccgcggccgcacctacccctgcccgccgcacttcaaccacctgggcagcgacgtggcgcgggccctgctggagttcgcccagggccgcccgctcggcccgcacggcctggattggctcaagatccacctggtcaatctcacggggttgaagaagcgggagccgctgcggaagcgcctggcctttgcggaggaggtgatggatgacatcctggactccgcggaccaacccttgacgggccgaaagtggtggatgggcgcggaggaaccctggcagacgctggcctgctgtatggaggtggcgaacgctgtgcgcgcctccgaccctgccgcctatgtctcccacctccccgtccatcaggacggctcttgcaacggcctgcagcattatgctgctctgggccgcgacagcgtgggcgccgcctccgtcaacctggagccctcggatgtgccgcaggacgtgtacagcggcgtggccgcgcaggtggaggtgttccgtaggcaggacgcccagcggggcatgcgggtggcacaggtgctggaaggtttcatcacccgcaaggtggtgaagcagacggtgatgacggtggtgtacggggtcacgcgctatggcgggcgcctgcagattgagaagcgcctccgggagctgagcgactttccccaggagttcgtgtgggaggcctctcactatctcgtacgccaggtcttcaagagtctacaggagatgttctcggggacccgggccatccagcactggctgaccgagagtgcccgcctcatctcccacatgggctctgtggtggagtgggtcacacccctgggcgtccccgtcatccagccgtatcgcctggactccaaggtcaagcaaataggaggtggaattcagagcatcacctacacccacaacggagacatcagccgaaagcccaacacacgtaagcagaagaacggcttcccgcccaacttcatccactcgctggactcctcccacatgatgctcaccgccctgcactgctacaggaagggcctgaccttcgtctctgtgcacgactgttactggactcacgcagctgatgtctccgtcatgaaccaggtgtgccgggagcagtttgtccgcttgcacagcgagcccatcctgcaggacctgtccagattcctggtcaagcggttctgctctgagccccagaagatcttggaggccagccagctgaaggagacactgcaggcggtgcccaagccaggggccttcgacctggagcaggtgaagcgttccacctacttcttcagctgacaccccgtgagccttgtcagtgtgtaaataaagctcttttgccaccccccaaaaaaaaaaaaaaaaaaaaaaaaaaaaaaaaaaaaaaaaaaaaaaaaaaaaaaaaa

SEQ ID NO: 1863 - DNA, 3197 bp, Homo sapiens
gacgataaggcctggcgttattgcttagaggcggctacctggagccggaagcgcggctgcagcagggcgaggctccaggtggggtcggttccgcatccagcctagcgtgtccacgatgcggctgggctccgggactttcgctacctgttgcgtagcgatcgaggtgctagggatcgcggtcttccttcggggattcttcccggctcccgttcgttcctctgccagagcggaacacggagcggagcccccagcgcccgaaccctcggctggagccagttctaactggaccacgctgccaccacctctcttcagtaaagttgttattgttctgatagatgccttgagagatgattttgtgtttgggtcaaagggtgtgaaatttatgccctacacaacttaccttgtggaaaaaggagcatctcacagttttgtggctgaagcaaagccacctacagttactatgcctcgaatcaaggcattgatgacggggagccttcctggctttgtcgacgtcatcaggaacctcaattctcctgcactgctggaagacagtgtgataagacaagcaaaagcagctggaaaaagaatagtcttttatggagatgaaacctgggttaaattattcccaaagcattttgtggaatatgatggaacaacctcatttttcgtgtcagattacacagaggtggataataatgtcacgaggcatttggataaagtattaaaaagaggagattgggacatattaatcctccactacctggggctggaccacattggccacatttcagggcccaacagccccctgattgggcagaagctgagcgagatggacagcgtgctgatgaagatccacacctcactgcagtcgaaggagagagagacgcctttacccaatttgctggttctttgtggtgaccatggcatgtctgaaacaggaagtcacggggcctcctccaccgaggaggtgaatacacctctgattttaatcagttctgcgtttgaaaggaaacccggtgatatccgacatccaaagcacgtccaacagacggatgtggctgcgacactggcgatagcacttggcttaccgattccaaaagacagtgtagggagcctcctattcccagttgtggaaggaagaccaatgagagagcagttgagatttttacatttgaatacagtgcagcttagtaaactgttgcaagagaatgtgccgtcatatgaaaaagatcctgggtttgagcagttcaaaatgtcagaaagattgcatgggaactggatcagactgtacttggaggaaaagcattcagaagtcctattcaacctgggctccaaggttctcaggcagtacctggatgctctgaagacgctgagcttgtccctgagtgcacaagtggcccagtacgacatctattcgatgatggttctcaccctgctcctgctcagcgtcccacaggcactgcgcagaaaggctgagctggaagtcccactgtcatctcctgggttttctctgctcttttatttggtgatcctggttctttcggccgttcacgtcattgtgtgcacctcagctgaaagttcgtgctacttctgtggcctctcgtggctggcggcaggtggggtgatggtgctggcctcggcgctgctgtgtgtgattgtgtctgttctgaccaacgtgctcgtgggtggaaacaccccaaggaagaaccccatgcatcccagctcaaggtggtcagagctagaccttcttattctgttggggacggcgggccacgtcttgagcctgggcgccagcagcttcgtggaggaggagcaccagacctggtacttccttgtgaacaccctgtgtctagctctgagccaagaaacctacagaaactactttctgggagatgacggtgagcctccgtgtggcctctgtgtggaacaagggcatgacggggccacagcagcgtggcagggcgggcctggctgtgatgtcctggagcgagacaaaggccacggaagcccctctacctccgaagtgctcagaggccgcgagaagtggatggtgctggccagtccgtggctaatactggcctgctgccggctgctgcgctccctaaaccagacaggtgtgcagtgggctcaccggcctgacctcggccactggctcaccagctctgaccacaaagccgagctctctgtcctggctgccctctccctcctcgtagtttttgtgctggtgcagagggggtgctcccctgtgtccaaggctgccctggcgctggggctgctgggcgtctactgctaccgggcggccatcgggagtgtccggttcccgtggcggccggacagcaaggacatttccaagggtattattgaagctcgttttgtttatgtctttgtccttggcattctgttcacgggcaccaaagacttacttaaatctcaagtcattgctgcagacttcaaactcaagactgtaggtttatgggagatatatagtggattagttcttctggcagccttgctctttagaccacataatcttccggtcttagcatttagcctcttgattcagactctaatgactaaattcatctggaagcccctgagacacgatgcagctgagattactgtgatgcattattggtttggtcaagcattcttctattttcagggcaactccaacaacattgccaccgtggacatctccgcaggcttcgtgggcttagacacctacgtggaaatcccagccgtgctcctgacagcgcttgggacgtacgcagggcctgtgctgtgggccagccacttagtgcacttcctgagctcagaaacacgcagtggttcagcactgagtcatgcttgcttctgctacgcactgatttgttctattccagttttcacgtacatcgttttggtgacatctctgcgttatcatttatttatatggagtgtattttctccaaaacttctctacgagggaatgcacctgctcattacagctgctgtctgtgtattcttcacggcaatggatcaaaccagactcacacagtcttagactaagctgaacactggaaaaataatacatgcttaaagtctgctgttattctaaaatgaaagatatgaattcaacaaagttgatggataactttctttgactgctctacctgaatttagactaagcagtaaatagtttaataaaagatcacttt

SEQ ID NO: 1864 - DNA, 1833 bp, Homo sapiens
agaagagcgggctaagacgccggaggaggtggcggcggctgggagaggcgagggttctggccgattttagcatcgaaactaggagaaataagaatggctgtagaggaacttcagtctataataaagagatgtcaaatcctagaagagcaagactttaaagaagaggattttggcctatttcagttagctgggcaaagatgcatagaagaagggcacacagaccagctattagaaattattcaaaatgaaaagaataaggtcatcatcaagaatatgggctggaatctcgttggtcctgttgttcgatgccttttgtgtaaagataaagaggatagtaaaagaaaagtttattttttgatctttgatttattggtaaagttatgcaatccaaaggaattattgttgggtttgcttgaactgattgaagagccctctggaaaacagatatcccaaagtattcttcttttgcttcagccattacaaacagtgattcagaaacttcataacaaggcatattcaattggattagcattgtctaccctttggaatcagctatctcttcttcctgttccatactcaaaagaacaaatacaaatggatgactatggcctttgtcagtgttgcaaggccttaatagagttcactaagccttttgtggaagaagtcattgataacaaagaaaactcactggaaaatgaaaagttaaaggatgaattactgaaattttgtttcaaaagcttgaaatgccctttgctgacagcacaattctttgaacagtctgaagaaggtggaaatgatcctttcaggtattttgcatcagaaataataggttttttatcagcaattggacaccctttccccaaaatgatttttaatcatggaaggaaaaagagaacttggaattaccttgaatttgaagaagaagaaaataaacagttagcagactcaatggcttctctggcatatctagtatttgtacagggcatccatattgatcagcttccaatggtcttaagcccattgtaccttttgcagtttaatatggggcacattgaagtctttttgcaaagaacagaagagtctgttatctccaaaggattggagctgctggagaatagtttattgagaatagaagacaatagtctactttaccagtacttagaaatcaagagttttcttactgtacctcagggcttagtgaaagtaatgacactttgccccattgagacactgaggaaaaagagtttagctatgcttcagctgtatattaacaagttggattcacaaggcaaatatacattatttagagaacacgtaacaacaaatggtttacaggaccacagttgatttcccttcttgatttggtactttttctcccagagggtgcagaaacagatttactgcaaaactcagataggattatggcttcattaaatttattgaggtatttggttatcaaagataatgaaaatgacaatcaaactggattatggacagaacttggaaatattgagaataatttcttaaagccacttcatataggacttaatatgtcaaaagcacattatgaagcagaaattaaaaatagccaagaggcccagaaatctaaagatctttgttctataactgtaagtggagaagagatccctaatatgcctcctgaaatgcagcttaaggtcctgcattcagctcttttcacatttgatttgattgaaagtgttctagctcgagtggaagaactcattgaaataaaaacaaagtctacctctgaagaaaatattgggataaagtgaaagttccatttcctaaataaaaactaataaaatatagtac

SEQ ID NO: 1865 - DNA, 1918 bp, Homo sapiens
agaagagcgggctaagacgccggaggaggtggcggcggctgggagaggcgagggttctggccgattttagcatcgaaactaggagaaataagaatggctgtagaggaacttcagtctataataaagagatgtcaaatcctagaagagcaagactttaaagaagaggattttggcctatttcagttagctgggcaaagatgcatagaagaagggcacacagaccagctattagaaattattcaaaatgaaaagaataaggtcatcatcaagaatatgggctggaatctcgttggtcctgttgttcgatgccttttgtgtaaagataaagaggatagtaaaagaaaagtttattttttgatctttgatttattggtaaagttatgcaatccaaaggaattattgttgggtttgcttgaactgattgaagagccctctggaaaacagatatcccaaagtattcttcttttgcttcagccattacaaacagtgattcagaaacttcataacaaggcatattcaattggattagcattgtctaccctttggaatcagctatctcttcttcctgttccatactcaaaagaacaaatacaaatggatgactatggcctttgtcagtgttgcaaggccttaatagagttcactaagccttttgtggaagaagtcattgataacaaagaaaactcactggaaaatgaaaagttaaaggatgaattactgaaattttgtttcaaaagcttgaaatgccctttgctgacagcacaattctttgaacagtctgaagaaggtggaaatgatcctttcaggtattttgcatcagaaataataggttttttatcagcaattggacaccctttccccaaaatgatttttaatcatggaaggaaaaagagaacttggaattaccttgaatttgaagaagaagaaaataaacagttagcagactcaatggcttctctggcatatctagtatttgtacagggcatccatattgatcagcttccaatggtcttaagcccattgtaccttttgcagtttaatatggggcacattgaagtctttttgcaaagaacagaagagtctgttatctccaaaggattggagctgctggagaatagtttattgagaatagaagacaatagtctactttaccagtacttagaaatcaagagttttcttactgtacctcagggcttagtgaaagtaatgacactttgccccattgagacactgaggaaaaagagtttagctatgcttcagctgtatattaacaagttggattcacaaggcaaatatacattatttaggtgcttattgaatacaagtaatcactcaggtgtggaggcttttattattcaaaatatcaaaaatcaaattgacatgtcattaaagagaacacgtaacaacaaatggtttacaggaccacagttgatttcccttcttgatttggtactttttctcccagagggtgcagaaacagatttactgcaaaactcagataggattatggcttcattaaatttattgaggtatttggttatcaaagataatgaaaatgacaatcaaactggattatggacagaacttggaaatattgagaataatttcttaaagccacttcatataggacttaatatgtcaaaagcacattatgaagcagaaattaaaaatagccaagaggcccagaaatctaaagatctttgttctataactgtaagtggagaagagatccctaatatgcctcctgaaatgcagcttaaggtcctgcattcagctcttttcacatttgatttgattgaaagtgttctagctcgagtggaagaactcattgaaataaaaacaaagtctacctctgaagaaaatattgggataaagtgaaagttccatttcctaaataaaaactaataaaatatagtac

SEQ ID NO: 1866 - DNA, 1319 bp, Homo sapiens
cgccgggggccggctggcgcgggggctccggtaacccgggctgggcgggggagaggaaggggcggggcagggagcccgccagagtgcggggtcgcggtgcggacttcgagcacgagccctaaagacgctcagcactcgtcgcttctcctagcagaccctgcccggcttggcgatggagtttccggacctcggcgctcactgttcggagccgagctgtcagcgcttggattttctgccgcttaagtgtgatgcctgctcaggcatcttctgcgcagaccatgtggcctacgcccagcatcactgtggatctgcttaccaaaaggatatccaggtacctgtgtgccctctctgtaatgtgcctgtgcctgtggccagaggggagccccctgaccgtgctgtgggagagcacattgacagagactgtcgctctgatccagcacagcaaaaacgtaagatcttcaccaataagtgtgaacgcgctggctgccggcagcgagaaatgatgaaactgacctgtgaacgctgtagccgaaacttctgcatcaagcaccggcatccactggaccatgattgctctggggaggggcacccaaccagccgggcaggacttgctgccatctccagagcacaagctgtggcttctacaagcactgtccccagcccaagtcaaaccatgccttcctgtacctctcccagcagagccacaacccgatctccgtcctggacagcccctccagtgattgctttgcagaatggcctgagtgaggatgaagctctgcagcgggccctggaaatgtccctggcagaaaccaaaccccaggttccaagttgtcaggaggaagaagacctagctttagcacaagcactgtcagccagtgaggcagaataccagcggcagcaggcccagagccgcagctcgaagccgtccaactgcagcctgtgctagggccctgggcttggggagggaggttcacctgaggaggactgtggccctcacacctctagggtacacagggagaggaggcccggagcaccctggagggcagagacaagcgggagtgatgtggaggtcgccctgggagcctctggaaggccttgctagtgctccagctgcatggaagagagcggctagcaactgttccctggttgggccctcagtggatgctggccaggccctactcttagccccttcatcatgtcatctcccttatgctggagctgccccgatgtggagtgggcaggaaggggcctggaaaaaataaaggatcttggcagttgataaaacgtaaaaaaaaaaaaggaaaaaaaaaaaaaaaaaa

SEQ ID NO: 1867 - DNA, 4072 bp, Homo sapiens
gagttgagggaggacctgctggctgcagtgaggagcggaggcgggcgcgggcggccggccatgatcgcgtcgtgcttgtgttacctgctgctgccggccacgcgcctcttccgcgccctctcagatgctttcttcacatgtcgaaaaaatgtccttctggcgaacagctcatccccccaggtagagggcgactttgccatggcccctcggggccctgagcaggaggaatgtgagggcctgctgcagcagtggcgagaagaagggttgagccaggtgctctcaactgcaagtgaggggccccttatagataaaggactagcccagagcagcctggcacttctgatggataatcctggagaagagaatgctgcttcagaggacaggtggtccagcaggcagctgagtgaccttcgggctgcagagaacctggatgagcctttccctgagatgctaggagaggagccactgctggaggtggagggggtggagggctccatgtgggcagctatccccatgcagtcggagccccagtatgcagactgtgctgccctcccagtgggtgccctggccacagagcagtgggaagaggacccagcggtgttggcctggagcatagcacctgagcctgtgccccaggaagaggcttccatctggccctttgagggcctggggcagttgcagcctcccgcagtggaaataccatatcatgaaattttgtggcgagaatgggaggatttctccacccagccagatgctcagggcctgaaggcaggagatggccctcagttccagttcactctgatgtcttataacatcctggctcaggacctgatgcagcagagctcagagctctatctacattgccatccagacatcctcaattggaactatcgcttcgtgaacctcatgcaggaattccagcactgggaccctgatatcctgtgtctccaggaagtccaggaagatcattactgggagcagctggaaccctctctgcgaatgatgggctttacctgtttctacaagaggaggactgggtgtaaaaccgatggctgtgctgtctgctacaagcctaccagattccgcctgctctgtgctagccctgtggagtacttccggcctggcttggagctacttaatcgggataatgtgggcttagtgttgctactgcaaccactcgtcccagaaggcctgggacaagtctcggtggccccgctgtgtgtggcaaatacccatatcctttacaacccacgccggggcgatgtcaagctggcccagatggccattctcctggcggaagtgggcaaggtggccagactgtcagatggcagccactgccccatcatcttgtgcggggacctaaattctgtccctgattcacctctctacaacttcatcagggatggagagctccagtaccatgggatgccagcctggaaggtatctggacaggaagacttctcccatcagctttaccagaggaagctgcaggccccactgtggcccagctccctgggcatcactgattgctgtcagtatgtcacctcctgtcaccccaagagatcagagagacgcaagtatggccgagacttcctgctacgtttccgcttctgcagcatcgcttgtcagcgaccagtaggactggtccttatggaaggagtgacagatactaagccagagcgacctgcgggttgggctgagtctgtccttgaggaagatgcatcggagcttgagcctgccttctccaggactgtaggtaccatccagcactgcctccacctgacgtcagtatatacccacttcctgccccagcgtggccgcccagaggtcactacaatgccattgggtcttggaatgacagtagattacatcttcttctcagctgagtcctgtgagaatgggaacagaactgatcacaggctgtatcgagatggaactctcaagctcctgggtcgtctctcccttctctctgaagagatactctgggctgccaatggcttacccaaccccttctgctcttcagaccacctctgcctgctagccagcttcgggatggaagtcaccgccccatgacagggctcccaggggaagagagcttctcttccagaagagctcactggatcagagactgtggaaaaatcccatgcatctagaaacttagatccaagaaacttacatcccctcccttccccctcctcgttccctttttcccacggttagactttctccaggcctggctgcgttctctgcctgtggtccttgccccaccccagcctcttcctaatcctgtgccacacactcagtggccctgggagaggcagaaggggggctcccccttccttccatgtatccagcgctcccccttgatttttaattaccagggttatgggagttcttgatttcattggttatttgctttcaggccgtttcttgatgtaccttctgacctgaccttttccctgccttcaggacttctgggcccagccctcttgccaggcatgcatatgtgagatatgcatatcatgtatgtgtcctcttggggtgagacttctgcacagccatgcctgcctctgaccagtccacttttcatgttggggctgtaggcctggggcaggttcagagtctacccaagtacctatgtatgagcaggcagcagcagggcatggccccatctctccttttagcctctgtgtttcattaggcattcatcctgccaaccagggcaggcccggcgtctgggctctgggaacaaatggggcccacatcctggagtggcaaattttgggggatgcgctacctgtcccagctggccctgtgcctccaacccagagctccccacagacctggtgtaatttcacaagggccatccctttccccaggcttccctgagggaggcggaagtttgaacccttatgtggggttcattgggctagggtagtggtatgaggtttaaaactatttaaggattaggaggagaaagagtcttcaggaaactcttgtttcactggactctgcagcctgcagaactggggcaagggtaggagttccagtaggggaaggagcaggtagactcttcagctgcctcagctgggactgaagacctaagctgattctctttcctctccactcctaagaagcaattttctgttcctctccttccaccactttttactttctgctatctcccatctcccgcttcccttccatttcctttctagaaaaccctggtatttagctcaggccaaactgcctcagcagaaaggtggccttggacaaaactggtccaagaatttgaagtggcagtacttgcggattggctctgtccagcaaggcctcagctgcttgttgcgtctgctttccctcccctaacagaagggtaccctggcttattcaggggactccttagtccacactgtgtcacctgcatgccttaatctttcattgctggggtgtggccttgggagatcctgggccagcccctccacacatctccctaagtcagagtggctgctggccctggtagatttgacttgctcttgcctcactcgacctccaaagtgggactgaagacagtggtcaagagacttgagttcgggacagtaagccaggggttaaggttctttcctttttttgaaagccaaagacccagtttgcattgtgctgctgcattcatggttagaagctttccatgcctaggttctagggaatttatttttctatgtgtatatattttcaaactttgtttcctgggtactgggcatgtgcctgtctgagccccaggtctgtctacaccccaccattcattctgtctgtctgttccctggacactgcctaaaagggtctcaagacagtgccctgtgggttcctaggactagggcccatcactgttctcttctgctgggaaatgcagctttaaaatggctaaccacagcagagggcagatgcttgatagattatcttttccttgctttcttgtttctgttttgaaagtgaaatggggttttaaattgttatttaaactctttttccaaataaaggtttaccttttttccccccaaaaaaaaaaaaaaaa

SEQ ID NO: 1868 - DNA, 1810 bp, Homo sapiens
gggatcccgaccagtcctgaccgcacgggggccgcggccacggggcgcaggggccatggtgcgcggcaggatctcccggctctcggtccgggacgtgcgcttccccacgtcgcttgggggccacggcgcggacgccatgcacacggaccctgactactcggctgcctatgtcgtcatagaaactgatgcagaagatggaatcaaggggtgtggaattaccttcactctgggaaaaggcactgaagttgttgtctgtgctgtgaatgccctcgcccaccatgtgctcaacaaggacctcaaggacattgttggtgacttcagaggcttctataggcagctcacaagtgatgggcagctcagatggattggtccagaaaagggcgtggtgcacctggcgacagcggccgtcctaaacgcggtgtgggacttgtgggccaagcaggagggaaagcctgtctggaagttacttgtggacatggatcccaggatgctggtatcctgcatagatttcaggtacatcactgatgtcctgactgaggaggatgccctagaaatactgcagaaaggtcaaattggtaaaaaagaaagagagaagcaaatgctggcacaaggataccctgcttacacgacatcgtgcgcctggctggggtactcagatgacacgttgaagcagctctgtgcccaggcgctgaaggatggctggaccaggtttaaagtaaaggtgggtgctgatctccaggatgacatgcgaagatgccaaatcatccgagacatgattggaccggaaaagactttgatgatggatgccaaccagcgctgggatgtgcctgaggcggtggagtggatgtccaagctggccaagttcaagccattgtggattgaggagccaacctcccctgatgacattctggggcacgccaccatttccaaggcactggtcccattaggaattggcattgccacaggagaacagtgccacaatagagtgatatttaagcaactcctacaggcgaaggccctgcagttcctccagattgacagttgcagactgggcagtgtcaatgagaacctctcagtattgctgatggccaaaaagtttgaaattcctgtttgcccccatgctggtggagttggcctctgtgaactggtgcagcacctgattatatttgactacatatcagtttctgcaagccttgaaaatagggtgtgtgagtatgttgaccacctgcatgagcatttcaagtatcccgtgatgatccagcgggcttcctacatgcctcccaaggatcccggctactcaacagaaatgaaggaggaatctgtaaagaaacaccagtatccagatggtgaagtttggaagaaactccttcctgctcaagaaaattaagtgctcagccccaacaacttttttctttctgaagtgaaagggcttaaaatttcttggaaatagttttacaaaaatggatttaaaaaatcctaccgatcaagatgagttcagctagaagtcataccaccctcaggaatcagctaagtaattattacttgattcttttagcaaatcaatgcacgttatcctacttaatccttaaataagtttagatttaactaacccaaagtccaggaggatgttcttacaaaaatagctatatcaagggctggcacctagacattaaactgtaatttgaaaataagcaacatgttgcataacttgttggaataattccttgttctgtttaacacttgtcataaattagcagaataaaaatagtcgtgcaacaaaaaaaaaaaaaaaaaaaaaaaaaaaaaaaaa

SEQ ID NO: 1869 - DNA, 1219 bp, Homo sapiens
gatgctttttaaacttttttttactaccctgtggtccctgaggagcattacactgagaagttttctcctattttgtctttcattctccacatcctcttttgttctagtgcatggcatgggaagccctctctaggaggatgctgtggccacacaagtgctggacgaaccgctggagtaggtgacttccaaggtgtcctgatgtagtagctattagacaagctcctgcatttggccagtaattagcatgctgctgcacattgccactaggtggtgctgctgctccattcccaagtaacccacatgcatccctggctggggtcagccttggggtttcccaagtgtagaggaatccatctctgtgcctgtggtaatggctggacaccaggagagaccctgtctcaaaacaaaacagaaataacaaaaaataaggtgacttgctggaggccacatggctgtgagccaaatacaggtctgggttatcagggctcacatacttctaagtacaccctactgccttggaatctgctgaagaccaagcccctgcccccaagccatggcaaagaaggagggaaggaagcaaaggtgcccagcggggacaactcggggaggggcgaggtgcccagggcccaggaaggccaagcagcatgtggcagggcagcatcaggtgactcccaagaaggaatgaggagaggatatgaggaaagagccacagcacagaggcctgctgttaggtcagcggagaccacggcccatgggacctggatctacccttgatgctaacaatgttctttggggaaaaaatctataatcacaaagtttctgcaactggactgtagtcatggttgcagaactgtatagatttactaggaaccatcaaattgttcacttacaatgggtaaattgtacagtacataggttatccctcagtaaagctgtatgaaatttatagtcatgaaactaatagtgacaaacgagctgggtaagtaggtctcagctgttctgtaggcactttgagaagaggaagagtagcatctcggttttaataaaagaaagcctggcccatggcgtccagcttctgcttgaatactttcagtgcccgggagctcagtatctcaaagcagcccactcctgtttaagagaactctaaaccttagaatgttgaaatacatcattattattctagtactgctgtgaaaaataaatgtctttgttttgccac

SEQ ID NO: 1870 - DNA, 3140 bp, Homo sapiens
ccacgcgtccggggtttcccaagatggcggcggacgtgtccgttactcaccggcccccgctgagccctaagtctggggccgaagtcgaagccggcgatgccgcggagcgccgggcgccggaagaagagctgccgcctctagatccagaagagatccggaaacgcctggaacacaccgagcgccagttccgtaaccgccgcaagatactgatccggggcctcccgggggacgtgaccaaccaggaagtacatgacctgctcagtgactatgagctcaaatactgttttgtggacaaatacaaagggacagccttcgtgaccctgctgaatggggagcaggccgaggccgcaatcaatgctttccaccagagccgcctgcgggagcgtgaactgtcggtgcagctgcagcccacggatgccctgctgtgtgtggccaacctgccccccagcctcacacagcagcagttcgaggagctggtgcggcccttcggcagcctggagcgctgcttcctggtctacagtgagcgcactggccaatccaagggctatggctttgctgagtacatgaagaaggactcggctgcccgtgccaagtcggacctgctgggcaagccgctgggaccacgcaccctctacgtgcactggacggatgccgggcaactgacgcctgcccttctccactcccgctgcctctgtgtggaccgcctgccacctggcttcaacgatgtggacgctctgtgccgggcgctgtcagctgtccacagccccaccttctgccagctggcgtgcggccaggatgggcagctgaagggcttcgcggtgctggagtatgagacggctgagatggcggaggaggcacagcagcaggcggacggcctgtccctggggggcagccacctgcgagtctccttctgcgcccctgggccccccggccgcagtatgctggccgctctcatcgctgcccaggccacggccctcaatcgggggaagggactcctccccgagcccaacatcctgcagctgctcaacaacctgggcccatccgcgtccctccagctgctgctcaaccccctgctccatggcagtgcgggggggaagcagggcctcctgggtgcccccccagccatgccgctgctcaatgggccagccctgtccacggcgctgttgcagctcgccctgcagacccagggccagaagaagcccggcatcctgggagactcacccctgggcgccctccagcctggggcccagccagccaaccccctcctcggggagctgcctgcaggagggggcctgcccccggagctgccgccccggcgagggaagccaccacccctgctgccatccgtgcttggccctgctgggggtgaccgggaggccctgggcttgggtcccccagcggcccagctcactcctcccccagcccctgtggggctccgaggctctggcctcagaggccccctgtctcacttctattcaggctcgcccacttcctacttcaccagcggcctgcaggctggcctcaagcagagccacctcagtaaggcaatcggctcttccccgctggggtccggagaagggctcctgggcctcagccccgggcctaatggtcacagccacctgctgaaggtacgggcagggggtggggacatgcagggctgggaagccccggccccccagcggcccctgacccgccccgccctgccctctgtctccagaccccactgggcggccagaaacgcagctttgcccacctgctgccctcgcccgagcccagcccagaaggcagctatgtgggccagcactcccagggcctcggcggccactacgcggactcctacctgaagcggaagaggattttctaagtggctggcaccagagataactcaagggcctgcaccaaatcgcttttgggttttctgatgttttgttttgtgttttttttaaaccattttctctctttcggtaatagaaaaatctctgaaagactttactgaccaatcagccggagccccaggagcccaaggggtgtgggggagtctggaggcctcattatgtctctggcttgctccccacgctgaaaccctgcagccttaagagagaggggccccggcctgctctccctccctccccccatctcctcctccgctgtgcccgtctctccggagccctcctgcctcattgctcctgtaattttggcctttcgagtgccttggaggtttccctgacctcccgtgaagatacagagactgtctcctttttttttaactttgacaactgacttctgtttccttttctaagttttatttttcaaaccaccccggacagcccccagctctgattccttcaaggcccggcctgtccgggccaccattccacaccttgcggtttgaaacagctgtttttcccacatttgctgcaggcatggctgtctcctgcccctgcctgcccatctggcctataccccagccgtggggcccggggtccctgccgcagccccctccccttctgatgccttaaaagctgggccccaggccctgctggccagagccacagatgccaagctctgggagcttgactatggaccaaacagctctggcctagggattgggccaccctacccaggatctccaccctggggacagtagaaggggaaagccttcatcttggcgaaccggccccaccaccccctcctacccgggcctccgtgcagagatgggctttctctgccagtcccctgctgtctgtctgtgggagtcggacattgtgcccatctcccggagcctctgctgtcactcgcttgttgaagatgaattcttgaattctgcctgcccacccccggccagatccctggagctggcctccttccagcccagtgccagaaaccagcactccatgaagataaactctgggcccgcccaccagcaggacctgtcgacctgaggtgaccctgggccttgcccccagccaactgggccaccagcttccctcccttgactctgggggtccacatccactccaaggggactattcccccgaccccaccccagtctccccacacggacctttgctgaattaaagtttgtaagtaaatggttttaaagaaaaaaaaaaaaaaaaaaaaaaaaaaaaaaaaaaaaa

SEQ ID NO: 1871 - DNA, 1825 bp, Homo sapiens
agagtgcgaccgagatgttccactcgctggcgtccgggccgctggtgatctccggtagcactcgggccggcggacagtgagggcgcgacaacaagggaggtgtcacagttttccatttagatcaacaacttcaagttcttaccatggaaaattccgagaagactgaagtggttctccttgcttgtggttcattcaatcccatcaccaacatgcacctcaggttgtttgagctggccaaggactacatgaatggaacaggaaggtacacagttgtcaaaggcatcatctctcctgttggtgatgcctacaagaagaaaggactcattcctgcctatcaccgggtcatcatggcagaacttgctaccaagaattctaaatgggtggaagttgatacatgggaaagtcttcagaaggagtggaaagagactctgaaggtgctaagacaccatcaagagaaattggaggctagtgactgtgatcaccagcagaactcacctactctagaaaggcctggaaggaagaggaagtggactgaaacacaagattctagtcaaaagaaatccctagagccaaaaacaaaagctgtgccaaaggtcaagctgctgtgtggggcagatttattggagtcctttgctgttcccaatttgtggaagagtgaagacatcacccaaatcgtggccaactatgggctcatatgtgttactcgggctggaaatgatgctcagaagtttatctatgaatcggatgtgctgtggaaacaccggagcaacattcacgtggtgaatgaatggatcgctaatgacatctcatccacaaaaatccggagagccctcagaaggggccagagcattcgctacttggtaccagatcttgtccaagaatacattgaaaagcataatttgtacagctctgagagtgaagacaggaatgctggggtcatcctggcccctttgcagagaaacactgcagaagctaagacataggaattctacagcatgatatttcagacttcccatttggggatctgaaacaatctgggagttaataactggggaaagaagttgtgatctgttgcctaaactaaagcttaaaagtttagtaaaaatcgtctgggcacagtggctcacgcctgtagtcccagctacttgggaggctgaggcaggagaatcacttgaccccaggtggtggaggttgcagtgagccaagattgcaccattgcactccagcctggcgacagagcaagactctgtctcaaaaaaaaaaaaaaaatttagtaaaaatcaatggtaagctaaaataagtttttgtttgtttatttgtttttgagatggagtctctactaaaaatacaaaaaattagccaggcatggtgccgcataactataatcccagctacttgggaggctgaggcaggagaatcgcttgaacccgggaggcacaggttccagtgggccaaggttgtgccactgcactccagcctgggcaaaaaagcaaaactccatctcaaagagaaaaaaaaaaaagaccgggtgtggtggctcacacctgtaatcccagcactttgggaggcctaagtgggtggatcacgtgaggtcaagagttcaagaccagcctggccaatatggtgaaaccccatctctactaagaatacaaaaaattagctgagcatggtggtgggctcctgtagtcccagctacttgggaggctgaggcaggagaatcgcttgaacctgggaggcagaggttgcagtaagccaagatcgtgccattgcactccagcctgggtgacagagcgagactccatctcaaaaaaaaaaaaaaaaaaaa

SEQ ID NO: 1872 - DNA, 574 bp, Homo sapiens
gacggttaccccggctctccgcccctccttctcgcgcgctcgagggaccatggccgatcctcgcgtgagacagatcaagatcaagaccggcgtggtgaagcggttggtcaaagaaaaagtgatgtatgaaaaagaggcaaaacaacaagaagaaaagattgaaaaaatgagagctgaagacggtgaaaattatgacattaaaaagcaggcagagatcctacaagaatccaggatgatgatcccagattgccagcgcaggttggaagccgcatatttggatcttcaacggatactagaaaatgaaaaagacttggaagaagctgaggaatataaagaagcacgtttagtactggattcagtgaagttagaagcctgaaacttttctcgtatggggtggtttttgcattaaatcctggggtccattttacaatccattatttttgaccactgctatgtgttcaagtagtatgagaatgtgattgtttttatctggttacatatatatttctttgtctaatttaatatgtcaaataaatgagttcatctaaaaaaaaaaaaaaaaaaaaaaaaaaaa

SEQ ID NO: 1873 - DNA, 2083 bp, Homo sapiens
ccggcgggccgcgccgcgagccagtatctcagagagcgcggggtccggacagccgcgcgctgagggtctcggggcgggcgccgcgggacctctccgggccatggcagcccctgtcaaagggaacaggaagcagtccacggagggtgacgccctagacccacctgcatcccccaaacctgctggcaagcagaacggaatccagaaccccatctcgctggagttaacctgtggaagatctacaaagcagtggagaagctgggggcctatgagctggtgaccgggcgccgcctctggaagaacgtgtacgacgagctggggggcagcccaggcagcaccagcgcggccacgtgcacgcgccgccactacgagaggctggtcctgccatacgtgcggcacctgaagggggaggatgacaagccgctgcccacctccaagcccaggaaacagtacaagatggctaaggagaacaggggggatgatggggccaccgagaggccgaagaaggccaaggaggagcggcgcatggaccagatgatgccaggaaagaccaaagcagatgctgctgacccagcaccacttcccagccaggagccccccaggaacagcacagaacagcagggcctggcctctgggtcttctgtgtcctttgtgggtgccagcggctgtcctgaggcctacaagcggctcctatccagcttctactgcaaggggacacacggcatcatgtcaccactggccaaaaagaagctcctggcccaggtgagcaaggtggaggccttgcagtgccaggaggagggctgccgccatggggcagagccccaggcgtccccagctgttcacctcccagagagtccccagagccccaaagggctgactgagaactccaggcaccggctgacccctcaggagggattgcaggccccaggtggcagcctcagagaggaggcgcaggcaggcccctgcccggcagcccccatcttcaagggctgcttctacacccaccccaccgaggtgctgaagcctgtcagccagcaccccagggacttcttctctagacttaaagatggggtgctattggggcctcctggcaaagaggggctgtcagtgaaagagccccagctggtgtggggcggagacgctaaccgcccttctgcgttccataaaggtggctccagaaagggcatcctctaccccaagcccaaagcctgctgggtgtcccccatggccaaggtcccagccgagagccccacgctcccgcccaccttccccagtagcccaggcctgggcagcaagcgcagcctggaggaagagggtgctgcccacagtgggaagagactgcgggccgtgtctccctttcttaaggaggcggatgccaagaagtgtggggccaaacctgcagggtccggcctggtctcctgccttctgggcccagccctggggcctgtgcccccagaggcctacaggggcaccatgctgcactgcccgctgaacttcactggcaccccgggccccttgaagggccaggctgcactccccttcagccccctggtcatcccggccttcccggcccacttcctggccaccgcaggcccctcgcccatggccgctggcctgatgcacttccccccaacgtccttcgacagtgccctccgccacagactttgcccggcctcatctgcctggcacgcaccaccagtcacaacctatgcagcgccccacttcttccacctcaacaccaagctgtaggccagcccatggtgttgtgtacactgtggagtcgacaggggcctacaacaggcaggtactgctgccagggggctctgaactagtgcctgctacccaggacacccgggccatgcccctggctgggcagcctggcacaagtgaagaagaaggcagtgggaaaactgggtttatctcaaggcagcagcctgagcccaggagcagaggacccagttgttataaggcgctgggagaggatgggcagctcccactgccccagagcggagctcgaagcacccaggttgcccacggaaaatccaataaaaagacaccagtgtgaaaaaaaaaaaaaaaaaaaaaa

SEQ ID NO: 1874 - DNA, 2223 bp, Homo sapiens
ccggcgggccgcgccgcgagccagtatctcagagagcgcggggtccggacagccgcgcgctgagggtctcggggcgggcgccgcgggacctctccgggccatggcagcccctgtcaaagggaacaggaagcagtccacggagggtgacgccctagacccacctgcatcccccaaacctgctggcaagcagaacggaatccagaaccccatctcgctggaggactcccccgaggcaggcggggagcgggaggaggagcaggagcgggaggaggagcaggccttcctggtcagcctctacaagttcatgaaggagcgacacacgcccatcgagagggtgccccatctcggcttcaagcagattaacctgtggaagatctacaaagcagtggagaagctgggggcctatgagctggtgaccgggcgccgcctctggaagaacgtgtacgacgagctggggggcagcccaggcagcaccagcgcggccacgtgcacgcgccgccactacgagaggctggtcctgccatacgtgcggcacctgaagggggaggatgacaagccgctgcccacctccaagcccaggaaacagtacaagatggctaaggagaacaggggggatgatggggccaccgagaggccgaagaaggccaaggaggagcggcgcatggaccagatgatgccaggaaagaccaaagcagatgctgctgacccagcaccacttcccagccaggagccccccaggaacagcacagaacagcagggcctggcctctgggtcttctgtgtcctttgtgggtgccagcggctgtcctgaggcctacaagcggctcctatccagcttctactgcaaggggacacacggcatcatgtcaccactggccaaaaagaagctcctggcccaggtgagcaaggtggaggccttgcagtgccaggaggagggctgccgccatggggcagagccccaggcgtccccagctgttcacctcccagagagtccccagagccccaaagggctgactgagaactccaggcaccggctgacccctcaggagggattgcaggccccaggtggcagcctcagagaggaggcgcaggcaggcccctgcccggcagcccccatcttcaagggctgcttctacacccaccccaccgaggtgctgaagcctgtcagccagcaccccagggacttcttctctagacttaaagatggggtgctattggggcctcctggcaaagaggggctgtcagtgaaagagccccagctggtgtggggcggagacgctaaccgcccttctgcgttccataaaggtggctccagaaagggcatcctctaccccaagcccaaagcctgctgggtgtcccccatggccaaggtcccagccgagagccccacgctcccgcccaccttccccagtagcccaggcctgggcagcaagcgcagcctggaggaagagggtgctgcccacagtgggaagagactgcgggccgtgtctccctttcttaaggaggcggatgccaagaagtgtggggccaaacctgcagggtccggcctggtctcctgccttctgggcccagccctggggcctgtgcccccagaggcctacaggggcaccatgctgcactgcccgctgaacttcactggcaccccgggccccttgaagggccaggctgcactccccttcagccccctggtcatcccggccttcccggcccacttcctggccaccgcaggcccctcgcccatggccgctggcctgatgcacttccccccaacgtccttcgacagtgccctccgccacagactttgcccggcctcatctgcctggcacgcaccaccagtcacaacctatgcagcgccccacttcttccacctcaacaccaagctgtaggccagcccatggtgttgtgtacactgtggagtcgacaggggcctacaacaggcaggtactgctgccagggggctctgaactagtgcctgctacccaggacacccgggccatgcccctggctgggcagcctggcacaagtgaagaagaaggcagtgggaaaactgggtttatctcaaggcagcagcctgagcccaggagcagaggacccagttgttataaggcgctgggagaggatgggcagctcccactgccccagagcggagctcgaagcacccaggttgcccacggaaaatccaataaaaagacaccagtgtgaatccaaaaaaaaaaaaaaaaaa

SEQ ID NO: 1875 - DNA, 1614 bp, Homo sapiens
agtgctccgcgcgctcttgacgtccggagcccctggagtaggcgcttccggccattcatactgcagtcggtcagtgttcggttgaaggattctgtgtgctgtcggacccagagggtgacggcgccgctaggatgaagctcgtgagatttttgatgaaattgagtcatgaaactgtaaccattgaattgaagaacggaacacaggtccatggaacaatcacaggtgtggatgtcagcatgaatacacatcttaaagctgtgaaaatgaccctgaagaacagagaacctgtacagctggaaacgctgagtattcgaggaaataacattcggtattttattctaccagacagtttacctctggatacactacttgtggatgttgaacctaaggtgaaatctaagaaaagggaagctgttgcaggaagaggcagaggaagaggaagaggaagaggacgtggccgtggcagaggaagagggggtcctaggcgataatgtctctcaagatttcaaagtcatatgagatttgggatattttttgtacaggttgtgtttgtttatgtcagtttttaataaacataaatgtgggacagagctgtctatttagtatatcaaagttttagtagtttcctccacattcacgaaattaccacagtgagagctaagcatttctactgggcagtttcatttttagttgatcaggttttaagtttttgaactaaaatttttctttttctttttatgatgaataaggttaaaataaaagccttagacaaattaaatttggcagagtttaattgagcaaaggacaattcacaaatcaggtagcccctgaaccataataggctcagaggcttcagcccagctgcatagttgaagatttatggacagaaggaaagtgatgtatggaaaatggaagtgagatacagcaacagccggattagttacagttcagcgtttgccttatttgaatatggtttgaacagttcgctgtctttggttggctgaaacttagtgattgccacaagagtagggtaccgtctgtttacacgtccagttaggctacagttctatgtactgagaaacctttaagctgaacttgagatatgtaaagagactttaggctaaacttaacaatatatataggatatatacccttctacttcacatgcactgaatatgcattttattgctttactcttcattctgtggcacctacccacaggggaagtaagaagtttgttttggtatttcggaaactaaagtccttatgggatggggtctagaattgattctcctttcctgagttttactccacggagtcttaggtacctggtaaaaagttgtcttctaaattaagggtcattgctttgttgtctagctgctaatgtcttacttttgtttcttttgctttttaatcagttcttaataggatatagttttatgttttccaagttataacttggagttaatggtcactagattatcagttatgagcagtgttaaaatctcctattaatgtgtaatgtacctgtcagtgcctcctttattaaggggttctttgagaataaaagagaaaagacctactttatttgacagcaaaaaaaaaaaggaattc

SEQ ID NO: 1876 - DNA, 5627 bp, Homo sapiens
ccccagcagccgccccagccgcagccgcagccgcccggctcgtctgccaccaccccgggcggcggcagcggcggctcgctcagcgccatgccgccgcccagccccgactcagagaacggcttctaccccgggctgccgtcgtccatgaacccggccttcttccctagcttctcgcccgtgtcgccgcacggctgcactgggctcagcgttccgacgagcggcggcggcggcggcggcttcggcggccccttctcggctaccgctgtgccccctccgccgccgcccgccatgaatatacctcaacagcagcccccgccgcccgcggcgccgcagcagccgcagagccggaggtcgcccgtcagcccgcagctccagcagcagcaccaggcggcggccgccgccttcctgcagcagaggaactcctataaccaccaccagcctcttctgaaacagtctccctggagcaaccatcagagcagtggctggggcactggaagtatgtcctggggagcaatgcatggcagagatcatcgtagaaccggaaacatgggaatcccaggaactatgaatcagatatctccattgaagaaaccgttttctggtaatgtcatagcaccaccgaaatttactcgctcaactccatcactgactccaaaatcttggattgaagataatgtgttcagaacagacaacaatagtaatacactcttacccttacaggtgagatctagtttgcagttgccagcttggggctcagattcactccaagatagttggtgcactgcagccggaacatccagaatagaccaggatcgaagtagaatgtatgacagtttgaatatgcactctttggaaaattcccttatcgatattatgagagcagagcatgatcctcttaagggtcgattgagctatccacatccaggaactgacaatctgttgatgttaaatggtcgttcttccctctttccaatagatgatggcttgcttgatgatggtcacagtgatcaagttggagttttaaattcacccacctgttattcagctcaccaaaatggagagcgaatagaacgcttctctcgaaaagtttttgttggtggtcttcctccagatattgatgaagatgaaataactgctagcttcagaagatttgggcctttggtagtagattggcctcataaagcagaaagcaagtcctattttccaccaaaaggctatgcatttcttctctttcaagaagagagctcagttcaggcactcattgatgcttgtattgaagaagatggaaaactctatctgtgtgtttctagccctactatcaaggacaaaccagttcaaatacgtccttggaatttaagtgatagtgattttgtaatggatggttctcagcctttggatccccgaaaaacaatttttgttggaggtgttcctaggccattaagggctgtggaacttgctatgatcatggaccggctgtatggtggagtttgttatgcaggaattgatacagatcctgagctaaaatacccaaaaggtgctgggcgagttgctttctccaatcagcagagctatattgctgccattagtgctcggtttgttcagcttcagcatggtgatattgataaacgtgtggaggtaaagccatatgtgctagatgaccagatgtgtgatgaatgccagggcgcacgctgtggtggaaaatttgctccctttttttgtgccaatgtcacttgcctgcagtattactgtgagttttgttgggcaaatatccactctcgtgctggacgtgagttccataagccattggtaaaggaaggtgctgatcgcccacgtcagatccacttccgctggaactaagaatagcaaactggcctctgtttaacaaggaaagaaagggtgcatgtggcttactgtgtctgaagatactgacatgcagaagaaataagtgcattcttctgcttttcaccccagctatcaatacatgcatctttatcagcagccaaaacactacaagcctcttgtttttcaccaaaaccctacatctcaggcttactaatttttgtgatattttcatgttcaaataaaatgtttttttgtattttctccaagttatttttatatgtaaagttaaaattagatatgagaatgttttgcgtaggggcaacacagtctgctgctatatagtgggggaagcgtgcacttatttctaaacatgggtttttaacttcaagatctgccccagtaatttaccaaaggtagcaaaataatagtgaagatggaatatgtctgctacaaatgcttatttttattgttgctattttcagtgtatacataaactaaaaattagggttgatttttttgctctccattttgacttgcaagaaataatacctcaagataatctgatttattagctatttttaaacatttttaatcacaagctgtattagctttgctgctatataggtgttatgtgtaaatgccacctattaatacgggactgaaaacgttagagacacactgcattgcagataaaatgcaggcagcacaatatggcctaaactgccatagttttagaatgtgaaaaaaatgcatgtttacttacctgtatacaccatatgcatgcactagaattattaactaacgaggtgaggtattgcaaatgttcaaaaaagctctcttgaatctaggtagcatgaacaaattataaaatttgtttaaaaaagcaaacttgcatgcattattgtgacttcaagtttaaaaaatcgtcttacatgtgtacaatatgcaaattagttttagattagagagtgcagccattttgtgatctggtcagtagtggaattcgattttatgcagactggatgtaatatttgtaatccctgtgcaattttgtgacgtgcggttctaattcatgtgcagtgatatagtatagataaaagaatgagtaaaagaaaatacaagaattctaaagaaagttggttttagcccctttgatagtccatggttaagacatcctttataaaccaaagatggccagcacactgctaaccagtcaccaaatgtaagacccataagaaacccatatttaaaaatctgaattttttagaagaatgcaaaactttagtaaaccctaagtaaagtcaaaatggagaaggggaaatatacagatggctagttgcataaaattaaattttacctttataagacaatggtgaaatctggcttgaacttgcttatgtgtttaacctataaatattggggtcttctgtctaaactggggtcactgttgcatggaacattgttcttaatagttgagaattgcttttttgaaaattttcatgaaggaattttggtaatgactttgcttgcaggttttttggggtgttttgagaaagtggcatggaaacatgcagtagttaatgagtttctcttggtactgaacactattagaatatcattagtgatattttttctctttagagcatttttaatgcaactagcccctatattttaatgtaagagttactctgcaatctaagcaaagcacccaacaatggtaaatgttttttaaaaatgcagaactaagatttttgactctaaagagagaaaattacaagggtgttgccttatagcaaacccttgggacaatccttcatgtgagcaaagtgttgatcttaatattggttgtctgtggtgtgcttttttgtactgtaaaaatatgtggttcatgtctaactctgctgttttattgtggttgtggttcaagtttttaatgtttaaagttgatgctgttttcagaagagctttttactaatttatttgtcagtgttccctatttgttacttaaccatgatcctccagattttttggagtattcttttctaaccttaaccctgccaaaccttgatccattttgacatttgttatgcactatttttatatctctgtgagagatttttccaacagtcagctattttatggcacactttttttgactgatgacatctcctttgctatacctcaatttttggaatttagagaagaaatcagtagttttgcaatgttaattatttagatatttaatttcgcagatttttaaactttattttcataatttctgcttaatgtttaaaattgaagagccttttcatgtattaaataatgaacacaaattatataattaaaataattggagatgttgaaaatcattttcccttcttaaacagaaataaatatttggaatgaaggggaatgtactagaacaccctttttgccacgggtaaaaataacagaaatgtatggtttgttttaccttcatttctgtacaagtaaagcttattagtctaatgttttgttcctttcccacctcacccctacctcttttgttttgttttgtttttgccctttatgtactacattcttattttctaacttttaaacactgtattggaggtttttttttaatttacagatcatatttattttactatttttgtagaaaattattaattttgattgtatttttgtattttaaaagcttcttcacttgtgttccctaaatattcatattgctgcccaaaagtatgactgtggaggaaaaaaaaatactttaaaaatccacactttttgttaagaaggaaacatttagcatttatatatttgtgtatggaaaacacttgatattttatccctgttgcatctggctgcacagagcctctcctcaaagatgctacaaaacttgaatataacacattttggaaggctgactaacctcgattctgtgttgtgatgtgcaatactgtttctaatgtttgtataaaaaaaaacagtgtaaacctttttaatgcaaatttatttttttcattgcatattttgcagattttatccacagtgtcattttttactgtcagaaaagataccccttttgtcattgcaactattttttaaatccagaaatctttgtactgatgtaaatgattgtagttattttggatagtgttttgctaacaaaaggagagacttttttcatgcatatttctattttgtttttttgggttttattttattttaatagtagtaaaatacttggaataatttttcatattcttgtcattaatattattttgtatttttatgtggaaatatataattttatgacactaattgctaaagtttattttatgttgaattatttttggagctgaaatctttgtaatattaaagcaactagtttctaattcccagtttctgtatagaatcgcacaagtggtttatggagtgtttggattgtaattataaatggttctttgatatgcaaattaatattttcagttgattttattttatattcctaatggggtgttaaagccgttttttatttttttctaaataaaaagagaacccatgcttttatggacactaggtaaacaccttcagcttaaatttttcgttaaatattttagtttattttattgttatcttccaggtgtctaaatctccagtctgtctgttgtactggtaatttaactctgtaatggaatagtttgctgccaactatttatattaagtaatttttaaatatttgtaatattgttgactgactaataaactattaagttattggc

SEQ ID NO: 1877 - DNA, 5537 bp, Homo sapiens
ccccagcagccgccccagccgcagccgcagccgcccggctcgtctgccaccaccccgggcggcggcagcggcggctcgctcagcgccatgccgccgcccagccccgactcagagaacggcttctaccccgggctgccgtcgtccatgaacccggccttcttccctagcttctcgcccgtgtcgccgcacggctgcactgggctcagcgttccgacgagcggcggcggcggcggcggcttcggcggccccttctcggctaccgctgtgccccctccgccgccgcccgccatgaatatacctcaacagcagcccccgccgcccgcggcgccgcagcagccgcagagccggaggtcgcccgtcagcccgcagctccagcagcagcaccaggcggcggccgccgccttcctgcagcagaggaactcctataaccaccaccagcctcttctgaaacagtctccctggagcaaccatcagagcagtggctggggcactggaagtatgtcctggggagcaatgcatggcagagatcatcgtagaaccggaaacatgggaatcccaggaactatgaatcagatatctccattgaagaaaccgttttctggtaatgtcatagcaccaccgaaatttactcgctcaactccatcactgactccaaaatcttggattgaagataatgtgttcagaacagacaacaatagtaatacactcttacccttacaggatcgaagtagaatgtatgacagtttgaatatgcactctttggaaaattcccttatcgatattatgagagcagagcatgatcctcttaagggtcgattgagctatccacatccaggaactgacaatctgttgatgttaaatggtcgttcttccctctttccaatagatgatggcttgcttgatgatggtcacagtgatcaagttggagttttaaattcacccacctgttattcagctcaccaaaatggagagcgaatagaacgcttctctcgaaaagtttttgttggtggtcttcctccagatattgatgaagatgaaataactgctagcttcagaagatttgggcctttggtagtagattggcctcataaagcagaaagcaagtcctattttccaccaaaaggctatgcatttcttctctttcaagaagagagctcagttcaggcactcattgatgcttgtattgaagaagatggaaaactctatctgtgtgtttctagccctactatcaaggacaaaccagttcaaatacgtccttggaatttaagtgatagtgattttgtaatggatggttctcagcctttggatccccgaaaaacaatttttgttggaggtgttcctaggccattaagggctgtggaacttgctatgatcatggaccggctgtatggtggagtttgttatgcaggaattgatacagatcctgagctaaaatacccaaaaggtgctgggcgagttgctttctccaatcagcagagctatattgctgccattagtgctcggtttgttcagcttcagcatggtgatattgataaacgtgtggaggtaaagccatatgtgctagatgaccagatgtgtgatgaatgccagggcgcacgctgtggtggaaaatttgctccctttttttgtgccaatgtcacttgcctgcagtattactgtgagttttgttgggcaaatatccactctcgtgctggacgtgagttccataagccattggtaaaggaaggtgctgatcgcccacgtcagatccacttccgctggaactaagaatagcaaactggcctctgtttaacaaggaaagaaagggtgcatgtggcttactgtgtctgaagatactgacatgcagaagaaataagtgcattcttctgcttttcaccccagctatcaatacatgcatctttatcagcagccaaaacactacaagcctcttgtttttcaccaaaaccctacatctcaggcttactaatttttgtgatattttcatgttcaaataaaatgtttttttgtattttctccaagttatttttatatgtaaagttaaaattagatatgagaatgttttgcgtaggggcaacacagtctgctgctatatagtgggggaagcgtgcacttatttctaaacatgggtttttaacttcaagatctgccccagtaatttaccaaaggtagcaaaataatagtgaagatggaatatgtctgctacaaatgcttatttttattgttgctattttcagtgtatacataaactaaaaattagggttgatttttttgctctccattttgacttgcaagaaataatacctcaagataatctgatttattagctatttttaaacatttttaatcacaagctgtattagctttgctgctatataggtgttatgtgtaaatgccacctattaatacgggactgaaaacgttagagacacactgcattgcagataaaatgcaggcagcacaatatggcctaaactgccatagttttagaatgtgaaaaaaatgcatgtttacttacctgtatacaccatatgcatgcactagaattattaactaacgaggtgaggtattgcaaatgttcaaaaaagctctcttgaatctaggtagcatgaacaaattataaaatttgtttaaaaaagcaaacttgcatgcattattgtgacttcaagtttaaaaaatcgtcttacatgtgtacaatatgcaaattagttttagattagagagtgcagccattttgtgatctggtcagtagtggaattcgattttatgcagactggatgtaatatttgtaatccctgtgcaattttgtgacgtgcggttctaattcatgtgcagtgatatagtatagataaaagaatgagtaaaagaaaatacaagaattctaaagaaagttggttttagcccctttgatagtccatggttaagacatcctttataaaccaaagatggccagcacactgctaaccagtcaccaaatgtaagacccataagaaacccatatttaaaaatctgaattttttagaagaatgcaaaactttagtaaaccctaagtaaagtcaaaatggagaaggggaaatatacagatggctagttgcataaaattaaattttacctttataagacaatggtgaaatctggcttgaacttgcttatgtgtttaacctataaatattggggtcttctgtctaaactggggtcactgttgcatggaacattgttcttaatagttgagaattgcttttttgaaaattttcatgaaggaattttggtaatgactttgcttgcaggttttttggggtgttttgagaaagtggcatggaaacatgcagtagttaatgagtttctcttggtactgaacactattagaatatcattagtgatattttttctctttagagcatttttaatgcaactagcccctatattttaatgtaagagttactctgcaatctaagcaaagcacccaacaatggtaaatgttttttaaaaatgcagaactaagatttttgactctaaagagagaaaattacaagggtgttgccttatagcaaacccttgggacaatccttcatgtgagcaaagtgttgatcttaatattggttgtctgtggtgtgcttttttgtactgtaaaaatatgtggttcatgtctaactctgctgttttattgtggttgtggttcaagtttttaatgtttaaagttgatgctgttttcagaagagctttttactaatttatttgtcagtgttccctatttgttacttaaccatgatcctccagattttttggagtattcttttctaaccttaaccctgccaaaccttgatccattttgacatttgttatgcactatttttatatctctgtgagagatttttccaacagtcagctattttatggcacactttttttgactgatgacatctcctttgctatacctcaatttttggaatttagagaagaaatcagtagttttgcaatgttaattatttagatatttaatttcgcagatttttaaactttattttcataatttctgcttaatgtttaaaattgaagagccttttcatgtattaaataatgaacacaaattatataattaaaataattggagatgttgaaaatcattttcccttcttaaacagaaataaatatttggaatgaaggggaatgtactagaacaccctttttgccacgggtaaaaataacagaaatgtatggtttgttttaccttcatttctgtacaagtaaagcttattagtctaatgttttgttcctttcccacctcacccctacctcttttgttttgttttgtttttgccctttatgtactacattcttattttctaacttttaaacactgtattggaggtttttttttaatttacagatcatatttattttactatttttgtagaaaattattaattttgattgtatttttgtattttaaaagcttcttcacttgtgttccctaaatattcatattgctgcccaaaagtatgactgtggaggaaaaaaaaatactttaaaaatccacactttttgttaagaaggaaacatttagcatttatatatttgtgtatggaaaacacttgatattttatccctgttgcatctggctgcacagagcctctcctcaaagatgctacaaaacttgaatataacacattttggaaggctgactaacctcgattctgtgttgtgatgtgcaatactgtttctaatgtttgtataaaaaaaaacagtgtaaacctttttaatgcaaatttatttttttcattgcatattttgcagattttatccacagtgtcattttttactgtcagaaaagataccccttttgtcattgcaactattttttaaatccagaaatctttgtactgatgtaaatgattgtagttattttggatagtgttttgctaacaaaaggagagacttttttcatgcatatttctattttgtttttttgggttttattttattttaatagtagtaaaatacttggaataatttttcatattcttgtcattaatattattttgtatttttatgtggaaatatataattttatgacactaattgctaaagtttattttatgttgaattatttttggagctgaaatctttgtaatattaaagcaactagtttctaattcccagtttctgtatagaatcgcacaagtggtttatggagtgtttggattgtaattataaatggttctttgatatgcaaattaatattttcagttgattttattttatattcctaatggggtgttaaagccgttttttatttttttctaaataaaaagagaacccatgcttttatggacactaggtaaacaccttcagcttaaatttttcgttaaatattttagtttattttattgttatcttccaggtgtctaaatctccagtctgtctgttgtactggtaatttaactctgtaatggaatagtttgctgccaactatttatattaagtaatttttaaatatttgtaatattgttgactgactaataaactattaagttattggc

SEQ ID NO: 1878 - DNA, 3040 bp, Homo sapiens
aaatcctcctcctccgccatcatccgccgcggtgcggagagcaggtggtgctggaagcgcgtgaggccgggagctcgagagagctaacagactagccggctggacatctggaccgctggatccggaggtggcgaccccggcctgacccggaccctaaatccgtccccgccccagagggcggaggcgcgcgctcgattccccccacgcggcggcgccgcctgtttacgtctgcagatctccaggggagcccaccagcctagtcaacatggcctcggaagacattgccaagctggcagagacacttgccaagactcaggtggccgggggacagctgagtttcaaaggcaagagcctcaaactcaacactgcagaagatgctaaagatgtgattaaagagattgaagactttgacagcttggaggctctgcgtctggaaggcaacacagtgggcgtggaagcagccagggtcatcgccaaggccttagagaagaagtcggagttgaagcgctgccactggagtgacatgttcacgggaaggctgcggaccgagatcccaccagccctgatctcactaggggaaggactcatcacagctggggctcagctggtggagctggacttaagcgacaacgcattcgggcccgacggtgtgcaaggcttcgaggccctgctcaagagctcagcctgcttcaccctgcaggaactcaagctcaacaactgtggcatgggcattggcggcggcaagatcctggctgcagctctgaccgaatgtcaccggaaatccagtgcccaaggcaagcctctggccctgaaggtctttgtggctggcagaaaccgtctggagaatgatggcgccactgccttggcagaagcttttagggtcatcgggaccctggaggaggtccacatgccacagaatgggatcaaccaccctggcatcactgccctggcccaggctttcgctgtcaaccccctgctgcgggtcatcaacctgaatgacaacaccttcactgagaagggcgccgtggccatggccgagaccttgaagaccttgcggcaggtggaggtgattaattttggggactgcctggtgcgctccaagggtgcagttgccattgcagatgccatccgcggcggcctgcccaagctaaaggagctgaacttgtcattctgtgaaatcaagagggatgctgccctggctgttgctgaggccatggcagacaaagctgagctggagaagctggacctgaatggcaacaccctgggagaagaaggctgtgaacagcttcaggaggtgctggagggcttcaacatggccaaggtgctggcgtccctcagtgatgacgaggacgaggaggaggaggaggaaggagaagaggaagaagaggaagcagaagaagaggaggaggaagatgaggaagaggaggaagaagaggaggaggaggaggaagaagagcctcagcagcgagggcagggagagaagtcagccacgccctcacggaagattctggaccctaacactggggagccagctcccgtgctgtcctccccacctcctgcagacgtctccaccttcctggcttttccctctccagagaagctgctgcgcctagggcccaagagctccgtgctgatagcccagcagactgacacgtctgaccccgagaaggtggtctctgccttcctaaaggtgtcatctgtgttcaaggacgaagctactgtgaggatggcagtgcaggatgcagtagatgccctgatgcagaaggctttcaactcctcgtccttcaactccaacaccttcctcaccaggctgctcgtgcacatgggtctgctcaagagtgaagacaaggtcaaggccattgccaacctgtacggccccctgatggcgctgaaccacatggtgcagcaggactatttccccaaggcccttgcacccctgctgctggcgttcgtgaccaagcccaacagcgccctggaatcctgctccttcgcccgccacagtctgctgcagacgctgtacaaggtctagactcaaagcctctcccatcccttggcctggaccagtgagctggggagggactcggatgaactgaggcgcagcctacgccattgccttggacaggactctggccacaggcagggcgggtctgtgtcccatgtgtcctgtcagtcccctgagtatgtgtgtgggtgtggcgcatgtgcaggtctgtgcctcctgtcgggatttgggttttaacgtcttctgctggcccagccctgctctgttgtggggagttggcccccaggggaaagggctgtgagctgctccgccattaaactcacctccacctgagggcgctctgctgatctccgcctgggccctgatggccgtccccacccacctgccttccggcccggctccctggcggagccagaacccagggagttgcccgcgtgctgtccttcccctctgtgttgtgattgggttgtttcctgccctgcctggggctgcttctcgtcaccaagccctggtcctgcggcagctgtcacccctaccatccataccactgtgctgaccgctcagcctgaagagcagagaatgccatgggtgggactgtgggggtcggatcgtggggttgttggcagagggcaaccctgggccccacaccgtgtggacaggcagacaccagattgtccaggagcaggagctgctgggactgcgctggccccggacctagtgggccttctcctggctgctgagatgtcgtctgtgactggcctggctggagggggagtgttgacaacccaaagctgttctccagtctggggagggagaggcagggtccccaatgtccgagctgcatctggacgctgctcttaaaggacctcctggggcaggggagcggtagggtctggactgggcagatgctgtatgacctccctgagcacccgtgactgccccatgctttcccctttgtgctctgtgtgtgtctgggctgtgcccgggggcttcacaaataaagtcgtgtggcagcttcaaaaaaaaaaaaaaaaaaaa

SEQ ID NO: 1879 - DNA, 4267 bp, Homo sapiens
attcgcctctgggaggtttaggaagcggctccgggtcggtggccccaggacagggaagagcgggcgctatggggagccggacgccagagtcccctctccacgccgtgcagctgcgctggggcccccggcgccgacccccgctgctgccgctgctgttgctgctgctgccgccgccacccagggtcgggggcttcaacttagacgcggaggccccagcagtactctcggggcccccgggctccttcttcggattctcagtggagttttaccggccgggaacagacggggtcagtgtgctggtgggagcacccaaggctaataccagccagccaggagtgctgcagggtggtgctgtctacctctgtccttggggtgccagccccacacagtgcacccccattgaatttgacagcaaaggctctcggctcctggagtcctcactgtccagctcagagggagaggagcctgtggagtacaagtccttgcagtggttcggggcaacagttcgagcccatggctcctccatcttggcatgcgctccactgtacagctggcgcacagagaaggagccactgagcgaccccgtgggcacctgctacctctccacagataacttcacccgaattctggagtatgcaccctgccgctcagatttcagctgggcagcaggacagggttactgccaaggaggcttcagtgccgagttcaccaagactggccgtgtggttttaggtggaccaggaagctatttctggcaaggccagatcctgtctgccactcaggagcagattgcagaatcttattaccccgagtacctgatcaacctggttcaggggcagctgcagactcgccaggccagttccatctatgatgacagctacctaggatactctgtggctgttggtgaattcagtggtgatgacacagaagactttgttgctggtgtgcccaaagggaacctcacttacggctatgtcaccatccttaatggctcagacattcgatccctctacaacttctcaggggaacagatggcctcctactttggctatgcagtggccgccacagacgtcaatggggacgggctggatgacttgctggtgggggcacccctgctcatggatcggacccctgacgggcggcctcaggaggtgggcagggtctacgtctacctgcagcacccagccggcatagagcccacgcccacccttaccctcactggccatgatgagtttggccgatttggcagctccttgacccccctgggggacctggaccaggatggctacaatgatgtggccatcggggctccctttggtggggagacccagcagggagtagtgtttgtatttcctgggggcccaggagggctgggctctaagccttcccaggttctgcagcccctgtgggcagccagccacaccccagacttctttggctctgcccttcgaggaggccgagacctggatggcaatggatatcctgatctgattgtggggtcctttggtgtggacaaggctgtggtatacaggggccgccccatcgtgtccgctagtgcctccctcaccatcttccccgccatgttcaacccagaggagcggagctgcagcttagaggggaaccctgtggcctgcatcaaccttagcttctgcctcaatgcttctggaaaacacgttgctgactccattggtttcacagtggaacttcagctggactggcagaagcagaagggaggggtacggcgggcactgttcctggcctccaggcaggcaaccctgacccagaccctgctcatccagaatggggctcgagaggattgcagagagatgaagatctacctcaggaacgagtcagaatttcgagacaaactctcgccgattcacatcgctctcaacttctccttggacccccaagccccagtggacagccacggcctcaggccagccctacattatcagagcaagagccggatagaggacaaggctcagatcttgctggactgtggagaagacaacatctgtgtgcctgacctgcagctggaagtgtttggggagcagaaccatgtgtacctgggtgacaagaatgccctgaacctcactttccatgcccagaatgtgggtgagggtggcgcctatgaggctgagcttcgggtcaccgcccctccagaggctgagtactcaggactcgtcagacacccagggaacttctccagcctgagctgtgactactttgccgtgaaccagagccgcctgctggtgtgtgacctgggcaaccccatgaaggcaggagccagtctgtggggtggccttcggtttacagtccctcatctccgggacactaagaaaaccatccagtttgacttccagatcctcagcaagaatctcaacaactcgcaaagcgacgtggtttcctttcggctctccgtggaggctcaggcccaggtcaccctgaacggtgtctccaagcctgaggcagtgctattcccagtaagcgactggcatccccgagaccagcctcagaaggaggaggacctgggacctgctgtccaccatgtctatgagctcatcaaccaaggccccagctccattagccagggtgtgctggaactcagctgtccccaggctctggaaggtcagcagctcctatatgtgaccagagttacgggactcaactgcaccaccaatcaccccattaacccaaagggcctggagttggatcccgagggttccctgcaccaccagcaaaaacgggaagctccaagccgcagctctgcttcctcgggacctcagatcctgaaatgcccggaggctgagtgtttcaggctgcgctgtgagctcgggcccctgcaccaacaagagagccaaagtctgcagttgcatttccgagtctgggccaagactttcttgcagcgggagcaccagccatttagcctgcagtgtgaggctgtgtacaaagccctgaagatgccctaccgaatcctgcctcggcagctgccccaaaaagagcgtcaggtggccacagctgtgcaatggaccaaggcagaaggcagctatggcgtcccactgtggatcatcatcctagccatcctgtttggcctcctgctcctaggtctactcatctacatcctctacaagcttggattcttcaaacgctccctcccatatggcaccgccatggaaaaagctcagctcaagcctccagccacctctgatgcctgagtcctcccaatttcagactcccattcctgaagaaccagtccccccaccctcattctactgaaaaggaggggtctgggtacttcttgaaggtgctgacggccagggagaagctcctctccccagcccagagacatacttgaagggccagagccaggggggtgaggagctggggatccctcccccccatgcactgtgaaggacccttgtttacacataccctcttcatggatgggggaactcagatccagggacagaggccccagcctccctgaagcctttgcattttggagagtttcctgaaacaacttggaaagataactaggaaatccattcacagttctttgggccagacatgccacaaggacttcctgtccagctccaacctgcaaagatctgtcctcagccttgccagagatccaaaagaagcccccagctaagaacctggaacttggggagttaagacctggcagctctggacagccccaccctggtgggccaacaaagaacactaactatgcatggtgccccaggaccagctcaggacagatgccacacaaggatagatgctggcccagggcccagagcccagctccaaggggaatcagaactcaaatggggccagatccagcctggggtctggagttgatctggaacccagactcagacattggcacctaatccaggcagatccaggactatatttgggcctgctccagacctgatcctggaggcccagttcaccctgatttaggagaagccaggaatttcccaggaccctgaaggggccatgatggcaacagatctggaacctcagcctggccagacacaggccctccctgttccccagagaaaggggagcccactgtcctgggcctgcagaatttgggttctgcctgccagctgcactgatgctgcccctcatctctctgcccaacccttccctcaccttggcaccagacacccaggacttatttaaactctgttgcaagtgcaataaatctgacccagtgcccccactgaccagaactagaaaaaaaaaaaaaaaaaaa

SEQ ID NO: 1880 - DNA, 2006 bp, Homo sapiens
cgcggccggagctgtgggctggcagccatgggtgccaggcagtgctgagagcagtggggcatggctgcagccctgcaggtcctgccccgcttggcccgagcccccttgcatccactcctctggcggggctcagtggcccgtctggccagcagcatggccttggcagagcaggccaggcagctgtttgagagtgctgtaggtgcagtgctgccgggccccatgctgcaccgggcactatccttggaccctggtggcagacagctgaaggtgcgggaccggaactttcagctgaggcaaaacctctacctggtgggctttggcaaggctgtgctgggtatggcagctgcagctgaggaactactgggccagcatcttgtgcagggcgtgatcagcgttcccaaggggatccgtgctgccatggagcgtgccggcaagcaggagatgctgctgaagccacatagccgtgtccaggtattcgagggtgcggaggacaacctcccggaccgcgatgcgctgcgggctgcactggccatccagcaactggctgagggactcacagctgatgacctgctgctcgtgctgatctcaggtgggggttcagctctgctgcctgcccccatcccacctgtcacactggaggagaagcagacactcactagactgctggcagcccgtggagccaccatccaggagttgaacaccattcggaaggccctgtcccagctcaagggtggggggctggctcaggccgcctaccctgcccaggtggtgagcctcatcctgtcagatgtggtgggggaccctgtggaggtgattgccagtggccccaccgtggccagttcccacaatgtgcaagattgcctgcatatcctcaatcgctacggcctccgtgcagccctgccacgttctgtgaagactgtgctgtctcgggccgactctgacccccatgggccacacacctgtggccatgtcctgaatgtgatcattggctctaatgtgctggcgctagctgaggcccagcggcaggccgaggcactgggctaccaggctgtggtgctgagtgcagccatgcaaggtgatgtaaaaagtatggcccagttctacgggctgctggcccatgtggctagaacccgcctcaccccatccatggctggggcttctgtggaggaagatgcacagctccatgagctggcagctgagcttcagatcccagacctgcagctggaggaggctctggagaccatggcatggggaaggggcccagtctgcctgctggctggtggcgagcccacagtacagctgcagggctcgggcaggggtggccggaaccaggaactggccctgcgtgttggagcagagttgagaaggtggccgctggggccgatagatgtgctgtttttgagcggtggcaccgatgggcaggatgggcccacagaggctgctggggcctgggtcacacctgagcttgccagccaggctgcagctgagggcctggacatagccaccttcctagcccacaatgactcacataccttcttctgctgcctccagggtggggcacacctgctgcacacagggatgacaggtaccaatgtcatggacacccacctcttgttcctgcggcctcggtgatggcataggtcacattttgggagttcagaggaggcctacaagggcaaggtcagatggcagagcaaggttggtcctcagggcctctctaagccttagggcccctcctctccttggccttggctgtttggttaactgtcaccttccactcagggcctctgctctatatctattcccttccagccagactggcagatgggggcttccccctacccctgaggatgaggacaagcccctcggccagttcagcgttcccgtgcttctcccttgggcagcctctctcttgagcccctcaccctgtttctttctgtgaagcgagaatgtctgaaaataaataggaccatgccatgggtaaaaaaaaaaaaaaaaaaaaaaaa

SEQ ID NO: 1881 - DNA, 6787 bp, Homo sapiens
tctcgctcaggcggaggaggagaaggaggaggaggaggacgacgttcggcctgcgcagtgagatgtttgtccgtcgccgccgccgccgccatcgcggaggagcgcgataaagggagccgagccggacgtgagggggaccccgcggagccgccgcgccagcgcagccccccagccgcatcggagtcgccagagtccgagccgccgccgccgccgccgccgcccccgccgccgccgcggctgcccaggggccggccagctccccagccctgcccgggggtcgcgccgccgccgcccccagcgtcgcccctagcctgcctgcccgccttaaatgtgacaccggcgtcgcggagcgcgacctgaagccgccgccggggaggggacgagcaccatgtcgaatctgagcaaaggcacgggcagccggaaggacaccaagatgcggatccgggcctttccgatgaccatggatgaaaaatatgtaaacagcatttgggaccttctgaaaaatgcaattcaagaaatccagcgtaagaataacagtggtcttagttttgaggagctctatagaaatgcatatacaatggttttgcataaacatggagaaaagctctacactggactaagagaagttgttaccgaacatctcataaataaggtgcgagaagatgtactaaattcattgaataacaactttcttcaaacgctaaatcaagcttggaatgatcatcaaacagctatggtgatgattagagacatactaatgtacatggaccgtgtgtatgtacaacaaaataatgtggagaacgtctacaatttgggattaattatttttcgagatcaagttgtacgttatgggtgtattagggatcatctacggcaaactctattggatatgattgcaagagagcggaaaggagaagtcgtagacagaggcgcaataagaaatgcttgccagatgttaatgattttaggtctcgaaggaagatcagtctatgaagaagattttgaggctccttttttggaaatgtctgcagaattttttcagatggaaagccagaaatttttagcagaaaatagtgcttcagtatatataaagaaagtagaagctagaattaatgaagaaatagaacgagtgatgcactgccttgacaaatcaacggaagaaccaattgtaaaggtggttgaaagggaactcatttccaagcacatgaagactatagtagaaatggagaattctgggctagtacatatgttgaaaaatggaaagacagaagaccttggttgcatgtacaagttatttagtcgtgtgccaaatggtttgaaaacaatgtgtgagtgtatgagttcctatttgagggagcaaggtaaagctcttgtttctgaagaaggagaaggaaagaatcctgttgactatatccagggcttattggatctgaagagtaggttcgatcgcttcctcctggaatcattcaacaatgaccgtctctttaaacaaactattgcgggtgactttgagtattttctcaacctcaactccaggtctcctgaatacctctcattatttattgatgataagctgaaaaagggagtcaaagggctaacagaacaagaagtagaaacaatattggataaagcaatggtcctttttaggtttatgcaagaaaaagatgtatttgaacgttattataaacaacacttggcaaggagacttctcacaaataaaagtgtttctgatgactctgaaaaaaacatgatatctaagttaaagactgaatgtggatgtcagttcacgtcaaaactggaaggaatgtttagggatatgagcatctcaaacacaacgatggatgaattcaggcaacatctacaggcaactggtgtatctttaggtggtgttgatcttacagtccgggtgctcacgacaggatattggcccactcagtcagccacaccaaagtgcaacatcccaccagcaccaagacatgcttttgagatattcagaaggttctacttagccaaacacagtggtcgacagctcacactccagcatcatatgggttctgcagatctcaatgccacattttatggaccagttaaaaaggaagatggatctgaagttggtgttggaggtgcacaagtaactggctctaatacacggaagcacatattgcaagtttccactttccagatgaccatattaatgctctttaataatagagaaaaatacacatttgaggaaattcagcaagagacagatatccctgaaagagagcttgttagagccctacagtccctcgcctgtggtaaaccaacacagcgggttcttacaaaagaacccaaatcaaaggaaatagaaaatggtcatatatttacagttaatgatcaattcacatccaaactacacagagtcaagattcaaacagttgctgccaaacaaggtgaatccgacccagagaggaaagaaacaaggcagaaagtagacgacgacagaaaacatgagatagaagctgctatagtgcggataatgaaatctagaaagaagatgcagcacaatgttctagtagcggaggtaactcagcagttgaaggcgcgattcttaccaagtccagttgttattaagaaacgtattgaaggacttattgagagagaatatttggcacgaacacctgaggatcgcaaagtatacacatatgtagcataaaatgcgttcagaaatttgatttattcttggactgtactcttcgcatggactgggaagttcttttaaatcattaaatattaagacgaccatctcttctattaaattacagtacatgttctagaccattgagatcaagcctttactccctttgagagtttccaacatcagttgattgagcttcaggctttacaacgtttatccctgtagagatcatctttacagttcctcgggaaaatgtgaatgtgctgcgttttgttttctttactgtatgaaaacaggaaaataaaagagaaatttagaaaatacagctcattacaataaaattgttggatttcatttccccaggtcttcagtgttgatgtaaatgtgttttgtagtgttgcttagcactttgcgcattgtgtaagttgggtaacaaaaatggcaaaagaaatgcagatttcccagttatcttgctctgaagacatttctttagctagtcttatttaattttaaaggtttgataaatatacaaagacccaagcatacaatttgagcatgctgtattctaccacttgcacttactcatcttctagccttatgaccaggaacctttgttttgggctcaagtacacatcctgatttggtttctccctgttgtaatttgagatttcccaaattaagtcttataatgattaggttttgttctgagttatttctagagaaagaaagtattttagtatgtgtaaattgtacaataatttttttgctgttgtactcactgctaatagtggattgtatagggtggtgtttttatttcatttattgtagacaaaaataatgaatttagtatacacatacccactaattcaagtatgtcagagcacaaagttggcagctggttatatttaattcagcccctctgaaaagcacatacagtctatactttgtttataaataccctaggtcctccctgcccctaaatatatattttggtgaagctgtggtgcactattaattttctgtttcaaaatgcaatctaaagatgcaataaatatgatgaccttgatagttttaatgaaatcttcaattcttgcagctgtgttttggaaagtgattaagcaatatttctcaaacctgatgattcttggatatttagctattgtcctccaaagagtcatcgtttcacgttttcaaacatgtgctttgtgctgaagattcttgtcagatatcctgtgcttccagagtatttttatcttcaattttatttaattttgtttcattttgttttcataagacaatgtttcagatatgtaatggggcaaaccactatagatttctgttggatagaaaaatgaaatgttactaataagtttaaattgacccttcgttgactatcagtactgttgatacatttattagaatgtatgtctcagaagatggtttctgtttaaatttatggtcaagttacaacaactgaattctaatatggattaaaaactccacataaatatttttccccatgcgtcttgggttataattttccttttagacttgcaaatatgcttttattgcaattttgtctccatctgtactgtagaattacaagccttgtgctctttatctctacattttccacttctacatgatgcaattaagatgccaatgaaaagtattgtgaacattattctcaggacacttttaccatacttgagtagtactaagtcaggtgtaacatggaaagctaagggtttcaccttctgattttgacataattggaaattttctataatggtaagatgtttataggaaagtaatggtagttcatgtttgagaatttttttattgctttcatttcccagttaaatgatatttaacacctgggaaaacaggacagctcagattgtcgagttagtaaacatgagcgatgtaaaaactttatttgaaatctcctaagtgagacattaaacattttagtgctagtttaagccattaaaagtaaagtttaagtttacgtcattgtctcaagtgtggctgtaaaaatcagatctagagtttagagacatacttgttaactttggagcacaggtttgatatttatgcttctaaatacattaaaacatttctgaattgcagttgaatggttggagattgctggcgatgtgatgctgcactgaaaaaactggtcacacaaaatgtttatatgtttgactgcataagtattattttaggtcataaaggttataacaaaatacatttaacattgctttctttttagcaagaggtcacagatgctattttttctcagtttttaatgctttaatttgaaagaaaaatgcatcctaaccattccatcctgttggtgcagagaaattttggtgatttattagaagacttttaaggagggtggatacatagtttttcaactgcaaaaatcatgtcatctcttcagtaactgttaaagtgtaattctctgccttcattatcaagtccaggacagtgtttattttgaatcgttaacattatttaaagactgaaaattcattgcaattagggaacgcacagcctcacaaaagtggttgtgattgcaaggattctttatgtcagtgaacttaaaaagggaatgggggaagagatgcatgcctttctaaaggtatgctagagtcacctgtgtagcattgtaattatgtactatcaaacccccaagatgctgatgataggccttctctgtaagaatccttctcatagtgaagcactgttgatgttttgttcaccggatatgttgggtagcagaaaaggcctagaaccagttttaagattatgcctacatctctagaagactagtacactggcatcatcttaggtttctaaatattatttaattccttaatttggaaagcagttttaatgtttacagtttaagatactcattttcagtaactagtgttaaagatttttatctttgcctgtctactgtaacttaagactttcatagaataattttttatagagtatatggtatattgtgtcaatcttggaaggaaagctgttgcatatcaattgtaggtcatgtattttactatatgttgcatagtattttgcattctgtaaatacgaatgttaaaacatttcaggtcagcaaaattagaagtcatttctagtcctcaaagcagaaataattagaaatgttaacatttaagtgcttatcatatgccagatactattctgaatattttatgtatattcattcatttagttgtcatattggctttatgtgacataactgtcattataccagtgttgtccaaggttgctagcaggaaatggcagagccaggagttggacctaggtttaatcctatccatattccatgttacaaattgacatgattttccatattaaaaaattttcatttattttgtacctcattcacatgaatagtaatgtgacaaactaaagttaatacatgaagcattgcaatatggaattttgcacatttttgttagctttacattatttgctgataccaacttttggtaggaaggaaaacagggaaggtgattgctgctattctggaatgtgtccattgaaaagaaaataggcgctttgtctcctacaatcttagagaaagttttacatacttaagtgggtaccacagataggcatgtaccttaaattcaaatctacagttttacaaaatgttttcctttgtgtgcctttcctatgtcaaattagccagaaggaagaagagacgttaagaatggcagataaatttaacaggtaatgatacagagattggccattacgctagctctcaggagaaaaacaactaggatgtcttgaaacccgtgcatttaattttagaaatggcaaatttgtaagcgtgtcatttaagtaatttgatgctcagttttagggtctaagttgacctcgagtgagccatgcaaaaatagctttaaaattatacatgagcagctcaaagtaaacgtgtattttttagtaacaatgaaattgtcaaatttcaagattttaataacaggacagttcaactaataaactttattgcatacaagatttattgcaatgtgggaaaattaaaattctcagtctcag

SEQ ID NO: 1882 - DNA, 724 bp, Homo sapiens
caaaggtcagaggtaaagaagtcatggcggcgctgtgtcggacccgtgctgtggctgccgagagccattttctgcgagtgtttctcttcttcaggccctttcggggtgtaggcactgagagtggatccgaaagtggtagttccaatgccaaggagcctaagacgcgcgcaggcggtttcgcgagcgcgttggagcggcactcggagcttctacagaaggtggagcccctacagaagggttctccaaaaaatgtggaatcctttgcatctatgctgagacattctcctcttacacagatgggacctgcaaaggataaactggtcattggacggatctttcatattgtggagaatgatctgtacatagattttggtggaaagtttcattgtgtatgtagaagaccagaagtggatggagagaaataccagaaaggaaccagggtccggttgcggctattagatcttgaacttacgtctaggttcctgggagcaacaacagatacaactgtactagaggctaatgcagttctcttgggaatccaggagagtaaagactcaagatcgaaagaagaacatcatgaaaaataaatgaactttgcttagtggattgactcctttgctgaagtcagttattcatcaagaatgcaattagactaattgtgaataaatgattgaatgaagatataataaataaaagctataattataaaaaaaaaaaaaaaaaa

SEQ ID NO: 1883 - DNA, 3466 bp, Homo sapiens
ggactgtgtgtgtctggctgtagcagacgcgaggcggcgacgaggcgccggggacccgcgcgaggggcggccgggaggcggcggcggcggccgccagaagtagcagcaggaccggcggcggcgacggcagccctgaaatgcattttcctctccagcggccatgttaaccaggaaaccttcggccgccgctcccgccgcctacccgaccgattggcggcagtaagcacacaatgaatgatcacctgcatgtcggcagccacgctcacggacagatccaggttcaacagttgtttgaggataacagtaacaagcggacagtgctcacgacacaaccaaatgggcttacaacagtgggcaaaacgggcttgccagtggtgccagagcggcagctggacagcattcatagacggcaggggagctccacctctctaaagtccatggaaggcatggggaaggtgaaagccacccccatgacacctgaacaagcaatgaagcaatacatgcaaaaactcacagccttcgaacaccatgagattttcagctaccctgaaatatatttcttgggtctaaatgctaagaagcgccagggcatgacaggtgggcccaacaatggtggctatgatgatgaccagggatcatatgtgcaggtgccccacgatcacgtggcttacaggtatgaggtcctcaaggtcattgggaaggggagctttgggcaggtggtcaaggcctacgatcacaaagtccaccagcacgtggccctaaagatggtgcggaatgagaagcgcttccaccggcaagcagcggaggagatccgaatcctggaacacctgcggaagcaggacaaggataacacaatgaatgtcatccatatgctggagaatttcaccttccgcaaccacatctgcatgacgtttgagctgctgagcatgaacctctatgagctcatcaagaagaataaattccagggcttcagtctgcctttggttcgcaagtttgcccactcgattctgcagtgcttggatgctttgcacaaaaacagaataattcactgtgaccttaagcccgagaacattttgttaaagcagcagggtagaagcggtattaaagtaattgattttggctccagttgttacgagcatcagcgtgtctacacgtacatccagtcgcgtttttaccgggctccagaagtgatccttggggccaggtatggcatgcccattgatatgtggagcctgggctgcattttagcagagctcctgacgggttaccccctcttgcctggggaagatgaaggggaccagctggcctgtatgattgaactgttgggcatgccctcacagaaactgctggatgcatccaaacgagccaaaaattttgtgagctccaagggttatccccgttactgcactgtcacgactctctcagatggctctgtggtcctaaacggaggccgttcccggagggggaaactgaggggcccaccggagagcagagagtgggggaacgcgctgaaggggtgtgatgatccccttttccttgacttcttaaaacagtgtttagagtgggatcctgcagtgcgcatgaccccaggccaggctttgcggcacccctggctgaggaggcggttgccaaagcctcccaccggggagaaaacgtcagtgaaaaggataactgagagcaccggtgctatcacatctatatccaagttacctccaccttctagctcagcttccaaactgaggactaatttggcgcagatgacagatgccaatgggaatattcagcagaggacagtgttgccaaaacttgttagctgagctcacgtcccctgatgctggtaacctgaaagatacgacattgctgagccttactgggttgaaaaggagtagctcagacctgtttttatttgctcaataactctactcatttgtatcttttcagcacttaattttaatgtaagaaagttgttcattttgtttttataaaatacatgaggacaatgctttaagtttttatactttcagaaactttttgtgttctaaaagtacaatgagccttactgtatttagtgtggcagaataataacatcagtggcaggccactgattacttcatgactgccacgcatttacagattggtgtcaaagacattcactatgtttttatggttcatgttatatcctccccagggtgacagccccttaaggccctccttttccctccatgctccaggtccatgcacaggtgtagcatgtcctgcttccgtttttcataaattaatctgggtgttgggggtagtgggaggagaacggtcagaatcaaagtgacattctaagaaaaactgtaccttagagattttcctctagtgctcaaacaaatacaaaataagatccccaaggtttaaactgcccagttagcattctgacattctaaaagccggcaaagcagcttttagtggataaatgggaatggaaacgtgtgtgttcctccaaattttctagtatgatcggtgagctgttttgtaaagaagcctcatattacagagttgcttttgcacctaaatttagaattgtattccatgaactgttcctcccttttctctgcttttctcctctctgttcctcttttaataccacacgtctgttgcttgcatttagtttgtcttcttccttcagctgtgtatcccagactgttaatacagaaaagagacatttcagctgtgattatgaccattgtttcatattccaattaaaaaaagaacagcagcctagctacttaaggtggggatttcatagttccaaagaagatttagcagattagagtgagttcacacttttcaggtgccactgtaaggttctctcagcctgggaaactatcaactctttctttaaaaagaaagagggttgaaaatcctctggacgaacagaagtcactttggctgttcagtaaggccaatgttaacaacacgtttagaggaggaaaagttcaacctcaagttaaatggtttgacttattcttcgtatcattagaagaaccccagagatagcattcctctattttattttactttcttttggattgcactgattgtttttgtgggaatgacactttatctggcaaagtaactgagagtttggtaaaagaatattttcttctctgaataataattattttcacagtgaaaatttcagtattttatcactaatgtatgagcaatgatctatatcaatttcaaggcacgtgaaaaaaattttttagtatgtgcaatttaatatagaaagatttctgcctgtttggacaataggttttgggtagtacagattaggataagtaagcttatatatgcacagagattattgtattacctgtaaattgatttacaagtacttaaaagcgtggtccccagtgaggccaagaaagtttccggttaagttctttaataataatcctacagtttatcttaagaa

SEQ ID NO: 1884 - DNA, 3615 bp, Homo sapiens
ggactgtgtgtgtctggctgtagcagacgcgaggcggcgacgaggcgccggggacccgcgcgaggggcggccgggaggcggcggcggcggccgccagaagtagcagcaggaccggcggcggcgacggcagccctgaaatgcattttcctctccagcggccatgttaaccaggaaaccttcggccgccgctcccgccgcctacccgaccggccgaggtggggacagcgccgttcgtcagcttcaggcttccccggggctcggtgcagggcccacccggagcggagtggggactggcccgccctcccccatcgccctgccgcctctccgggccagcaacgctgccgccgcagcccacacgattggcggcagtaagcacacaatgaatgatcacctgcatgtcggcagccacgctcacggacagatccaggttcaacagttgtttgaggataacagtaacaagcggacagtgctcacgacacaaccaaatgggcttacaacagtgggcaaaacgggcttgccagtggtgccagagcggcagctggacagcattcatagacggcaggggagctccacctctctaaagtccatggaaggcatggggaaggtgaaagccacccccatgacacctgaacaagcaatgaagcaatacatgcaaaaactcacagccttcgaacaccatgagattttcagctaccctgaaatatatttcttgggtctaaatgctaagaagcgccagggcatgacaggtgggcccaacaatggtggctatgatgatgaccagggatcatatgtgcaggtgccccacgatcacgtggcttacaggtatgaggtcctcaaggtcattgggaaggggagctttgggcaggtggtcaaggcctacgatcacaaagtccaccagcacgtggccctaaagatggtgcggaatgagaagcgcttccaccggcaagcagcggaggagatccgaatcctggaacacctgcggaagcaggacaaggataacacaatgaatgtcatccatatgctggagaatttcaccttccgcaaccacatctgcatgacgtttgagctgctgagcatgaacctctatgagctcatcaagaagaataaattccagggcttcagtctgcctttggttcgcaagtttgcccactcgattctgcagtgcttggatgctttgcacaaaaacagaataattcactgtgaccttaagcccgagaacattttgttaaagcagcagggtagaagcggtattaaagtaattgattttggctccagttgttacgagcatcagcgtgtctacacgtacatccagtcgcgtttttaccgggctccagaagtgatccttggggccaggtatggcatgcccattgatatgtggagcctgggctgcattttagcagagctcctgacgggttaccccctcttgcctggggaagatgaaggggaccagctggcctgtatgattgaactgttgggcatgccctcacagaaactgctggatgcatccaaacgagccaaaaattttgtgagctccaagggttatccccgttactgcactgtcacgactctctcagatggctctgtggtcctaaacggaggccgttcccggagggggaaactgaggggcccaccggagagcagagagtgggggaacgcgctgaaggggtgtgatgatccccttttccttgacttcttaaaacagtgtttagagtgggatcctgcagtgcgcatgaccccaggccaggctttgcggcacccctggctgaggaggcggttgccaaagcctcccaccggggagaaaacgtcagtgaaaaggataactgagagcaccggtgctatcacatctatatccaagttacctccaccttctagctcagcttccaaactgaggactaatttggcgcagatgacagatgccaatgggaatattcagcagaggacagtgttgccaaaacttgttagctgagctcacgtcccctgatgctggtaacctgaaagatacgacattgctgagccttactgggttgaaaaggagtagctcagacctgtttttatttgctcaataactctactcatttgtatcttttcagcacttaattttaatgtaagaaagttgttcattttgtttttataaaatacatgaggacaatgctttaagtttttatactttcagaaactttttgtgttctaaaagtacaatgagccttactgtatttagtgtggcagaataataacatcagtggcaggccactgattacttcatgactgccacgcatttacagattggtgtcaaagacattcactatgtttttatggttcatgttatatcctccccagggtgacagccccttaaggccctccttttccctccatgctccaggtccatgcacaggtgtagcatgtcctgcttccgtttttcataaattaatctgggtgttgggggtagtgggaggagaacggtcagaatcaaagtgacattctaagaaaaactgtaccttagagattttcctctagtgctcaaacaaatacaaaataagatccccaaggtttaaactgcccagttagcattctgacattctaaaagccggcaaagcagcttttagtggataaatgggaatggaaacgtgtgtgttcctccaaattttctagtatgatcggtgagctgttttgtaaagaagcctcatattacagagttgcttttgcacctaaatttagaattgtattccatgaactgttcctcccttttctctgcttttctcctctctgttcctcttttaataccacacgtctgttgcttgcatttagtttgtcttcttccttcagctgtgtatcccagactgttaatacagaaaagagacatttcagctgtgattatgaccattgtttcatattccaattaaaaaaagaacagcagcctagctacttaaggtggggatttcatagttccaaagaagatttagcagattagagtgagttcacacttttcaggtgccactgtaaggttctctcagcctgggaaactatcaactctttctttaaaaagaaagagggttgaaaatcctctggacgaacagaagtcactttggctgttcagtaaggccaatgttaacaacacgtttagaggaggaaaagttcaacctcaagttaaatggtttgacttattcttcgtatcattagaagaaccccagagatagcattcctctattttattttactttcttttggattgcactgattgtttttgtgggaatgacactttatctggcaaagtaactgagagtttggtaaaagaatattttcttctctgaataataattattttcacagtgaaaatttcagtattttatcactaatgtatgagcaatgatctatatcaatttcaaggcacgtgaaaaaaattttttagtatgtgcaatttaatatagaaagatttctgcctgtttggacaataggttttgggtagtacagattaggataagtaagcttatatatgcacagagattattgtattacctgtaaattgatttacaagtacttaaaagcgtggtccccagtgaggccaagaaagtttccggttaagttctttaataataatcctacagtttatcttaagaa

SEQ ID NO: 1885 - DNA, 470 bp, Homo sapiens
gtagttccggttccggcgtggccattttcgttggtggtgttcagttgtggcggttgctggtcagtaacagccaagatgctgcggaatctgctggctcttcgtcagattgggcagaggacgataagcactgcttcccgcaggcattttaaaaataaagttccggagaagcaaaaactgttccaggaggatgatgaaattccactgtatctaaagggtggggtagctgatgccctcctgtatagagccaccatgattcttacagttggtggaacagcatatgccatatatgagctggctgtggcttcatttcccaagaagcaggagtgacttcagtcatcccagcaatcgcttggttcagtttcattcagctctctatggaccagtaatctgataaataaccgagctcttctttggggatcaatatttattgacttgtagtaactgccaccaataaagcagtctttaccatg

SEQ ID NO: 1886 - DNA, 4486 bp, Homo sapiens
gactggccaacgtcgggcggaagtcgggaggttgggtggtctgtaaacgctggcttgtgacagggagggggaggaggaaggccttcgtaaaggttgcatctccgtcccttcgctcccggggacccgcgggaaaaaaaaaaatccaacacccaggccccgcggctagccccttcccacaggctctctccgctcgattttgtcaccgttatgtgggaagcgaatccagagatgtttcacaaagcagaagaattattttctaaaacaacaaacaatgaagtggatgacatggacacgtcagatacccagtggggctggttttacttggcagaatgtgggaagtggcacatgtttcagccggataccaacagtcagtgttcagttagcagtgaagatatcgaaaaaagcttcaaaacaaacccttgtggctccatttcttttactacttccaaattcagctacaagatagactttgcagaaatgaagcaaatgaatctcaccactggaaagcagcgcttaataaaaagagcccccttttctatcagtgctttcagttacatctgtgaaaacgaggccatccctatgccaccacactgggagaatgtgaatactcaagtaccatatcagcttattcctctgcacaatcaaacacatgaatataatgaagttgctaatctctttgggaagacgatggatcgcaaccgaattaaaagaattcagagaattcaaaacctagatttgtgggagttcttttgcaggaaaaaggctcagctcaagaaaaaaagaggtgtgcctcagattaatgaacaaatgctgtttcatggtaccagcagtgaatttgtggaagcaatctgcattcataactttgattggagaataaatggtatacatggtgctgtctttggaaaaggaacctattttgctagagatgctgcttattccagtcgtttctgcaaagatgacataaagcatgggaacacattccaaattcatggtgtcagcttgcaacagcggcatctgtttagaacatataaatctatgtttcttgctcgagtgctaattggagattacataaacggagactccaaatacatgcgacctccttccaaagacgggagctatgtgaatttatatgacagctgtgtggatgatacctggaacccaaagatctttgtggtttttgatgccaaccaaatctatcctgagtacttgatagactttcattgatttcacttccaaatctcggtggtcaaggaagctttattcttttttgcaggaaggtttgctcttcagtcatctagccactaaatgttaattatctgatacttttgaaacagatatgaaaaaaagtggcctccatataaaaagacatactgacttcaaggttggtttttgttgttttgtttttgcctgtttcttgtagtcttgtttgttaaaagttgatatcattgatgttttaacacataggggtgaaagataccattcaaaatggaatcagctgagtctcaactaatgtggtcattgagatctttaaagtttacgtgtgtgttatcaggataaatgattttagtttaaatagacttattcgtataaatgttgaaaaaaaatacagacataaatgtgtccctttagaggaattgatcctttgtaaattgaattcaggtagtagtatcatccaccaatccatctgttgctttgttggtcttctgaaggggggatttaaaactctgaaacagtctgagcaccttgagagaaatcagaaacaagacaattatttgcagtgctgtcaaacaagccagaaggagaaaatcaaggtagaatgccccactttccagttgccttaggatagcaggctgcagcctcagacttgatcctgtcattctcctctgtctcccacatctgaattgataattgctgcaaaatgtcattagcctacacttcatccatcagggctcttggattcttacaccacgacttgctgtgcaaggtgtttattgcatcttcaaagtgaaactttaaattattattcaaacatttattttccttttgttttaaaaagagtccctacaatgatcacttctaagatttttttttaccttcccctctgcagcacacacagctattcaacaatgatttctaaaattcatatttcaaatttgtatctctccattttgaaacattatagaaagcatgggatgcttgagacaaatctggtttctcctttgaagtagctgttgacaacctactctcttgaaaagttagatataattcttaatcatgtttagtggaaatttgtttacctgttccatctgttttgctgtttcattgtaaggaagatgagaagtgttggaacagcttccctcccctaaaggtattctagcagaggcgagacagcaacttggcgggcatgttgcataggagttaagtaccagatggggaattgcccatgtgatggtgaagagtctctcacattgattttcttccttttctcctcttctctcctccttctcttctctcctctttctcttctcttctttctcttctcttctgtcttcctcttcctcttctcttcctctcctcttcctctttctctctcttcctttttctcttcctctttctctttctctttctcttctcttctctctctcttccttccttctttctttccttccttccttccttccttccttccttccttccttctttccctccctccctccctccctcctccctttttctttttctttctttttttttggtttggcagagtcttgctctgttgcccaggctgcagtgcagtggtgtgatctcggctcactgcaacctccacctcccgggttcaagcaattctcttgcctcagcttctccagttactgggactacaggtgcataccaccatgcccggctaatttttgtatttttagtagaggcggggttttgtcatgttggccaggctgatctcaaactcctgacctcaggtgatccgcctgcctcagccttccaaagtgctgagattacaggcatgagccgctgtacccggcctgattttctatgattctgcctttaaaagacagcacgtataccaagcctttttcagaaagcttttctcttaactccttctaatgctgaattttctctctattatcctcacccaattttggctgagagttagtgtacacaatttaacttcttagaaaaattccagtgtctatgcttatattgctcacttgaatcatttgaattagaaagggatctacaaataataaaagcaaagagtgcagacagattagggatagtaattcttaaagtgccatctatcccagatttccgttatagaccagcatatgtgtaattgtgcagtgggaggtaagtagtacccaggacattgcatgtacaatactttgaaacaaagtggcaacaaagatttcctggctcaggtatgcaccccagctgctggtttagatgaagtgctgagaatatttagaaaaagcgctttaaaaagcatctagagattatcatgaaaataattggagacaaagtcactaggctgctttgtgagaggcagcataccatggctctaaacccgttcacaaaaaacaatgttagagacattaggaattcaggttttgaaaatctttttttcgatttatttgtaatttacataccaaaaaaccacattaaaatagtcctcccttcaacatggctatcttttttcaagttttatatgcatagctctctcagcacttgaatggaaaaactgttacagcatttgggagttgtttttcttttagactttgcagatcttatctcaaggtgactaggaacccagagctaagtatctgtgaggcaatctctgcgaacgctgaacttacctagttggtttctatgaaatatgtagaatgcactgcagtagccattgtaagaaggtactataccggttttttggggcttgttgttgttgtttggtctgagaatgtactgccaacccctcttttataagagagaactgattttgatacatattttaaaatatgatagtacagagttaatggatgttaaaattttatttctttgttttggtaagtagattaaatcgagaatcatataatcagtacatttgagaattatataaccagtatataataatactggacacaaccatttgccatcttttcctgttatcatcccatagagtgggtggggagaatgaatagacataaacctagaataatgataaatggtttttaaaactctatattgaatacattccagctgataatgacttttctttttcaccttggtgatatcagcctcagggtaaaaaaaaaagtttcataaatcttttagttataaacaggaaagttttatattagtgtgtcatttcatttctagactgttgatggtgatgatgataaagaatttggagccaattttgatatatgaatgtattgcttttacatgtgatgattaaagctctccattagcagtt

SEQ ID NO: 1887 - DNA, 4516 bp, Homo sapiens
atggagaagctgcaccagtgttattggaaatcaggagaacctcagtctgacgacattgaagctagccgaatgaagcgagcagctgcaaagcatctaatagaacgctactaccaccagttaactgagggctgtggaaatgaagcctgcacgaatgagttttgtgcttcctgtccaacttttcttcgtatggataataatgcagcagctattaaagccctcgagctttataagattaatgcaaaactctgtgatcctcatccctccaagaaaggagcaagctcagcttaccttgagaactcgaaaggtgcccccaacaactcctgctctgagataaaaatgaacaagaaaggcgctagaattgattttaaagatgtgacttacttaacagaagagaaggtatatgaaattcttgaattatgtagagaaagagaggattattcccctttaatccgtgttattggaagagttttttctagtgctgaggcattggtacagagcttccggaaagttaaacaacacaccaaggaagaactgaaatctcttcaagcaaaagatgaagacaaagatgaagatgaaaaggaaaaagctgcatgttctgctgctgctatggaagaagactcagaagcatcttcctcaaggataggtgatagctcacagggagacaacaatttgcaaaaattaggccctgatgatgtgtctgtggatattgatgccattagaagggtctacaccagattgctctctaatgaaaaaattgaaactgcctttctcaatgcacttgtatatttgtcacctaacgtggaatgtgacttgacgtatcacaatgtatactctcgagatcctaattatctgaatttgttcattatcgtaatggagaatagaaatctccacagtcctgaatatctggaaatggctttgccattattttgcaaagcgatgagcaagctaccccttgcagcccaaggaaaactgatcagactgtggtctaaatacaatgcagaccagattcggagaatgatggagacatttcagcaacttattacttataaagtcataagcaatgaatttaacagtcgaaatctagtgaatgatgatgatgccattgttgctgcttcgaagtgcttgaaaatggtttactatgcaaatgtagtgggaggggaagtggacacaaatcacaatgaagaagatgatgaagagcccatccctgagtccagcgagctgacacttcaggaacttttgggagaagaaagaagaaacaagaaaggtcctcgagtggaccccctggaaactgaacttggtgttaaaaccctggattgtcgaaaaccacttatcccttttgaagagtttattaatgaaccactgaatgaggttctagaaatggataaagattatacttttttcaaagtagaaacagagaacaaattctcttttatgacatgtccctttatattgaatgctgtcacaaagaatttgggattatattatgacaatagaattcgcatgtacagtgaacgaagaatcactgttctctacagcttagttcaaggacagcagttgaatccatatttgagactcaaagttagacgtgaccatatcatagatgatgcacttgtccggctagagatgatcgctatggaaaatcctgcagacttgaagaagcagttgtatgtggaatttgaaggagaacaaggagttgatgagggaggtgtttccaaagaattttttcagctggttgtggaggaaatcttcaatccagatattggtatgttcacatacgatgaatctacaaaattgttttggtttaatccatcttcttttgaaactgagggtcagtttactctgattggcatagtactgggtctggctatttacaataactgtatactggatgtacattttcccatggttgtctacaggaagctaatggggaaaaaaggaacttttcgtgacttgggagactctcacccagttctatatcagagtttaaaagatttattggagtatgaagggaatgtggaagatgacatgatgatcactttccagatatcacagacagatctttttggtaacccaatgatgtatgatctaaaggaaaatggtgataaaattccaattacaaatgaaaacaggaaggaatttgtcaatctttattctgactacattctcaataaatcagtagaaaaacagttcaaggcttttcggagaggttttcatatggtgaccaatgaatctcccttaaagtacttattcagaccagaagaaattgaattgcttatatgtggaagccggaatctagatttccaagcactagaagaaactacagaatatgacggtggctataccagggactctgttctgattagggagttctgggaaatcgttcattcatttacagatgaacagaaaagactcttcttgcagtttacaacgggcacagacagagcacctgtgggaggactaggaaaattaaagatgattatagccaaaaatggcccagacacagaaaggttacctacatctcatacttgctttaatgtgcttttacttccggaatactcaagcaaagaaaaacttaaagagagattgttgaaggccatcacgtatgccaaaggatttggcatgctgtaaaacaaaacaaaacaaaataaaacaaaaaaaaggaaggaaaaaaaaagaaaaaatttaaaaaattttaaaaatataacgagggataaatttttggtggtgatagtgtcccagtacaaaaaggctgtaagatagtcaaccacagtagtcacctatgtctgtgcctcccttctttattggggacatgtgggctggaacagcagatttcagctacatatatgaacaaatcctttattattattataattatttttttgcgtgaaagtgttacatattctttcacttgtatgtacagagaggtttttctgaatatttattttaagggttaaatcacttttgcttgtgtttattactgcttgaggttgagccttttgagtatttaaaaaatatataccaacagaactactctcccaaggaaaatattgccaccatttgtagaccacgtaaccttcaagtatgtgctacttttttgtccctgtatctaactcaaatcaggaactgtattttttttaatgatttgcttttgaaacttgaagtcttgaaaacagtgtgatgcaattactgctgttctagcccccaaagagttttctgtgcaaaatcttgagaatcaatcaataaagaaagatggaaggaagggagaaattggaatgttttaactgcagccctcagaactttagtaacagcacaacaaattaaaaacaaaaacaactcatgccacagtatgtcgtcttcatgtgtcttgcaatgaactgtttcagtagccaatcctctttcttagtatatgaaaggacagggatttttgttcttgttgttctcgttgttgttttaagtttactggggaaagtgcatttggccaaatgaaatggtagtcaagcctattgcaacaaagttaggaagtttgttgtttgtttattataaacaaaaagcatgtgaaagtgcacttaagatagagtttttattaattacttacttattacctagattttaaatagacaatccaaagtctccccttcgtgttgccatcatcttgttgaatcagccattttatcgaggcacgtgatcagtgttgcaacataatgaaaaagatggctactgtgccttgtgttacttaatcatacagtaagctgacctggaaatgaatgaaactattactcctaagaattacattgtatagccccacagattaaatttaattaattaattcaaaacatgttaaacgttactttcatgtactatggaaaagtacaagtaggtttacattactgatttccagaagtaagtagtttcccctttcctagtcttctgtgtatgtgatgttgttaatttcttttattgcattataaaataaaaggattatgtatttttaactaaggtgagacattgatatatccttttgctacaagctatagctaatgtgctgagcttgtgccttggtgattgattgattgattgactgattgttttaactgattactgtagatcaacctgatgatttgtttgtttgaaattggcaggaaaaatgcagctttcaaatcattggggggagaaaaaggatgtctttcaggattattttaattaatttttttcataattgagacagaactgtttgttatgtaccataatgctaaataaaactgtggcacttttcaccataatttaatttagtggaaaaagaagacaatgctttccatattgtgataaggtaacatggggtttttctgggccagcctttagaacactgttagggtacatacgctaccttgatgaaagggaccttcgtgcaactgtagtcatcttaaaggcttctcatccactgtgcttcttaatgtgtaattaaagtgaggagaaattaaatactctgagggcgttttatataataaattcgtgaaga

SEQ ID NO: 1888 - DNA, 4491 bp, Homo sapiens
acagatcaggagaacctcagtctgacgacattgaagctagccgaatgaagcgagcagctgcaaagcatctaatagaacgctactaccaccagttaactgagggctgtggaaatgaagcctgcacgaatgagttttgtgcttcctgtccaacttttcttcgtatggataataatgcagcagctattaaagccctcgagctttataagattaatgcaaaactctgtgatcctcatccctccaagaaaggagcaagctcagcttaccttgagaactcgaaaggtgcccccaacaactcctgctctgagataaaaatgaacaagaaaggcgctagaattgattttaaagatgtgacttacttaacagaagagaaggtatatgaaattcttgaattatgtagagaaagagaggattattcccctttaatccgtgttattggaagagttttttctagtgctgaggcattggtacagagcttccggaaagttaaacaacacaccaaggaagaactgaaatctcttcaagcaaaagatgaagacaaagatgaagatgaaaaggaaaaagctgcatgttctgctgctgctatggaagaagactcagaagcatcttcctcaaggataggtgatagctcacagggagacaacaatttgcaaaaattaggccctgatgatgtgtctgtggatattgatgccattagaagggtctacaccagattgctctctaatgaaaaaattgaaactgcctttctcaatgcacttgtatatttgtcacctaacgtggaatgtgacttgacgtatcacaatgtatactctcgagatcctaattatctgaatttgttcattatcgtaatggagaatagaaatctccacagtcctgaatatctggaaatggctttgccattattttgcaaagcgatgagcaagctaccccttgcagcccaaggaaaactgatcagactgtggtctaaatacaatgcagaccagattcggagaatgatggagacatttcagcaacttattacttataaagtcataagcaatgaatttaacagtcgaaatctagtgaatgatgatgatgccattgttgctgcttcgaagtgcttgaaaatggtttactatgcaaatgtagtgggaggggaagtggacacaaatcacaatgaagaagatgatgaagagcccatccctgagtccagcgagctgacacttcaggaacttttgggagaagaaagaagaaacaagaaaggtcctcgagtggaccccctggaaactgaacttggtgttaaaaccctggattgtcgaaaaccacttatcccttttgaagagtttattaatgaaccactgaatgaggttctagaaatggataaagattatacttttttcaaagtagaaacagagaacaaattctcttttatgacatgtccctttatattgaatgctgtcacaaagaatttgggattatattatgacaatagaattcgcatgtacagtgaacgaagaatcactgttctctacagcttagttcaaggacagcagttgaatccatatttgagactcaaagttagacgtgaccatatcatagatgatgcacttgtccggctagagatgatcgctatggaaaatcctgcagacttgaagaagcagttgtatgtggaatttgaaggagaacaaggagttgatgagggaggtgtttccaaagaattttttcagctggttgtggaggaaatcttcaatccagatattggtatgttcacatacgatgaatctacaaaattgttttggtttaatccatcttcttttgaaactgagggtcagtttactctgattggcatagtactgggtctggctatttacaataactgtatactggatgtacattttcccatggttgtctacaggaagctaatggggaaaaaaggaacttttcgtgacttgggagactctcacccagttctatatcagagtttaaaagatttattggagtatgaagggaatgtggaagatgacatgatgatcactttccagatatcacagacagatctttttggtaacccaatgatgtatgatctaaaggaaaatggtgataaaattccaattacaaatgaaaacaggaaggaatttgtcaatctttattctgactacattctcaataaatcagtagaaaaacagttcaaggcttttcggagaggttttcatatggtgaccaatgaatctcccttaaagtacttattcagaccagaagaaattgaattgcttatatgtggaagccggaatctagatttccaagcactagaagaaactacagaatatgacggtggctataccagggactctgttctgattagggagttctgggaaatcgttcattcatttacagatgaacagaaaagactcttcttgcagtttacaacgggcacagacagagcacctgtgggaggactaggaaaattaaagatgattatagccaaaaatggcccagacacagaaaggttacctacatctcatacttgctttaatgtgcttttacttccggaatactcaagcaaagaaaaacttaaagagagattgttgaaggccatcacgtatgccaaaggatttggcatgctgtaaaacaaaacaaaacaaaataaaacaaaaaaaaggaaggaaaaaaaaagaaaaaatttaaaaaattttaaaaatataacgagggataaatttttggtggtgatagtgtcccagtacaaaaaggctgtaagatagtcaaccacagtagtcacctatgtctgtgcctcccttctttattggggacatgtgggctggaacagcagatttcagctacatatatgaacaaatcctttattattattataattatttttttgcgtgaaagtgttacatattctttcacttgtatgtacagagaggtttttctgaatatttattttaagggttaaatcacttttgcttgtgtttattactgcttgaggttgagccttttgagtatttaaaaaatatataccaacagaactactctcccaaggaaaatattgccaccatttgtagaccacgtaaccttcaagtatgtgctacttttttgtccctgtatctaactcaaatcaggaactgtattttttttaatgatttgcttttgaaacttgaagtcttgaaaacagtgtgatgcaattactgctgttctagcccccaaagagttttctgtgcaaaatcttgagaatcaatcaataaagaaagatggaaggaagggagaaattggaatgttttaactgcagccctcagaactttagtaacagcacaacaaattaaaaacaaaaacaactcatgccacagtatgtcgtcttcatgtgtcttgcaatgaactgtttcagtagccaatcctctttcttagtatatgaaaggacagggatttttgttcttgttgttctcgttgttgttttaagtttactggggaaagtgcatttggccaaatgaaatggtagtcaagcctattgcaacaaagttaggaagtttgttgtttgtttattataaacaaaaagcatgtgaaagtgcacttaagatagagtttttattaattacttacttattacctagattttaaatagacaatccaaagtctccccttcgtgttgccatcatcttgttgaatcagccattttatcgaggcacgtgatcagtgttgcaacataatgaaaaagatggctactgtgccttgtgttacttaatcatacagtaagctgacctggaaatgaatgaaactattactcctaagaattacattgtatagccccacagattaaatttaattaattaattcaaaacatgttaaacgttactttcatgtactatggaaaagtacaagtaggtttacattactgatttccagaagtaagtagtttcccctttcctagtcttctgtgtatgtgatgttgttaatttcttttattgcattataaaataaaaggattatgtatttttaactaaggtgagacattgatatatccttttgctacaagctatagctaatgtgctgagcttgtgccttggtgattgattgattgattgactgattgttttaactgattactgtagatcaacctgatgatttgtttgtttgaaattggcaggaaaaatgcagctttcaaatcattggggggagaaaaaggatgtctttcaggattattttaattaatttttttcataattgagacagaactgtttgttatgtaccataatgctaaataaaactgtggcacttttcaccataatttaatttagtggaaaaagaagacaatgctttccatattgtgataaggtaacatggggtttttctgggccagcctttagaacactgttagggtacatacgctaccttgatgaaagggaccttcgtgcaactgtagtcatcttaaaggcttctcatccactgtgcttcttaatgtgtaattaaagtgaggagaaattaaatactctgagggcgttttatataataaattcgtgaaga

SEQ ID NO: 1889 - DNA, 5164 bp, Homo sapiens
ccaagatggtggcgctgggctcggggtgactacaggagacgacggggccttttcccttcgccaggacccgacacaccaggcttcgctcgctcgcgcacccctccgccgcgtagccatccgccagcgcgggcgcccgccatccgccgcctacttacgcttcacctctgccgacccggcgcgctcggctgcgggcggcggcgcctccttcggctcctcctcggaatagctcgcggcctgtagcccctggcaggagggcccctcagccccccggtgtggacaggcagcggcggctggcgacgaacgccgggatttcggcggccccggcgctccctttcccggcctcgttttccggataaggaagcgcgggtcccgcatgagccccggcggtggcggcagcgaaagagaacgaggcggtggcgggcggaggcggcgggcgagggcgactacgaccagtgaggcggccgccgcagcccaggcgcgggggcgacgacaggttaaaaatctgtaagagcctgattttagaattcaccagctcctcagaagtttggcgaaatatgagttattaagcctacgctcagatcaaggtagcagctagactggtgtgacaacctgtttttaatcagtgactcaaagctgtgatcaccctgatgtcaccgaatggccacagcttgtaaaagatcaggagaacctcagtctgacgacattgaagctagccgaatgaagcgagcagctgcaaagcatctaatagaacgctactaccaccagttaactgagggctgtggaaatgaagcctgcacgaatgagttttgtgcttcctgtccaacttttcttcgtatggataataatgcagcagctattaaagccctcgagctttataagattaatgcaaaactctgtgatcctcatccctccaagaaaggagcaagctcagcttaccttgagaactcgaaaggtgcccccaacaactcctgctctgagataaaaatgaacaagaaaggcgctagaattgattttaaagatgtgacttacttaacagaagagaaggtatatgaaattcttgaattatgtagagaaagagaggattattcccctttaatccgtgttattggaagagttttttctagtgctgaggcattggtacagagcttccggaaagttaaacaacacaccaaggaagaactgaaatctcttcaagcaaaagatgaagacaaagatgaagatgaaaaggaaaaagctgcatgttctgctgctgctatggaagaagactcagaagcatcttcctcaaggataggtgatagctcacagggagacaacaatttgcaaaaattaggccctgatgatgtgtctgtggatattgatgccattagaagggtctacaccagattgctctctaatgaaaaaattgaaactgcctttctcaatgcacttgtatatttgtcacctaacgtggaatgtgacttgacgtatcacaatgtatactctcgagatcctaattatctgaatttgttcattatcgtaatggagaatagaaatctccacagtcctgaatatctggaaatggctttgccattattttgcaaagcgatgagcaagctaccccttgcagcccaaggaaaactgatcagactgtggtctaaatacaatgcagaccagattcggagaatgatggagacatttcagcaacttattacttataaagtcataagcaatgaatttaacagtcgaaatctagtgaatgatgatgatgccattgttgctgcttcgaagtgcttgaaaatggtttactatgcaaatgtagtgggaggggaagtggacacaaatcacaatgaagaagatgatgaagagcccatccctgagtccagcgagctgacacttcaggaacttttgggagaagaaagaagaaacaagaaaggtcctcgagtggaccccctggaaactgaacttggtgttaaaaccctggattgtcgaaaaccacttatcccttttgaagagtttattaatgaaccactgaatgaggttctagaaatggataaagattatacttttttcaaagtagaaacagagaacaaattctcttttatgacatgtccctttatattgaatgctgtcacaaagaatttgggattatattatgacaatagaattcgcatgtacagtgaacgaagaatcactgttctctacagcttagttcaaggacagcagttgaatccatatttgagactcaaagttagacgtgaccatatcatagatgatgcacttgtccggctagagatgatcgctatggaaaatcctgcagacttgaagaagcagttgtatgtggaatttgaaggagaacaaggagttgatgagggaggtgtttccaaagaattttttcagctggttgtggaggaaatcttcaatccagatattggtatgttcacatacgatgaatctacaaaattgttttggtttaatccatcttcttttgaaactgagggtcagtttactctgattggcatagtactgggtctggctatttacaataactgtatactggatgtacattttcccatggttgtctacaggaagctaatggggaaaaaaggaacttttcgtgacttgggagactctcacccagttctatatcagagtttaaaagatttattggagtatgaagggaatgtggaagatgacatgatgatcactttccagatatcacagacagatctttttggtaacccaatgatgtatgatctaaaggaaaatggtgataaaattccaattacaaatgaaaacaggaaggaatttgtcaatctttattctgactacattctcaataaatcagtagaaaaacagttcaaggcttttcggagaggttttcatatggtgaccaatgaatctcccttaaagtacttattcagaccagaagaaattgaattgcttatatgtggaagccggaatctagatttccaagcactagaagaaactacagaatatgacggtggctataccagggactctgttctgattagggagttctgggaaatcgttcattcatttacagatgaacagaaaagactcttcttgcagtttacaacgggcacagacagagcacctgtgggaggactaggaaaattaaagatgattatagccaaaaatggcccagacacagaaaggttacctacatctcatacttgctttaatgtgcttttacttccggaatactcaagcaaagaaaaacttaaagagagattgttgaaggccatcacgtatgccaaaggatttggcatgctgtaaaacaaaacaaaacaaaataaaacaaaaaaaaggaaggaaaaaaaaagaaaaaatttaaaaaattttaaaaatataacgagggataaatttttggtggtgatagtgtcccagtacaaaaaggctgtaagatagtcaaccacagtagtcacctatgtctgtgcctcccttctttattggggacatgtgggctggaacagcagatttcagctacatatatgaacaaatcctttattattattataattatttttttgcgtgaaagtgttacatattctttcacttgtatgtacagagaggtttttctgaatatttattttaagggttaaatcacttttgcttgtgtttattactgcttgaggttgagccttttgagtatttaaaaaatatataccaacagaactactctcccaaggaaaatattgccaccatttgtagaccacgtaaccttcaagtatgtgctacttttttgtccctgtatctaactcaaatcaggaactgtattttttttaatgatttgcttttgaaacttgaagtcttgaaaacagtgtgatgcaattactgctgttctagcccccaaagagttttctgtgcaaaatcttgagaatcaatcaataaagaaagatggaaggaagggagaaattggaatgttttaactgcagccctcagaactttagtaacagcacaacaaattaaaaacaaaaacaactcatgccacagtatgtcgtcttcatgtgtcttgcaatgaactgtttcagtagccaatcctctttcttagtatatgaaaggacagggatttttgttcttgttgttctcgttgttgttttaagtttactggggaaagtgcatttggccaaatgaaatggtagtcaagcctattgcaacaaagttaggaagtttgttgtttgtttattataaacaaaaagcatgtgaaagtgcacttaagatagagtttttattaattacttacttattacctagattttaaatagacaatccaaagtctccccttcgtgttgccatcatcttgttgaatcagccattttatcgaggcacgtgatcagtgttgcaacataatgaaaaagatggctactgtgccttgtgttacttaatcatacagtaagctgacctggaaatgaatgaaactattactcctaagaattacattgtatagccccacagattaaatttaattaattaattcaaaacatgttaaacgttactttcatgtactatggaaaagtacaagtaggtttacattactgatttccagaagtaagtagtttcccctttcctagtcttctgtgtatgtgatgttgttaatttcttttattgcattataaaataaaaggattatgtatttttaactaaggtgagacattgatatatccttttgctacaagctatagctaatgtgctgagcttgtgccttggtgattgattgattgattgactgattgttttaactgattactgtagatcaacctgatgatttgtttgtttgaaattggcaggaaaaatgcagctttcaaatcattggggggagaaaaaggatgtctttcaggattattttaattaatttttttcataattgagacagaactgtttgttatgtaccataatgctaaataaaactgtggcacttttcaccataatttaatttagtggaaaaagaagacaatgctttccatattgtgataaggtaacatggggtttttctgggccagcctttagaacactgttagggtacatacgctaccttgatgaaagggaccttcgtgcaactgtagtcatcttaaaggcttctcatccactgtgcttcttaatgtgtaattaaagtgaggagaaattaaatactctgagggcgttttatataataaattcgtgaaga

SEQ ID NO: 1890 - DNA, 2603 bp, Homo sapiens
ccacgcgtccgcgctcccctcagctcctgcagtgctaattaagggagggagcagcggggagcttgcagtgaccaagagggtgttgaggctaggaggccacgataaacaggatacgataaaagtccttaaccaagacgcagatgggaagaagcgttagagcgagcagcactcacatctcaagaaccagcctttcaaacagtttccagagatggattatcctactttacttttggctcttcttcatgtatacagagctctatgtgaagaggtgctttggcatacatcagttccctttgccgagaacatgtctctagaatgtgtgtatccatcaatgggcatcttaacacaggtggagtggttcaagatcgggacccagcaggattccatagccattttcagccctactcatggcatggtcataaggaagccctatgctgagagggtttactttttgaattcaacgatggcttccaataacatgactcttttctttcggaatgcctctgaagatgatgttggctactattcctgctctctttacacttacccacagggaacttggcagaaggtgatacaggtggttcagtcagatagttttgaggcagctgtgccatcaaatagccacattgtttcggaacctggaaagaatgtcacactcacttgtcagcctcagatgacgtggcctgtgcaggcagtgaggtgggaaaagatccagccccgtcagatcgacctcttaacttactgcaacttggtccatggcagaaatttcacctccaagttcccaagacaaatagtgagcaactgcagccacggaaggtggagcgtcatcgtcatccccgatgtcacagtctcagactcggggctttaccgctgctacttgcaggccagcgcaggagaaaacgaaaccttcgtgatgagattgactgtagccgagggtaaaaccgataaccaatataccctctttgtggctggagggacagttttattgttgttgtttgttatctcaattaccaccatcattgtcattttccttaacagaaggagaaggagagagagaagagatctatttacagagtcctgggatacacagaaggcacccaataactatagaagtcccatctctaccggtcaacctaccaatcaatccatggatgatacaagagaggatatttatgtcaactatccaaccttctctcgcagaccaaagactagagtttaagcttattcttgacatgagtgcattagtaatgactcttatgtactcatgcatggatctttatgcaatttttttccactacccaaggtctaccttagatactagttgtctgaattgagttactttgataggaaaaatacttcattacctaaaatcatttttcatagaactgtttcagaaaacctgactctaactggtttatatacaaaagaaaacttactgtatcatataacagaatgatccaggggagattaagctttgggcaagggctatttaccagggcttaaatgttgtgtctagaattaagtatgggcataaactggcttctgaatccctttccagagtgttggatccatttccctggtcttggcctcactctcatgcaggctttcctcttgtgttggcaagatggctgccaactcttggcaattcatacatccttgtttctgtctggtagagagtttgcttctcaaatggagcaaacaaatttgattattttttcattgttaaataggcaacatgaccagaaaggatggaatggcttaagtaaactaagggttcacttctagagctgagaagcagggtcaaagcacaatactgggcaattcagagcatggttagaagaggaaaggggagtctcaaagctggagagtttaccaacaaatattgactgcagtgattaaccaagacatttttgttaactaaaaagtgaaatatgggatggattctagaaatggggtatctctgtccatacttctagaatccactctatcagcatagtccagaagaatacctggcagtagaagaaatgaatattcaagaggaagataaatgcgagagggcaatcctttactattctcatatttatttatctctcattctgtatagaattcttgccgccatcccaggtctagccttaggagcaaatgtagtagatagtcgaataataaataacttaatgttttggacatattttgtctacttttgagaattatttttaatatgtaaattctctcaaaagggtcaggcacctagttattattttttaatgattatgtgaaagttgaatataatataccactaaaagtgacagttgaaagtggtggcataggatggtagggtagaaatttgggagggaaaaaagaaattgggagggtacaggcaacaggagaaaggaatcaaaccacagaaaaatacaaagggaaacttctgcttcactattcagacaaagacagccctaatgacatcaccaacagtcaaagcaattagagaccatacctaatattgtttaaattctagatgtaggctaacaatgaaaagtatttgccaaactgaataaaactgtcatggttaccttgaaaaaaaaaaaaaaaaaaaaaaaaaaaaa

SEQ ID NO: 1891 - DNA, 3576 bp, Homo sapiens
gaaaggtcacagcgcggcagcgggtctggctggcggcagcggcgggagggagccgagagacccgagtgcacgtgtggagaagcggcggcacaagcgcggcggcgggagacactcccgcccccaccagactcaagccctcactcgactctcgcggccttcgttgctcgcacagctccctgcccaggctaggaggccggcttgcggggttgagtggcccgagctaagggtgcggagacctaagggcggcgactacgacggcgttgatatcggtggtaacgacggcctcagcaggcggggaagatgaaaggtagccggatcgagctgggagatgtgacaccacacaatattaaacagttgaaaagattgaatcaggtcatctttccagtcagctacaatgacaagttctacaaggatgtgctggaggttggcgagctagcaaaacttgcctatttcaatgatattgctgtaggtgcagtatgctgtagggtggatcattcacagaatcagaagagactttacatcatgacactaggatgtctggcaccttaccgaaggctaggaataggaactaaaatgttaaatcatgtcttaaacatctgtgaaaaagatggtacttttgacaacatttatctgcatgtccagatcagcaatgagtcggcaattgacttctacaggaagtttggctttgagattattgagacaaagaagaactactataagaggatagagcccgcagatgctcatgtgctgcagaaaaacctcaaagttccttctggtcagaatgcagatgtgcaaaagacagacaactgaacaaattacaaatgaactttcttgcacttgcttgtcgccaaataaaagagaggcccattgattcctcccccaccccaacacttttcttttaaagcttttctccctccttgttcttgtttttctttcttcctttccttttctctgagagttttaatactttcaaggactttaaaaaaataatcatgtttgaattgttttctcttatttttgtgaggtggtttgaaggaaggacaaggtagatctgtttagttttgcagttgaagttagatggtcctaaacatttaattgtcaaataatttcaaatttaatgtcctgctttcacattgaagggcagagcctacaaaacattgtatatttcaaaagacaaaaagaagcagcagcagtatcttgttctctaattcatagacaagttgagtgtgtttgtggtactttgggtttttaaacactttgggatactaatccctagacattgccttcactccacctttagtccttctgagcactctctcgggagttggaacattgttatccttgtaagaaatactaagcttatgttgatttttaagtaattatatcttctcttcttgctggtgggtggggcagtttggtttagtgttatactttggtctaagtatttgagttaaactgcttttttgctaatgagtgggctggttgttagcaggtttgtttttcctgctgttgattgttactagtggcattaacttttagaatttgggctggtgagattaattttttttaatatcccagctagagatatggcctttaactgacctaaagaggtgtgttgtgatttaattttttcccgttcctttttcttcagtaaacccaacaatagtctaaccttaaaaattgagttgatgtccttataggtcactacccctaaataaacctgaagcaggtgttttctcttggacatactaaaaaatacctaaaaggaagcttagatgggctgtgacacaaaaaattcaattactgtcatctaatgccagctgttaaaagtgtggccactgagcatttgattttataggaaaaaatagtatttttgagaataacatagctgtgctattgcacatctgttggaggacatcccagatttgcttatactcagtgcctgtgatattgagtttaaggatttgaggcaggggtaattattaaacatattgcttctattcttggaaaaatagaagtgtaaaatgttaataatacaaatgtcactgtgacctcctccactgtgaggactggtttatgccagatcattttccggcacacacggagtggctttgacagattgataactttgtaagatgggagacatctgaaatattcatgttttccttttgtagtcccatctccactatttagaaatgttctcagactttaaaataatgcacagggcttgagctttctgtcatttgactttaaaaggaagtttcattcatatttatcctcttatgtaaaattgcggtataaagtctcatttccaaatatgttaaatgacaaaattattttataaaatgtttatgcacactttataaccttaagtttttatttgagaatgtgaaagtacaaagtgcagtagacttcaacaatcttgagtgccaagaataatacagaaaaagaagacagttgatgaatgagtttatagggttctaatcttaagatggtaaaaatgtagaaagaccttgctggttttttgggggtattcgtttcttaaacaatccaaatctaagcttagaagaaaagtttagcgttaagcacctttatcttcatgaataagcttcagcttgctcttggcaagagaagagtgcttgagttacagaaggcataagtagtttgaagaatgcagcagcctttttgtaaacttcccagatatcaaaatagactttgatatataaatggttttctgagatgacactgcctctatttctataaccatttcacctggactatctaaccagtcctatgaatgtatccctaaatgtggttattgaaaacctaatagctgcctcatgacaagtacatgttatttaaggaggaaaaaatattaaattttgaattgagtgtgtaggctccctatcattatatatagagtttctttttccacggtagtcagtgacttaacctgaattgtaaatgtttgtaaagggttaattgtcctacatcaaacttagttaaataattccatccacttatggaggaggaggagaatgtggaagaggtaaaaagctgggcacaagttcatatgcctatgagtcagtaaagactgaagtaatgtcctatgttgagctggttattttgatatatgataataattatctttgaagtagaacaattctgttaactggaaaatcacaggatatatccatcatatttttcaggacagatagtttttactgtggggcaaataggttaaaattacactatgttagttgcatttaggttttaaagcaaagaatctgtagagaaatctatgcaatatatagtttgtccagattagctttcatttggggaatgaagttctgaaatatctaaagcagtttactcatcaattgaaaagtcctccaaaaagagaactattgggaaaccatggtgtggtggtggaaaagaaaagctccctcagttttttggagggaataacttaaaaaaatacttaaatggctaagtttacttggtgcagttaagaattaaacttgtcaattttaacattgctgttacatctgaaataaacttatgtgatgttctggt

SEQ ID NO: 1892 - DNA, 4548 bp, Homo sapiens
gggactggaggctgccgagggggccggcgcccgagtccgggattcggccagtggtgctgagcgagtgctggaccagcggccgtcctgtgcacctggcctgtgcgcgtgcccgctgctcggcttcacccagactaaggcgcgggcagctgcgggaacaggcggggtgggcggagggagaccgggaggcacgggcgccctgtgcgcggaggaggtgaaggcggccggggccgggacgccatgtccatggaggaccccttctttgtggtgaaaggagaggtacagaaagcagtcaacactgcccagggattgtttcagagatggacagagctcctccaggacccctccacagcaacaagggaagaaatcgactggaccaccaacgagctgagaaataacctccggagcatagagtgggatctagaggaccttgatgaaaccatcagcatagttgaagcaaatcctagaaaatttaaccttgatgcaactgaattgagtataagaaaagccttcattacaagtactcggcaagttgtcagggacatgaaagatcagatgtcaacttcatctgtgcaggcattagctgaaagaaaaaatagacaggcactgctgggagacagtggcagccagaactggagcactggaacaacagataaatatgggcgtctggaccgagagctccagagagccaattctcatttcattgaggagcagcaggcacagcagcagttgatcgtggaacagcaggatgagcagttggagctggtctctggcagcatcggggtgctgaagaacatgtcccagcgcatcggaggggagctggaggaacaggcagttatgttggaagatttctctcacgaattggagagcactcagtcccggctggacaatgtgatgaagaaacttgcaaaagtatctcatatgaccagtgatcggcgccaatggtgtgccatagccatcctctttgcagtcctgttggttgtgctcatcctcttcttagtgctgtgacggcggggcctctgggtgcgagttcctcctgcatatgaaccgaggggaggaggagaagctgagcacgtgtgacattgccgtctactcacattcctatcctggaaacatactgctgcactgacttttctccgtgtgaccccacaattgacatggctcctccatcccagcgctggaagggccagtgggaagaggaaatagatgtctgcactcctggctgcagctggacaacagaagccccatgccgcctgtccagttcggaggagaactagctgctgccttgccttccgggacctcgtttgctgaggagggacttacagactccactggtgttttgctgttgctcattccatgcatctttggcagctcttttcttctgctcagacccttccccgtgctcagacagtgcaccgctgtcccatctaaagaaacctgtcaggaatacgagcttctgggtatgtttcgtttcccattgctgtagcatttcttatcccctgagagctgatgattattgaggacagaaggctcagaaacagtttgtgacagaaaatgcagtgtttcatttttcagggataaatgctaagataaaattgcttttccaggtcatttttttttgtggtaagaataactaatggaaaataatgaaacaccctggggtttgggggtgctaacaacttgtggctttaactgacaggagcaattaaaaagagcaagagggttctgcattggcatagcttagggaagggttaatgatgtcgccacaggtcagctcctgatccttgccgacttgatgttgctgtaccagggcttcctccccagaggtgcagcttgcgttttgagggtgattgctacatatgttgttgctaaacagctcagtaacacacttgaatgaatttggataccagattgtcctcattacagttcttttactcttagggcactctacactgggggttggggttgggagtggttagtacatttattacatttattaagaaacgtaatgacataaaaggttagctctgggccagacttctcttactctgtgggtaatggcaaggatgtgtaggtaaacttggttcttttttttccctaagatgacagcttgattttatcatctgcagtcaaataactgagccaatccaaatttaaatgatagatgctttaattgagtttaagtagctgaaactgctgagacactaaactttaaccttctgatgactttttaaaatgcctcaaatgtgcacatgtatataggatatttttataacttccctgatgaataatctgatattaaagtagtatttggacccagagccagaactcggtggtggaggctgctggtctctcctcaccaccttcttttgcacttggaaagaacagcaacatctggatagagttctggctttgacttctcatttccttgtctttttgggtgcattcctcagcacactttttttttaaacctttttgttttgttttgtttgtatttcatgtggttttatttgggggttttggttttttcacccttttttgtgatttgcaatgatgtgcttgcccagctaacttttgaattgcactttttaataaatattcttaacaatttttgaagaaggatattttatctcatttgagatcatggtaggttaagaaaatatgcctgttgatgaaagctaaaagcaaatttatgaaactaaaagggtgattgacatccatgtttacactccgctctaatgtttgatatataaataagttattttcaaattaggaaaaaacagtgagtattacaaagggcttcagatgtttagagtactaggttatttatgttttacaaagtttgaatcttctataaactaagaaaggggatgatccttagatttgcattaaaatatagaagtcttttaaagtaaatgtgaaccttgtctaagtactgtaatccacacaacacattataagaagcaaaccagcatcttaaggaattataaaattaccctatttaaaagccatgctattgttctgctattaccagatttattgtgccacacaaaaggatcatgtgtgtcagcaggggccgtttggaacaaacctagtcattaatgagtaagatactcctgttagttcagggaccaagttttatgacccagaggcttaatgatgtttggatatatttcaaatcggcgtgcttacctcactgatttaaattattttctaaatagtggccattgtagacctgactcaggctgaagctaaatagagaacaatttagaaagttaactaacaatacagtgcattctacccgtagggccaccatgcccttctgcccctggctgatttgatcctgtgtctgatcccattgcaccctgactgggcagtccctacagaaccagtgttaatttgaagggcctccactcaggctccaaatgtggcagccaaagagaacaatccagggaacctacatttatttttaaggacaaatatttcctcctcagtggtcctaatgttcagggctttagagggaacccaggtggtctcttcaccctgtgtcctagaatgggagagtaagtagacagtggtgataaccccacactgcttataagtgcatctttatagtatttggggctttcctacccctttagccttctgtacctagtaccatattccagttttaaagaactggcagaatgtgatggataacagaggaagagctcaatttatgtttattggaagaacattttacttaaatgatttgaggggtgggagggagtgaactactgagtttgccagagtgaaaatccatctgaaaaactcagctacctttagtttttagtcctcatttttggtcttgtctctgcggactgtgaagaatcacaatgctctatatgccctggactgtgtggcaaatgcaggttgcagcgtgtgtgttacatgaggatcttccacaatttcagaatgcacgccagagctgaagggggaaacttggtaacttgcccattattctctgcttttagccagagttaaacagactgatgggtctggtagccaacaacttggcaacttccactccttctcacctcgtgagattaagggctgtgaaaagaaatctagtctaactccaacagaaatctgtctctgttaagtgttttaccttctgtaagtagagatggtagagccaagatttttcttttggtaatttccctgtctataaagtgagaccaaagggatatctgttccctgttacctttttggagaattcataacatttgaagatcaaaaaattgaatgataaatatgaatggcttttcaattctgtggactttgtaccatttggcttcaccttgtactgcaagatgaatttgtaaacaaaacaaaattggactgtctggaaagctaaagttctgaaatatggaatgtactgcctctaatttttctttgtcttcctctcactggcatttttttctctcccaggtttcttaagaataatgttttttaaaggaggctttttgcccatcaagaataaaaagaaataaaaccaaaaaaaaaaaaaaa

SEQ ID NO: 1893 - DNA, 1434 bp, Homo sapiens
gccatggcgacatcctcggccgcgctgccccgaatactcggcgcgggtgcccgggccccgtcgcgctggttgggctttctcgggaaggcgaccccccggcctgctcggccgagccgcaggacgcttggaagcgcgacggcccttatgatccgcgagtcggaggacagcaccgatttcaacgacaagattttgaatgagcccctcaagcactctgacttcttcaatgtcaaggaactgttttccgtgagaagcctcttcgatgcccgagtccatctgggacacaaagctggctgtcggcacaggtttatggagccgtacatctttgggagccgcctggaccacgacatcatcgacctggaacagacagccacgcacctccagctggccttgaacttcaccgcccacatggcctaccgcaagggcatcatcttgtttataagccgcaaccggcagttctcgtacctgattgagaacatggcccgtgactgtggcgagtacgcccacactcgctacttcaggggcggcatgctgaccaacgcgcgcctcctctttggccccacggtccgcctgccggacctcatcatcttcctgcacacgctcaacaacatctttgagccacacgtggccgtgagagacgcagccaagatgaacatccccacagtgggcatcgtggacaccaactgcaacccctgcctcatcacctaccctgtacccggcaatgacgactctccgctggctgtgcacctctactgcaggctcttccagacggccatcacccgggccaaggagaagcggcagcaggttgaggctctctatcgcctgcagggccagaaggagcccggggaccaggggccagcccaccctcctggggctgacatgagccattccctgtgatgttcactctcctcccaaagcaaaccacagccaagcctgtctgagctgggagtccccttccccagccctgggtcagtggcatcctcagtcgttgttacttactcagctgatgtcacagtgcagacatccaccgttccaccacagaaccagtggctgagcggaccaacgttgccatgtgcgtttgctctgtggggaacagagcacagagggtgagcgacatgtgcagaacggccccttggctgcagttaggacctcagtggctggtatggccaagctgctagaagatgctgctgtccctgtgatcccagcagccctcccttcaccgtgacccctgacctttgtcaggaaggtgcagtttttcttctcaatctaaatgcctttcaggtgggccgcttccttggctacctggttccagggggctgttttgtaatgagatgctgctggcaggccactcagaggctcccagctgggttggtgggacagccaggccagatgacctgattccagcaaaaataaaactcagatttgggcaaaatgaaa

SEQ ID NO: 1894 - DNA, 548 bp, Homo sapiens
gccttgcagaacttctacttgcctgcctccctgcctctggccatggcctgccggtgcctcagcttccttctgatggggaccttcctgtcagtttcccagacagtcctggcccagctggatgcactgctggtcttcccaggccaagtggctcaactctcctgcacgctcagcccccagcacgtcaccatcagggactacggtgtgtcctggtaccagcagcgggcaggcagtgcccctcgatatctcctctactaccgctcggaggaggatcaccaccggcctgctgacatccccgatcgattctcggcagccaaggatgaggcccacaatgcctgtgtcctcaccattagtcccgtgcagcctgaagacgacgcggattactactgctctgttggctacggctttagtccctaggggtggggtgtgagatgggtgcctcccctctgcctcccatttctgcccctgaccttgggtcccttttaaactttctctgagccttgcttcccctctgtaaaatgggttaataatattcaacatgtcaacaaaaa

SEQ ID NO: 1895 - DNA, 2759 bp, Homo sapiens
ccgggttctctcccggcgtgccccgcgccgggtttgttggggggtactcggcagtgcagccatgactatactccccaaaaagaagccgccgcctcccgacgccgaccccgccaacgagccgccgccgcccgggccgatgcccccggcgccgcggcgcggcggaggtgtgggcgtgggcggcggcggcacgggcgtgggcggcggcgatcgcgaccgtgactccggcgtcgtgggggcccgtccgcgagcttcgccaccgcctcaaggcccgctaccaggaccgccgggcgctcttcatcgctgggcgctggccgtgccgcctggtgcagtggcgggtccccggccacaacaggcttctccacctccttgcgggggcccaggtggtcccggcggcggtcccggcgacgcgctgggcgcagcggcggcgggtgtgggtgccgcgggcgtggtggtgggtgtgggtggtgccgtaggcgtgggcggctgctgctccgggcctgggcacagcaagcggcgacgtcaagctcccggggttggcgcggttggcgggggcagtcccgagcgtgaggaggtcggcgcaggctacaacagtgaggacgagtatgaggcggctgcagcacgcatcgaggctatggaccctgccactgtcgagcagcaggagcattggtttgaaaaggccctacgagacaagaagggcttcatcatcaagcagatgaaggaggatggcgcctgtctcttccgggctgtagctgaccaggtgtatggagaccaggacatgcatgaggttgtgcgaaagcattgcatggactatctgatgaagaatgccgactacttctccaactatgtcacagaggactttaccacctacattaacaggaagcggaaaaacaattgccatggcaaccacattgagatgcaggccatggcagagatgtacaaccgtcctgtggaggtgtaccagtacagcacaggtacttctgcagtggaacccatcaacacattccatgggatacatcaaaacgaggacgaacccattcgtgttagctaccatcggaatatccactataattcagtggtgaatcctaacaaggccaccattggtgtggggctgggcctgccatcattcaaaccagggtttgcagagcagtctctgatgaagaatgccataaaaacatcggaggagtcatggattgaacagcagatgctagaagacaagaaacgggccacagactgggaggccacaaatgaagccatcgaggagcaggtggctcgggaatcctacctgcagtggttgcgggatcaggagaaacaggctcgccaggtccgaggccccagccagccccggaaagccagcgccacatgcagttcggccacagcagcagcctccagtggcctggaggagtggactagccggtccccgcggcagcggagttcagcctcgtcacctgagcaccctgagctgcatgctgaattgggcatgaagcccccttccccaggcactgttttagctcttgccaaacctccttcgccctgtgcgccaggtacaagcagtcagttctcggcaggggccgaccgggcaacttccccccttgtgtccctctaccctgctttggagtgccgggccctcattcagcagatgtccccctctgcctttggtctgaatgactgggatgatgatgagatcctagcttcggtgctggcagtgtcccaacaggaatacctagacagtatgaagaaaaacaaagtgcacagagacccgcccccagacaagagttgatggagacccagggattggacaccatctcccaaccccagtactcctgctctccggtgccacctcaccttctttggcttcttccctcttgcctccttctgttctttctgctctcccctcttttccctcctcctcacttccctctggctagcccacccctgcactctctctcattgccgctgccactatcacctgtctctctgccagctgatgtgccctgttgccccccaccccatcccgcacagaaccatccctgcattccacaggggactcgggcaagggtgccgaagatagacaagaggcacacagagacagaccaactggcagccaggcagccccagaggagagagacattcagacagaggaaagtctccctgcccctcattccttccaagatgagaaaaacttgccgccaccccccgacactgatgccagggaggtgggaggaagaagtgggaaatttcccttcccagtacccccaagaacgtctgagccttcaatgttgaattttttctttattaaaattacttttatcttataaaatcaactaatcaaaaatgatatagacgacagcactggctctgtgaaggtggcatctttctgggcaggcaggccatggggcatggaggagggtgcaaagatatgggttgctgtcttctggcctccagctgcatggaggccggcccagggtctagggtgtgcactgggcaagggcagggcggcaggtgtcaggccggcttggacaatgaaaccctgaccttgctgcattccttttgcttccaccaccactagcttctttggaatcttggggtgggggtcatctttggggattatggctgccacccgggatttgagtgtagggagtgtgggagcagccttggcagatggggcacccgtgccctgcaggtgttgacaagatccgccatctgtaatgtccttggcacaataaaaccaaatgtcagtttcaaaaaaaaaaaaaaaaaaa

SEQ ID NO: 1896 - DNA, 789 bp, Homo sapiens
gcgccgtggctgggcaggagccgaggacggcatgtcccaggccccgggagcacagccgagcccacccaccgtgtaccacgaacggcagcgcctggagctgtgtgctgtccacgccctcaacaacgttctgcagcagcagctctttagccaggaggctgccgatgagatctgcaagaggttggccccagactcccggctgaaccctcatcgcagcctcctgggcaccggcaactatgatgtcaatgtgatcatggccgctctgcaggggctgggcctggccgccgtgtggtgggacaggaggaggcccctgtcccagctggccctgccccaggtactggggctgatcctgaacctgccctcgcccgtgtcgctggggctgctgtcactgccgctgcgccggcggcactgggtggccctgcgccaggtggacggtgtctactacaacctggactccaagctgcgggcgcccgaggccctgggggatgaggacggagtcagggccttcctggcggctgcgctggcccagggcctgtgcgaggtgctgctggtagtgaccaaggaggtggaggagaagggcagctggctgcggacagactgaccatggctgaccatcggcgcccacagcgcagtccctgcgcatccccctccggctgcgcacactgcatgcctgggaaaggccagcacttcatggaccctggggaggccccgccccctccccacacccctgctccccactgccgctgctgcctcaataaatctgctgatttgcgaaaaaaaaaaaaaaaaaaa

SEQ ID NO: 1897 - DNA, 927 bp, Homo sapiens
ggcagcgggcgaaaggagccggggcctggaggtttgcgtaccggtcgcctggtcccggcaccagcgccgcccagtgtggtttcccataaggaagctcttcttcctgcttggcttccacctttaacccttccacctgggagcgtcctctaacacattcagactacaagtccagacccaggagagcaaggcccagaaagaggtcaaaatggggtttatattttcaaaatctatgaatgaaagcatgaaaaatcaaaaggagttcatgcttatgaatgctcgacttcagctggaaaggcagctcatcatgcagagtgaaatgagggaaagacaaatggccatgcggattgcgtggtctcgggaattcctcaaatattttggaactttttttggccttgcagccatctctttaacagctggagcgattaaaaaaaagaagccagccttcctggtcccgattgttccattaagctttatcctcacctaccagtatgacttgggctatggaacccttttagaaagaatgaaaggtgaagctgaggacatactggaaacagaaaagagtaaattgcagctgccaagaggaatgatcacttttgaaagcattgaaaaagccagaaaggaacagagtagattcttcatagacaaatgaaatcatgcttaccaatcaaatctcaaagcacagaattattgacttgaatcatggtttttacagttttttaaatgctcaagattttgatattatagattttattttaaaatattaaaatgcaagatagttttgagctattttaaaataaaatttataacattcaacacaaaatcatggaggtgctctaaataacttttagatttcctctctctgtgtgcattaccaatatctaagtgtaaaattaataaattgttttgaattcctggaaaaaaaaaaaa

SEQ ID NO: 1898 - DNA, 1084 bp, Homo sapiens
cgaggatgtgcgtgggggctcggcggctgggccgcgggccgtgtgcggctctgctcctcctgggcctggggctgagcaccgtgacggggctccactgtgtcggggacacctaccccagcaacgaccggtgctgccacgagtgcaggccaggcaacgggatggtgagccgctgcagccgctcccagaacacggtgtgccgtccgtgcgggccgggcttctacaacgacgtggtcagctccaagccgtgcaagccctgcacgtggtgtaacctcagaagtgggagtgagcggaagcagctgtgcacggccacacaggacacagtctgccgctgccgggcgggcacccagcccctggacagctacaagcctggagttgactgtgccccctgccctccagggcacttctccccaggcgacaaccaggcctgcaagccctggaccaactgcaccttggctgggaagcacaccctgcagccggccagcaatagctcggacgcaatctgtgaggacagggaccccccagccacgcagccccaggagacccagggccccccggccaggcccatcactgtccagcccactgaagcctggcccagaacctcacagggaccctccacccggcccgtggaggtccccgggggccgtgcggttgccgccatcctgggcctgggcctggtgctggggctgctgggccccctggccatcctgctggccctgtacctgctccggagggaccagaggctgccccccgatgcccacaagccccctgggggaggcagtttccggacccccatccaagaggagcaggccgacgcccactccaccctggccaagatctgacctgggcccaccaaggtggacgctgggccccgccaggctggagcccggagggtctgctgggcgagcagggcaggtgcaggccgcctgccccgccacgctcctgggccaactctgcaccgttctaggtgccgatggctgcctccggctctctgcttacgtatgccatgcatacctcctgccccgcgggaccacaataaaaaccttggcagacgggagtctccgaccggcaaaaaaaaaaaaaaaaa

SEQ ID NO: 1899 - DNA, 1078 bp, Homo sapiens
gcggaagtgacgcgaggcgtagcggaagttactgcagccgcggtgttgtgctgtggggaagggagaaggatttgtaaaccccggagcgaggttctgcttacccgaggccgctgctgtgcggagacccccgggtgaagccaccgtcatcatgtctgaccaggaggcaaaaccttcaactgaggacttgggggataagaaggaaggtgaatatattaaactcaaagtcattggacaggatagcagtgagattcacttcaaagtgaaaatgacaacacatctcaagaaactcaaagaatcatactgtcaaagacagggtgttccaatgaattcactcaggtttctctttgagggtcagagaattgctgataatcatactccaaaagaactgggaatggaggaagaagatgtgattgaagtttatcaggaacaaacggggggtcattcaacagtttagttttaaaatttgagggtctggaccaaaagaagaggaatatcaggttgaagtcaagatgacagataaggtgagagtaatgactaactccaaagatggcttcactgaagaaaaggcattttaagattttttaaaaatcttgtcagaagatcccagaaaagttctaattttcattagcaattaataaagctatacatgcagaaatgaatacaacagaacactgctctttttgattttatttgtactttttggcctgggatatgggttttaaatggacattgtctgtaccagcttcattaaaataaacaatatttgtaaaaatcatactaatgcttattttattttaattgtatagaaagaaaaaaatgcctaaaataaggttttcttgcataaatactggaaattgcacatggtacaaattttttcttcattactgtacagtgatgatgttaatgactttgaagcactgaaagttactgaagtgccttctgaatcaaggatttaattaaggccacaatacctttttaatactcagtgttctgtttttttaaaaacttgatattcctgtatggtgcatatatgatacagttacctaatcatgttgaataaatgggcatgccaaaaatt

SEQ ID NO: 1900 - DNA, 1452 bp, Homo sapiens
gcggaagtgacgcgaggcgtagcggaagttactgcagccgcggtgttgtgctgtggggaagggagaaggatttgtaaaccccggagcgaggttctgcttacccgaggccgctgctgtgcggagacccccgggtgaagccaccgtcatcatgtctgaccaggatagcagtgagattcacttcaaagtgaaaatgacaacacatctcaagaaactcaaagaatcatactgtcaaagacagggtgttccaatgaattcactcaggtttctctttgagggtcagagaattgctgataatcatactccaaaagaactgggaatggaggaagaagatgtgattgaagtttatcaggaacaaacggggggtcattcaacagtttagatattctttttattttttttcttttccctcaatccttttttatttttaaaaatagttcttttgtaatgtggtgttcaaaacggaattgaaaactggcaccccatctctttgaaacatctggtaatttgaattctagtgctcattattcattattgtttgttttcattgtgctgatttttggtgatcaagcctcagtccccttcatattaccctctcctttttaaaaattacgtgtgcacagagaggtcacctttttcaggacattgcattttcaggcttgtggtgataaataagatcgaccaatgcaagtgttcataatgactttccaattggccctgatgttctagcatgtgattacttcactcctggactgtgactttcagtgggagatggaagtttttcagagaactgaactgtggaaaaatgacctttccttaacttgaagctacttttaaaatttgagggtctggaccaaaagaagaggaatatcaggttgaagtcaagatgacagataaggtgagagtaatgactaactccaaagatggcttcactgaagaaaaggcattttaagattttttaaaaatcttgtcagaagatcccagaaaagttctaattttcattagcaattaataaagctatacatgcagaaatgaatacaacagaacactgctctttttgattttatttgtactttttggcctgggatatgggttttaaatggacattgtctgtaccagcttcattaaaataaacaatatttgtaaaaatcatactaatgcttattttattttaattgtatagaaagaaaaaaatgcctaaaataaggttttcttgcataaatactggaaattgcacatggtacaaattttttcttcattactgtacagtgatgatgttaatgactttgaagcactgaaagttactgaagtgccttctgaatcaaggatttaattaaggccacaatacctttttaatactcagtgttctgtttttttaaaaacttgatattcctgtatggtgcatatatgatacagttacctaatcatgttgaataaatgggcatgccaaaaatt

SEQ ID NO: 1901 - DNA, 1527 bp, Homo sapiens
gcggaagtgacgcgaggcgtagcggaagttactgcagccgcggtgttgtgctgtggggaagggagaaggatttgtaaaccccggagcgaggttctgcttacccgaggccgctgctgtgcggagacccccgggtgaagccaccgtcatcatgtctgaccaggaggcaaaaccttcaactgaggacttgggggataagaaggaaggtgaatatattaaactcaaagtcattggacaggatagcagtgagattcacttcaaagtgaaaatgacaacacatctcaagaaactcaaagaatcatactgtcaaagacagggtgttccaatgaattcactcaggtttctctttgagggtcagagaattgctgataatcatactccaaaagaactgggaatggaggaagaagatgtgattgaagtttatcaggaacaaacggggggtcattcaacagtttagatattctttttattttttttcttttccctcaatccttttttatttttaaaaatagttcttttgtaatgtggtgttcaaaacggaattgaaaactggcaccccatctctttgaaacatctggtaatttgaattctagtgctcattattcattattgtttgttttcattgtgctgatttttggtgatcaagcctcagtccccttcatattaccctctcctttttaaaaattacgtgtgcacagagaggtcacctttttcaggacattgcattttcaggcttgtggtgataaataagatcgaccaatgcaagtgttcataatgactttccaattggccctgatgttctagcatgtgattacttcactcctggactgtgactttcagtgggagatggaagtttttcagagaactgaactgtggaaaaatgacctttccttaacttgaagctacttttaaaatttgagggtctggaccaaaagaagaggaatatcaggttgaagtcaagatgacagataaggtgagagtaatgactaactccaaagatggcttcactgaagaaaaggcattttaagattttttaaaaatcttgtcagaagatcccagaaaagttctaattttcattagcaattaataaagctatacatgcagaaatgaatacaacagaacactgctctttttgattttatttgtactttttggcctgggatatgggttttaaatggacattgtctgtaccagcttcattaaaataaacaatatttgtaaaaatcatactaatgcttattttattttaattgtatagaaagaaaaaaatgcctaaaataaggttttcttgcataaatactggaaattgcacatggtacaaattttttcttcattactgtacagtgatgatgttaatgactttgaagcactgaaagttactgaagtgccttctgaatcaaggatttaattaaggccacaatacctttttaatactcagtgttctgtttttttaaaaacttgatattcctgtatggtgcatatatgatacagttacctaatcatgttgaataaatgggcatgccaaaaatt

SEQ ID NO: 1902 - DNA, 894 bp, Homo sapiens
cggaaactcagagccgggttcctcccgggtttctgccgggtttctccctgcggctcctgggttgttgagactcttgtgaagatggcttgcgctgccgcgcggtccccggccgaccaggacaggtttatttgtatctatcctgcttatttaaataataagaagaccatcgcagagggaaggcgaatccccataagtaaggctgttgaaaatcctacagctacagagattcaagatgtatgttcagcagttggacttaacgtatttcttgagaaaaataaaatgtactctagagaatggaatcgtgatgtccaatacagaggcagagtccgggtccagctcaaacaggaagatgggagcctctgccttgtacagttcccatcacgtaagtcagtaatgttgtatgcagcagaaatgatacctaaactaaaaacaaggacacaaaaaacaggaggtgctgaccaaagtcttcaacaaggagagggaagtaaaaaagggaaaggaaagaaaaagaagtaacctagtatcagcatcaagtatgtggtactactgtaagagacatgaatggagacttctaatttgtatcggagggaaacagaagctttttgtttgcatcatttaactgaactgtgaacccttgtgcctctcatctttatcatcggagttgacagtgaaacaaatttacatcagaagtttgcatctcgcgtatatgccgtataaaagaatttttttgtctttcaatgcagttttttggaagaaaatatttttaaatggacaatggactgtacaataagttacttgaaataagttgtttcagataaatttcaattagatttaaaataaacattatgtccaccttttaagttaatgaaataaaatttgaaactgaaaaaaaaa

SEQ ID NO: 1903 - DNA, 4758 bp, Homo sapiens
gagccggagccgggtccctgtccccgggccgggcgccgccgccgccccctgcccagcgcccgcgtctccgcggcgccaccccagcgccaatattccggagatcaagcgttacgcggcggcggcggcggcggcggcggggcccggagcgggaggcgccggggaccggggcgaggcggcccccgccgccgccatggaggcgctgggacccggacctccggctagcctgtttcagccacctcgtcgtcctggccttggaactgttggaaaaccaattcgactgttagccaatcattttcaggttcagattcctaaaatagatgtgtatcactatgatgtggatattaagcctgaaaaacggcctcgtagagtcaacagggaggtagtagatacaatggtgcggcacttcaagatgcaaatatttggtgatcggcagcctgggtatgatggcaaaagaaacatgtacacagcacatccactaccaattggacgggatagggttgatatggaggtgactcttccaggcgagggtaaagaccaaacatttaaagtgtctgttcagtgggtgtcagttgtgagccttcagttgcttttagaagctttggctgggcacttgaatgaagtcccagatgactcagtacaagcacttgatgttatcacaagacaccttccctccatgaggtacaccccagtgggccgttcctttttctcacccccggaaggttactaccaccctctgggagggggcagggaggtctggtttggttttcatcagtctgtgagacctgccatgtggaatatgatgctcaacattgatgtatctgcaactgctttctaccgggctcagcctatcattgagttcatgtgtgaggttttagacattcagaacatcaatgaacagaccaaacctctaacagactcccagcgtgtcaaatttaccaaagaaatcagaggtctcaaagttgaggtgacccactgtggacagatgaaacgaaaataccgagtttgtaatgtgactagacggccagccagtcatcaaacttttcctttgcagctagaaaacggtcaagctatggaatgtacagtagctcaatattttaagcaaaagtatagtctgcaactgaaatacccccatcttccctgtctccaagtgggacaagaacaaaagcatacatacttgccactcgaggtctgtaatatagtggcaggacagcgatgtatcaagaagctcacagacaatcagacttccacaatgatcaaagctacagcaagatctgctcctgacagacaggaagagatcagtagactggtgaagagcaacagtatggtgggtggacctgatccataccttaaagaatttggtattgttgtccacaatgaaatgacagagctcacaggcagggtacttccagcaccaatgctgcaatatggaggccggaataaaacagtagccacacccaaccagggtgtctgggacatgcgaggaaagcagttttatgctggcattgaaattaaagtttgggcagttgcttgttttgcacctcagaaacaatgtagggaagatttactaaagagtttcactgaccagctgcgtaaaatctctaaggatgcaggaatgcccatccagggtcagccatgtttctgcaagtatgcacaaggtgcagacagtgtggagcctatgtttaaacatctgaaaatgacttatgtgggcctacagctaatagtggttatcctgcctggaaagacaccagtatatgcggaggtgaaacgtgttggagatacccttctaggtatggccacacagtgtgtccaggtaaaaaatgtagtgaagacctcacctcaaaccctttccaatctttgcctgaagataaatgcaaaacttggaggaattaacaatgtgcttgtgcctcatcaaaggccctcggtgttccagcagcctgtcatcttcctgggagcggatgtcacacaccccccagcaggggatgggaagaaaccttccattgctgctgtggttggcagtatggatggccaccccagccggtactgtgccaccgttcgggtgcagacttcccggcaggagatctcccaagagctcctctacagtcaagaggtcatccaggacctgactaacatggttcgagagctgctgattcagttctacaaatccacacgcttcaaacccactcggatcatctattaccgtggaggggtatctgagggacaaatgaaacaggtagcttggccagaactaatagcaattcgaaaggcatgtattagcttggaagaagattaccggccaggaataacttatattgtggtgcaaaaaagacatcacacacgactcttctgtgcagataaaacagaaagggtagggaaaagtggcaatgtaccagcaggcactacagtggatagtaccatcacacatccatctgagtttgacttttacctctgtagtcatgcaggaattcagggaaccagccgtccctcacattaccaggtcttgtgggatgacaactgcttcactgcagatgaactccagctactgacttaccagctgtgtcacacctatgtgaggtgcactcgctcagtctctattccagcccctgcatattatgcccggcttgtagcatttagggcaaggtatcatctggtggataaagatcatgacagtgcggaaggcagtcatgtgtcaggacagagcaacggccgggatcctcaggccttggctaaggctgtgcaaatccaccatgatacccagcacacgatgtattttgcctgagagtctcagaaaaagaactcaaccaatttggcaccccatgcagcctcaaaatgtttcaaatgcctaccgcctctagatcgagccacgttgacttcaggtggtcttctaccagcagctcggaatagttgcactgaatctatactttgcagcactgtctgatgcgtcaacaaaattgagccatttttttaaagtaatagatactaatagattatcttttctgatgcactggactgaatttttacctcaatgtgcaaaggctgatcagcctgaactttctaaaggactttacaagaagggtttctatggaatattttgctagctgtggtgttcaccgcatccctctagtcttagaagagaagattattccttttttctgtagtcattgagtggggtatatgcataagtgggagagaaaaaccaaacaatctacttcagttcagtgtaactatttaattgtgtgggtccatagactttttaatgaagatttctgactttgccactgtaaatgcctttaatgagcattaatttttgaaagttttacagagttttattagttttactactttatcttattgatctctgcagacttgtgctggtgcaagtacatgctgacaggcaatttgcactatatttggctgcagattcaaataggcagttctcttatttggtcgacttttgtgaatgtgtgacataaacagatgtaatgcatgtcacagtgacggagataacactgccatgataaaagtactcatgtttcccctatttggaaaaaaaaattgcttttagtatttttccaagttttcaaaagtgcccattttatgctgctgtgtggtttgttaaatctaaatgatttttaaacttttctcatagaaacttaactttggcaataaacattttttaaggtctctcctcttccttccccaacaatgtagttttctagatgagatttcagtatgattttatcagctatttcttatatatcataatctggcaatttctgaaaccagtcagaaaagacatatatttccatgcctttttaaagaattatttttacctgttttatattcacagttggtgtcctgtcactttgttttaaaataagctagaaccaggatgcttccttattggaaaggctttgccagtccttaaggtacaatgagtgatgctgcaacttgcaaatgtaccagcatttaaaatttcttttcctgggaatcaaggtaactcacacgactacttgcagtacaaattttttgcttctctttcgacatgaaatgtacttggtgggttttccttccttttattaaactaaaactgtgtggaaaaggttgatttttcttaatagattctggattccactcacagggagatgggattcctttcttgtccaaacaaagggagttgctctaaagcgagcatcagttaaaatgtaggggaaaatgtattctgtatgtagtgtagataatactttgtgaatggacaacagttacatagtgtcttggtagcaccagccagtgtttcccagcccagagtttactgacttgtaattctctatccaggacatcaggagtgagggatggaaaaggggataaaaggcctggagccacactctatatggctgaggaaggagctagggaaagagatagacacaatggggtgaaaacaattttgccgcccctgcctggaaactgctggtggggaaatgatggtgaagggtgtttgcttgaactcatgagacggtccaaatctcataaactagccttctcaaaatcccagcaatataaagcactgtttttcttcagtcgtttaaataaacttgtaaatacattgaagtttacatttccatgtgctgttgatcaacggcgccacctgtgtttgctgagactggtctctgagagagttttatgtcgatcgaggcctgttgctcattaagctgagtgcagacgtccttaatccctgcagatagtgggatgaaagcaagttct

SEQ ID NO: 1904 - DNA, 2075 bp, Homo sapiens
gccgcgcccagctgggtcgggacgcgctccctgagctgcccgagctccgcggggactcgggccgggatcctcgggcggctgcattggccggggccggggccgggagcgggccatgatgggccggcggcgcgccttcgccgtggacggccgggatggggctggcgagggcctggcacggggctgcatagtgcctggagtcaccagcacctacagacggatccccgacgctgcccacgggtgctcatcctgggagagaggtgacaagttcagaggtgtcggcagggaggcactctttctcaaactggcctcccgggactcaggagtggagatggcagttggggacagccccctggccgccttaccgggcctttctcaggactccctggactttgaatcctcagggagttctgagccccccgcccaggtaggccgactcctggccagccagaagctgggggaggtgttggagcggtcccgccggctcccaacagctcccaccagcttgtcaggacaacaccgctccctgcggctggcaagcaagcctgagcgtgaagtgccccttggagcagggcaacaggagtccatggaggcagacacagacctagaggcaggcctggaagaagaggcggtggggggcctggggcctggagcctgggcctgcctccccgggcagggtcttcgctatctggaacacctgtgcctggtgctggagcagatggcaaggctccagcagctctacctgcagctgcggatccagaggcccccaggggatcccggcgaggaggagtcgacccgagcccctttaccgtccccgttacacaccccaggcaatcgggggcaggggccatgggagctgctaagccagacagagcacacaggagcaaaggctgcttcacccccaaaggtggaggtgcccagtgccaaccctcccaggctgccagaaaccccagtggagccaacgtaccacttgccatcctcccagggacacaagcgggatatctcccactgggacaaggtcaaggtcctgctcaaccggatctgccggagaagccaccaccaccctgagccccctgcccctcctgatggctctgaccccaggatcgagtccagggacctccctgaaaggcctcagtgccgcccccaccggaagacctttatgccatcattagtggttaagaagcaacgagcaaaaaacctttctgtaggctgagacctctcggtgcacctggtgaccctgggtggaggggacttgctgtgaagtcttcctcgccctctgccctcttgctgcttctccacattgccaggaaaagctgctgacgcctgccctcctctcttgagtcgagggctgaatctttctcctctaagcagtctggtcaggaaccttggtttcttgagaggcccccaagatgccgcagctccagggctcttcctcctcaccagaaatccctgggcttccacaatgtgaactcactcattgtcaggtgtccgtggagtgtttttggcatggtgacctgtctgggcccagcatgttgcagatgtgtatttatgcgcaatggtatgcatatctctgtgtgactgtcagtgttgcaagctggctggatccaaccatctcttctgaaataatgcatccaaagggttgatattctgggggaggtcactgcagaaggatggaactgacctttattccccagtgggcagttactgagctttcctcctcagagccatgctggcagccctgggacagagaacggtgtggctttggctgcctctgcatggaatcttgccccggactcctgaagactgcacaaggaatgaggaagatcagggacaacctgggaactgaataactttcaaagccagtgctcagcttctctgctccgtactagcgtttacaggtcttaattcaaaccagatgcctgtactagtttttagaccccaagtcaacctttctgagccacagcttcccgctgggaataatgatgcctgccctatctacctcacagacttgttatgaggataaagtgagattaaactgcctcaaagtgctttgtaaaaaaaaaaaaaaaaaaaaaaaa

SEQ ID NO: 1905 - DNA, 3423 bp, Homo sapiens
gttttagccaaacaaatgggtttcggggcgagcgttgggcgccgccgcgccgcgctgggtgctcggtccgactcagcggtggggagcgagccaggcctcccgccaccgctgctgccgccaccactgcgtcgggctggtgcagccccgggccaggccgcggccggggcaggagcgcaggggctttgttatgcacctaaagccatattggaagctccagaagaaagagcaccccccggaagtcagcagggaaacgcagagaactcctatgaaccaccaaaaggctgtaaatgatgaaacatgcaaagctagccacataacatcaagtgtctttccttcagcctctctcggtaaagcatcatctcgaaagccatttgggatcctttctccaaatgttctgtgcagtatgagtgggaagagtcctgtagagagcagcttgaatgttaaaaccaaaaagaatgcaccatctgcaacgatccaccagggcgaagaagaaggaccacttgatatctgggctgttgtgaaacctggaaataccaaggaaaaaattgcattctttgcatcccaccagtgtagtaacaggataggatctatgaaaataaaaagttcctgggatattgatgggagagctactaagagaaggaaaaaatcaggggatcttaaaaaagccaaggtacaggtggaaaggatgagggaggttaacagcaggtgctaccaacctgagccttttgcatgtggcattgagcactgttctgtgcactatgtgagtgacagtggggatggagtctatgctgggaggcctctgtcagttatacagatggttgccttcttggagcaaagagccagtgctctgctagctagctgttcaaaaaactgcacaaactcacctgcaattgtgaggttttctggccaatccagaggtgtgcctgcagtgtctgagtcctattctgccccaggagcttgtgaagaacccacagaaaggggaaatcttgaggttggtgaaccacagagcgaaccagtccgtgtccttgacatggtagccaagttggagtctgagtgcctgaagcggcagggccagcgtgagcctgggagcctctcaaggaataacagcttccgtcgaaatgtgggcagagtattgcttgcaaatagcactcaggctgatgaaggcaaaacaaagaaaggcgtcttggaggcacctgacactcaggtgaatcctgtggggtctgtatctgtggattgtggcccttcaagagctgatcgttgttctcctaaggaggaccaggcctgggacggtgcttctcaggactgccccccattgccagcaggagtgagtttccacatagacagtgcagagttagagccgggttcgcaaactgccgtgaaaaacagcaacagatatgatgtggaaatgacagatgaactcgttgggttacctttttcctctcatacctattcccaagcctctgaattgcccacagatgctgttgattgtatgagcagagagcttgtgtcccttactagccgaaatcctgatcaaagaaaagaatctttgtgcattagtatcactgtgtccaaggtagacaaagaccagccttccattttaaactcctgtgaagacccagttccagggatgttgttttttttgccacctggtcagcacttgtcagactattcccagttgaatgaaagcacaacaaaagagtcttcagaggccagccagcttgaagatgctgctgggggtgacagtgcatctgaggaaaaaagtgggtctgctgagccatttgtactgccagcctcttctgtggaaagtacattaccagtgcttgaggcatccagttggaagaagcaggtgtcgcatgacttcctggagaccaggtttaaaatccagcagcttttggagcctcagcagtacatggcttttctgccccaccacattatggtaaaaatcttcaggttacttcccaccaagagtttagtggcccttaaatgtacctgctgctatttcaagtttatcattgagtactacaatatcaggccagcagattctcgctgggttcgagatccacgctatagagaggatccttgcaaacagtgcaagaaaaagtatgtgaaaggggatgtgtccctgtgccgatggcaccccaagccctattgccaggcattgccctatgggccagggtattggatgtgctgccaccggtctcagaaaggattccctggctgtaagctggggcttcatgacaatcactgggttcctgcctgccacagctttaatcgggcaatccataagaaagcaaaagggactgaagctgaagaggaatactaaagtccatgtgagaggcaacaaaaggaccggtttctaaagctgcaaaacacctagatacaccgttcaaatgagcgtagccccctgagtcatcactctagaagaatctgtacatcatcaggactgcattgctcaggcattttctaaactctaaatttacgagctgtacaaaaaaattggtcttgttgtttatagtggcatctcatgtttgaacccgggtggtatcccacagttggattcagttggctgtgaataactgcctgttttcctaaatcaaacccatcctcaaaggatgaagactcaccaccatccaggacattcagaagagttcactgcagatgctgcaggtagtcctcaaaaatgggttccagaaatgttttgagcactggcaacatatttgaaataagtgaatattgtcctgtgaaaagaatagcaggacttttagatgaaaagtattcttaaaaagaaaagtcaggcaccccaccttagacctcgtatgcttgatcctgtgagattgatgtttgtggctggaggtggatttcatgccctgtggtgtttacagtgtatataatggttgtgttttcatggggctatgaaagtgcacgttaaacctgagcgcctttacctttagatgagtgctttggcccctctgtgaatagcacgattaaaatccagttgtatataatggacagctaacggaacaatataatcaccacaatgcagctaggatagtgttgcggctataattttgtgtttttttttttaattgtctagtcttaaatttgtacatcttgtataaaatatgaatgtttcccaaataaactatgaatgtttcctgtataatatatgaatgtttctgagaagaaactctaaatagttgaaaggctaacctgctcaaaggataccaaataatggtttaactggacaacctgaaaattagcatagaaaacaatcctttgttatattttagtgatccacaagattgagaaaatattatatagttagataataacattcttgtctactttatcctgtctggttacaaaattttttaaaacttaaataaaaacatgcatcttaaatggaaaaaaaaaaaaaaaaaa

SEQ ID NO: 1906 - DNA, 1983 bp, Homo sapiens
gaattgaaccacccattttcctttcttagccaaatcaccaaaatgtccagttagaacaagaatttagcattctgcaaaagaagttaacagctgagataacgaggaaatattctgaaatggatcccaaatatttcatcttaattttgttttgtggacacctgaacaatacatttttttcaaagacagagacaattacaacagagaagcagtcacagcctaccttattcacatcatcaatgtcacaggtattggctaattctcaaaacacaacagggaatcctttgggtcaaccaacacaattcagcgacactttttctggacaatcaatatcacctgccaaagtcactgctggacaaccaacaccagctgtctatacctcttctgaaaaaccagaagcacatacttctgctggacaaccacttgcctacaacaccaaacaaccaacaccaatagccaacacctcctcccagcaagccgtgttcacctctgccagacaactaccatctgcccgtacttctaccacacaaccaccaaagtcatttgtctatacttttactcaacaatcatcatctgtccagatcccttctagaaaacaaataactgttcataatccatccacacaaccaacatcaactgtcaaaaattcacctaggagtacaccaggatttatcttagatactaccagtaacaaacaaaccccacaaaaaaacaattataattcaatagctgccatactaattggtgtacttctgacttctatgttggtagctataatcatcattgtactttggaaatgcttaaggaaaccagttttaaatgatcaaaattgggcaggtagatctccatttgctgatggagaaacccctgacatttgtatggataacatcagagaaaatgaaatatccacaaaacgtacatcaatcatttcacttacaccctggaaaccaagcaaaagcacacttttagcagatgacttagaaattaagttgtttgaatcaagtgaaaacattgaagactccaacaaccccaaaacagagaaaataaaagatcaagtaaatggtacatcagaagatagtgctgatggttcaacagttggaactgctgtttcttcttcagatgatgcaggtctgcctccaccacctccccttctggatttggaaggacaggaaagtaaccaatctgacaaacccacaatgacaattgtatctcctcttccaaatgattctactagtctccctccatctctggactgtctcaatcaagactgtggagatcataaatctgagataatacaatcatttccaccgcttgactcacttaacttgcccctgccaccagtagattttatgaaaaaccaagaagattccaaccttgagatccagtgtcaggagttctctattcctcccaactctgatcaagatcttaatgaatccctgccacctccacctgcagaactgttataaatattacaacttgctttttagctgatcttccatcctcaaatgactcttttttctttatatgttaacatatataaaatggcaactgatagtcaattttgatttttattcaggaactatctgaaatctgctcagagcctatgtgcatagatgaaacttttttttaaaaaaagttatttaacagtaatctatttactaattatagtacctatctttaaagtatagtacattttacatatgtaaatggtatgtttcaataatttaagaactctgaaacaatctacatatacttattacccagtacagttttttttcccctgaaaagctgtgtataaaattatggtgaataaacttttatgtttccatttcaaagaccagggtggagaggaataagagactaagtatatgcttcaagttttaaattaatacctcaagtattaaataaatattccaagtttgtgggaatgggagattaaaatgcatgtttgagagtaaaaaaaaaaaaaaaaaaaaaaaaaaaaaa

SEQ ID NO: 1907 - DNA, 2386 bp, Homo sapiens
gtttcactgaagaaacttcttagagattcattgcacttctgagatttaatgtttacaacttggagttgtcgaccttcttataagatacattttggaagtcaaaatgaaagttttctgtgaagttttagaagagttatacaagaaggtacttcttggagccacacttgaaaatgacagccatgattacatcttttatctcaacccagcagtttcagatcaagattgttctacagccacctccttagaatgggcaaacacctgtggtatccagggcaggcatcagcccatctctgttggtgtggctcccattgctgtagcacctgtgtgtttgaagaccaactctcagatgagcggttccagagaagtaatgctccttcagttaacagtgatcaaagtgatgacaacccggatattgtctgtcaaaaccgagttccatgcaaaggagcagtacagagatgtaattaaaattctcttagaatcagccaaagtcgattctaaattaatctgcatgttccaaaattcagataaattgttatctcacatggctgcacagtgccttgcattgcttctatatttccaattgagagaaaagataaccttaagtaattcctggattgctttttgccagaaaaatctttctgaatactctgagagtaataaagcaatatactgcctctggactcttacagcaataataaaagaaatctttaaagattcatgttcacagaaaacagaaattctaaagcagttcctgactcatttcgacaccatttttgaagtgttttacaattccttattctctcagcattttgaaaactgccgggatacttctaaaatagtaaacatcctgatgtgtttcctggatttgcttgagcttctcatcgcctccagaatccacctgaagttacatttcacttgccagaggattttatttttgaaaccatcttgcatgctagaagttattacctggcctattcaggcttttgttaaaaggaaggtcatcatattcctcaaaaagtgccttctctgtaaagtgggtgaagacctctgtcgtggatctgtgcctgccttaatgccgccagaccatcatgtagcggtggacatgctggctttagctaatgctgttttgcaagctgtgaattcggggttgttgaagacactgtctgtttatgaaaaacattccttttttggaggtgatgaagttcaacctgaatgtgaacttatcactagtccagatcatgtgatccttagagcagcaagcttagttataatgaaatccttagaaatcaagtttcaaaattattcttcagcaagtgaagtgaaagttgacttacagaggttcatgtctgagttactgaccttcttaaagcctcatcttcagccctctctgcaattacacaatccgtgcaaatggctgtctcgggttttcatagaacaagacgatgacatgctggaggctgccaaggcatcactgggcatctacttaacactgaccagaggatgtgaagccactgaaagcttgactcagggaaaagaaatgtgggaccatcacacacatgaaaatggctataatcctcactgtattttcttgttcttcttgaaaaatataggatttgattccacagttcttcttgactttttgatttcatcagaaacctgttttcttgaatattttgttagatatttaaaattactgcaaaaggactgggataattttttcaccatttgcaataactttgatgcaactgaatctaaatatgacataagtatttgtggctgtgtcccctcacttgtccaagaccaaagctccaaccaaacaataccccatcgtttgactgctcctcatagtcacagagatgtgtgtgctcggcactcctgggcttccgatgctccctctgaaccactgaaagctgtgatgtccaagggggctcacaccatgtgtgcttctagtctgtcttccccccgggcctctcaaagtctggtagattacgacagctctgacgattctgacgtggaatccacagagcagtgtttagctaacagtaaacagacatctttacaccagcaagcaactaaggagattcaggatgcagctgggacaagcagggataaaaaagaatttagccttgagcctccatcaaggcctctggttctgaaagaatttgatactgccttctcctttgattgtgaagtagccccaaatgatgtcgtctctgaagtgggaatattttacagaatagtaaaatgcttccaggaactacaagatgccatctgccgtttgcaaaagaaaaatcttttcccatataatccaactgcacttttgaagttgttaaaatacatagaggtgataagtaataaaactatgaacactttgtaaaacattgac

SEQ ID NO: 1908 - DNA, 1549 bp, Homo sapiens
tttgtgttccctcaaatggcggtgtgaagagagttcgcctgagccagatcccaggtttcactgaagaaacttcttagagattcattgcacttctgagatttaatgtttacaacttggagttgtcgaccttcttataagatacattttggaagtcaaaatgaaagttttctgtgaagttttagaagagttatacaagaaggtacttcttggagccacacttgaaaatgacagccatgattacatcttttatctcaacccagcagtttcagatcaagattgttctacagccacctccttagaatgggcaaacacctgtggtatccagggcaggcatcagcccatctctgttggtgtggctcccattgctgtagcacctgtgtgtttgaagaccaactctcagatgagcggttccagagaagtaatgctccttcagttaacagtgatcaaagtgatgacaacccggatattgtctgtcaaaaccgagttccatgcaaaggagcagtacagagatgtaattaaaattctcttagaatcagccaaagtcgattctaaattaatctgcatgttccaaaattcagataaattgttatctcacatggctgcacagtgccttgcattgcttctatatttccaattgagagaaaagataaccttaagtaattcctggattgctttttgccagaaaaatctttctgaatactctgagagtaataaagcaatatactgcctctggactcttacagcaataataaaagaaatctttaaagattcatgttcacagaaaacagaaattctaaagcagttcctgactcatttcgacaccatttttgaagtgttttacaattccttattctctcagcattttgaaaactgccgggatacttctaaaatagtaaacatcctgatgtgtttcctggatttgcttgagcttctcatcgcctccagaatccacctgaagttacatttcacttgccagaggattttatttttgaaaccatcttgcatgctagaagttattacctggcctattcaggcttttgttaaaaggaaggtcatcatattcctcaaaaagtgccttctctgtaaagtgggtgaagacctctgtcgtggatctgtgcctgccttaatgccgccagaccatcatgtagcggtggacatgctggctttagctaatgctgttttgcaagctgtgaattcggggttgttgaagacactgtctgtttatgaaaaacattccttttttggaggtgatgaagttcaacctgaatgtgaacttatcactagtccagatcatgtgatccttagagcagcaagcttagttataatgaaatccttagaaatcaagtttcaaaattattcttcagcaagtgaagtgaaaggtaattctccaaactccttttgtatgcagtgtgtaattatttacttaagtacagtaattcataattatcaaatctcaggactagtttaaattccagtaatttaagctgtatgttatcctatttgtaacttattacattttaaaaaaaaaaaaaaaaaaaaaaaaaaaaaa

SEQ ID NO: 1909 - DNA, 3675 bp, Homo sapiens
tttgtgttccctcaaatggcggtgtgaagagagttcgcctgagccagatcccaggtttcactgaagaaacttcttagagattcattgcacttctgagatttaatgtttacaacttggagttgtcgaccttcttataagatacattttggaagtcaaaatgaaagttttctgtgaagttttagaagagttatacaagaaggtacttcttggagccacacttgaaaatgacagccatgattacatcttttatctcaacccagcagtttcagatcaagattgttctacagccacctccttagaatgggcaaacacctgtggtatccagggcaggcatcagcccatctctgttggtgtggctcccattgctgtagcacctgtgtgtttgaagaccaactctcagatgagcggttccagagaagtaatgctccttcagttaacagtgatcaaagtgatgacaacccggatattgtctgtcaaaaccgagttccatgcaaaggagcagtacagagatgtaattaaaattctcttagaatcagccaaagtcgattctaaattaatctgcatgttccaaaattcagataaattgttatctcacatggctgcacagtgccttgcattgcttctatatttccaattgagagaaaagataaccttaagtaattcctggattgctttttgccagaaaaatctttctgaatactctgagagtaataaagcaatatactgcctctggactcttacagcaataataaaagaaatctttaaagattcatgttcacagaaaacagaaattctaaagcagttcctgactcatttcgacaccatttttgaagtgttttacaattccttattctctcagcattttgaaaactgccgggatacttctaaaatagtaaacatcctgatgtgtttcctggatttgcttgagcttctcatcgcctccagaatccacctgaagttacatttcacttgccagaggattttatttttgaaaccatcttgcatgctagaagttattacctggcctattcaggcttttgttaaaaggaaggtcatcatattcctcaaaaagtgccttctctgtaaagtgggtgaagacctctgtcgtggatctgtgcctgccttaatgccgccagaccatcatgtagcggtggacatgctggctttagctaatgctgttttgcaagctgtgaattcggggttgttgaagacactgtctgtttatgaaaaacattccttttttggaggtgatgaagttcaacctgaatgtgaacttatcactagtccagatcatgtgatccttagagcagcaagcttagttataatgaaatccttagaaatcaagtttcaaaattattcttcagcaagtgaagtgaaaggtgcgtgaccatggcccactgcagccctgaccccccttcggcccatgctattcctcctgtcccaacctgggaggtcctagcctgggagatcaaggctacagtgagccgcgacccatcgcacacctgcactccagtcctggtgcaacagatggagatcctttcagggagagagagagagagagaggagaagacagagagattaaagaaaaatatgttcactcccacttatgtgtttattgttattattgtttgttgttatttctttgttattgttgtgtttactgtttatttattttgaggcagggtcttgctctgtctcccaggctcactgcagcctcaacgttttgagctgaagtgatcctctcgtctctgtttccccaccccatttgtattaatccttcatacaattagtgtttccactaatgtagattattgaaaattagatattgaattaaagctaatatatgagaagttatattgacaaagaaattgttacatatataatttccagaatagtaactcaggagttcaaagtcttccattttacttgagaaaaatgaatagtaaatgtctctaaacaggcagcatacagattcagtgaaaagtttgaattgtgagcaatgacatcactgaattgctttggatataatttagcttttaataactacacattagttataattctgtgcagttttaatttataacactagatggcacctgttatataattcagttttaaattgtagttcaaactacctaaaacgttttttatttttgtgcttaatagtagtacttctatgctttaaacaaacaaaaaatatgtttttctgttattttgaagacaaaattatttttgcttggttgcattcttggacagacagctctggcatccgatgaagtgatcttagttgtctgctcatttatttatctgcttttagcaagaaatcacataacttttatttctaagagacagttgttaggcagttgttgcaaatagatgatgtagctgtacattttaaatgtatgctctggaatgagtcactttttttccctgagcctcagtgtcctcatttgccaaataaagatgcttcctaactgattcctgatgactttttgaaagtgaattaggataattgcatcttaaggtactttagacactatgaatttatatataggcaagatattcattcattcataaactattgcctacactttgaaattttcattttttgaagttgacttacagaggttcatgtctgagttactgaccttcttaaagcctcatcttcagccctctctgcaattacacaatccgtgcaaatggctgtctcgggttttcatagaacaagacgatgacatgctggaggctgccaaggcatcactgggcatctacttaacactgaccagaggatgtgaagccactgaaagcttgactcagggaaaagaaatgtgggaccatcacacacatgaaaatggctataatcctcactgtattttcttgttcttcttgaaaaatataggatttgattccacagttcttcttgactttttgatttcatcagaaacctgttttcttgaatattttgttagatatttaaaattactgcaaaaggactgggataattttttcaccatttgcaataactttgatgcaactgaatctaaatatgacataagtatttgtggctgtgtcccctcacttgtccaagaccaaagctccaaccaaacaataccccatcgtttgactgctcctcatagtcacagagatgtgtgtgctcggcactcctgggcttccgatgctccctctgaaccactgaaagctgtgatgtccaagggggctcacaccatgtgtgcttctagtctgtcttccccccgggcctctcaaagtctggtagattacgacagctctgacgattctgacgtggaatccacagagcagtgtttagctaacagtaaacagacatctttacaccagcaagcaactaaggagattcaggatgcagctgggacaagcagggataaaaaagaatttagccttgagcctccatcaaggcctctggttctgaaagaatttgatactgccttctcctttgattgtgaagtagccccaaatgatgtcgtctctgaagtgggaatattttacagaatagtaaaatgcttccaggaactacaagatgccatctgccgtttgcaaaagaaaaatcttttcccatataatccaactgcacttttgaagttgttaaaatacatagaggtgataagtaataaaactatgaacactttgtaaaacattgac

SEQ ID NO: 1910 - DNA, 676 bp, Homo sapiens
cggatggggcgtaggtgggcggtgcgcccacagctgcctgggtaaggcccaagatggctgtcttcgccttagtactcgtgtgaagttggcggggacggttcctgtcatcttcttgggcttatttggtgtgctgttgaaggggggagactagagaaatggcagggaacctcttatccggggcaggtaggcgcctgtgggactgggtgcctctggcgtgcagaagcttctctcttggtgtgcctagattgatcggtataaggctcactctcccgccccccaaagtggttgatcgttggaacgagaaaagggccatgttcggagtgtatgacaacatcgggatcctgggaaactttgaaaagcaccccaaagaactgatcagggggcccatatggcttcgaggttggaaagggaatgaattgcaacgttgtatccgaaagaggaaaatggttggaagtagaatgttcgctgatgacctgcacaaccttaataaacgcatccgctatctctacaaacactttaaccgacatgggaagtttcgatagaagagaaagctgagaacttcggaaaaggctcatctgtcaccctggagaagggaaactgtacttttccctgtgaggaaacggctttgtattttctctgtaataaaatggggcttctttggaaaaaaaaaaaaaaa

SEQ ID NO: 1911 - DNA, 8788 bp, Homo sapiens
atgcagtcaggcgagcagcgtcctgggcggattcagaccctggggaagtctggaattcctcaccccgaccctcgtcccggaggctcaggctggcccttccaatggcactggtggcgcgcagcagggccggagccgggccgggccatggccgcctcggagcggctgtacgagttgtggctgctctactacgcgcagaaggacctgggttacctgcagcagtggctgaaggcctttgtaggtgccttcaagaagagcatctcactgtcctctctggagccacgaaggccagaggaggcaggtgcagaggtcccgctgctaccactggatgagctgcatgtgctggccgaacagctgcaccaggctgacctggagcaagccctcctgctgctcaagctcttcatcattctctgcaggaacctggagaacatagaggcaggccggggccaagtgctagtgccccgagtgctggcactgttgaccaagttggtggcggagctgaaaggatgcccaccaccccagggccgaggcacgcagttggagaatgtggccctacatgctctgcttctctgcgagggcctctttgacccttaccaaacctggcggcgccagcgcagtggggaagtcatcagctccaaggagaagagcaaatacaagttccctcctgctgctttgccccaggaattcagcgccttcttccaagagagcctacagaatgcagaccacttgcctcccatactgctgttacgtctcatccacctcttctgcgccgtcctcgctggaggaaaggagaacgggcagatggctgtaagtgatggctctgtgaagggcctgctgagtgtggtgcggggctggagccgtgggccagccccggacccgtgcctagtgccactggctctagaggcactggtaggtgcagtccatgtcttgcatgccagccgcgcacctcctcgtggcccagagcttcgtgccctgcttgagagctacttccatgtccttaatgctgactggccagctggtctgagctcaggccccgaagaggcccttgtcaccctccgggtcagcatgctcgacgccatccccatgatgctggcatgtgaagaccggccagtgctgcaagccaccttcctcagcaacaattgctttgaacacctcactcggctcattcagaacagcaagctgtacctgcagtcccgggcgccccccgagggggacagtgacctggctacccggttactgactgagcccgatgtccaaaaggtcctggaccaagacacagacgccattgcagtccatgtagtcagagtgctgacctgcatcatgagtgactccccctcggccaaggaggtgtttaaggagcgcatcggctaccctcacctgcaggaggttctgcagagccatggtccccccacccatcggctgttgcaagagctgctcaacatggctgtggagggtgaccacagcatgtgcccacctccaccaatccgcaacgagcagccggtactggtgctggcgcagtggctgccgtcattgcccaccgctgagctgcggctcttcctagcgcaacgcctcaggtggctctgtgacagctgccctgccagccgtgccacctgtgtgcaggcaggcctggtgggctgcctgttggagacactcagcacagggctagccctggaggcccgctgccaagagcagctgctggcactgctacaagcactgggccgtgtatcaataaggcccatggagctgcgtcacctgctgcgcccccggccaggattggactcggaaccaggcggagctgaggctggaaaggcccgacacgcaggtgctgtcatccgcacattatcaggcatggccaggcaccagggtcctgcacgtgctctgcgctactttgacctcacgcccagcatggcgggcatcatggtaccccctgtacagcgatggccagggcctggcttcacctttcatgcctggctctgtctgcaccctatggatacagcacctacccctgcccccacccgaccactccagcgaaagcagctgtacagcttctttaccagcagcggctcagggtttgaggccttcttcacggcggccgggaccctggtggtggctgtgtgcacacggaaggagtatttgaccatgagtttgcccgaagtgtcctttgccgactctgcctggcactgcgtggctatcgtccatgtgcctgggcgccggcccttcagccagaacctggtccatgtctacaaagacggccatctggtcaagacagcaccccttcgctgcccctccctcagtgagcctttctcctcctgctgtatcggctccgctggataccgcacaacgaccaccaccacagggctgcccacaccaccagtccccgccaccctggcctacactcaccccgccctcacccgctcccagtcagtcccagcctccacagggcttggctgggggtccgggctggtggcccccctgcaggagggcagcatcgactctaccctcgcaggcacccaggacactcggtggggcagccccacatccctggagggtgagctgggggctgtggccatctttcacgaagccctgcaggcgacggctctgaggaccctgtgcaccctggggcccaatgagacggcacccttcaagcctgagggggagctgcatgagctcagcaccaggctgctcctccattactcacctcaggcttgtaagaacaacatctgcctggacctgtcccccagtcatgggcttgatgggcgcctgacgggccacagagtggagacctgggatgtgaaggatgtggtgaactgcgttgggggtatgggtgccctgctgcccctgctggagcgagtagctgcacagcccaaagaggctgaagcaggtccagctgaaacgcatgacctcgtgggtcctgaactgacctctggtcacaacacccagggcctggttctcccattgggtaaatcttcagaggaacggatggagaggaacgcagtggctgcttttctgctgatgctgcggaacttccttcagggtcacatggtgaaccaagagagcctggtgcagtgccaggggcctgccatcatcggggccctcctgcgaaaggtcccaagctgggccatggacatgaacgtgctcatgtccgcccagctgctgatggagcaggtggcagctgagggcagcgggcccctcctgtacctactctaccagcatttgctcttcaactttcacctctggaccctcagtgacttcgccgtgcgcctcggtcacatccagtacatgtccagcatagttcgggagcacagacagaagctgcggaagaagtacggcgtccagtttatcttggatgctctgcgcacccactacagcccgcagcgggagcgccccctggctgctgacgacctacgcaccgtgcagacctccctcctgggcctggcgagggagttcctggtgcggagtctctcagcagatgacgtgcaggtcacgcagaccatgctgagctttttggcggccacaggcgatgacggtcaggcggtgggtgcgctggacctgctgctggccctgctgcacggttccctggtgcaggagtccttggctgtctttctgttggagccagggaacctcgaagtgctactggccctgctagtgcggccagggtcactgcccctgctgcccgatcgagtctgcaagatcctgcgcagactgcagcagaatgagcggctacctgagcggagccgccagcgcctccggctgcgggagtgtggtctccagggtctggttgcctgcttgcctgaggggactgtttccccccagctctgccagggcctctacaagctgttcctgggggcagattgcctgaacctctcagatctgctggctgtggtacagctgtccctccaggctgacctcagcgttcgcctagacatctgtcgccagcttttccacctcatctacggacagccagatgtagtgcggcttctggcccgacaggctggctggcaagatgtgctgacccggctatatgtcctggaggctgccacagccggcagcccccctccgtcttccccagagtcacctacctcccccaagccagccccacccaagccacccactgagtcacctgctgagccttcagatgtcttcctgccctcagaggccccctgccctgaccctgatggcttttaccatgctctctccccattctgcacgccctttgacctgggcctggaacggtctagtgtaggatcaggcaacactgctggtggtggcggcagcagtgggactcttactccagccagccagcccggcactccttcgccactggatgggccgcggccctttcctgctgctcctggccgccacagctccagtctctccaatgtgctggaggacggcagcctcccggagcccaccattagcggggatgatacctcgaacaccagcaacccacagcaaacctctgaggaagagttgtgcaatctgctcaccaacgtgctgttctcggtgacgtggcgtggcgtggaaggcagcgatgaggctgcctggcgggagcgtggccaggttttctcagtgctcacccagctgggggcctcagccacacttgtgcgcccaccagactgcatcaagcgcagcctcctggagatgatgctggagtcagccctgaccgacatcaaagaggcccccgtgggggtcctggccagcctcacccagcaagcgctttggctgctgcgtctgctgcaggacttcctgtgtgctgaaggccatggtaaccaggaactgtggagtgagaagctctttgaaggtgtatgcagcctacttgatcgcctgggagcctggccccacctggccaacggcacagctgatctccgtgagatggcgcagattggcctacggcttgtacttggctacatcctgctggaagacccacagctgcatgcccaggcctacgtgagattgcacatgctgctacagactgcagtgccagcccgccgcgaggaggcctgctatgtgctctccaagctggaggctgcactggggcgggtgctgaacacctcttccttggagtcagccactgatgaggcagggtccccacttgcagctgcagcagctgcagcagctgcagagcgctgctcctggctggtgccactggtgcgcacgctgctagaccgtgcctatgagccgctggggctgcagtggggactgccctccctgccacccaccaatggcagccccaccttctttgaagacttccaggctttttgtgccacacccgaatggcgccacttcatcgacaaacaggtacagccaaccatgtcccagttcgaaatggacacgtatgctaagagccacgaccttatgtcaggtttctggaatgcctgctatgacatgcttatgagcagtgggcagcggcgccagtgggagcgcgcccagagtcgtcgggccttccaggagctggtgctggaacctgcgcagaggcgggcgcgcctggaggggctacgctacacggcagtgctgaagcagcaggcaacgcagcactccatggccctgctgcactggggggcgctgtggcgccagctcgccagcccatgtggggcctgggcgctgagggacactcccatcccccgctggaaactgtccagcgccgagacatattcacgcatgcgtctgaagctggtgcccaaccatcacttcgaccctcacctggaagccagcgctctccgagacaatctgggtgaggttcccctgacacccaccgaggaggcctcactgcctctggcagtgaccaaagaggccaaagtgagcaccccacccgagttgctgcaggaggaccagctcggcgaggacgagctggctgagctggagaccccgatggaggcagcagaactggatgagcagcgtgagaagctggtgctgtcggccgagtgccagctggtgacggtagtggccgtggtcccagggctgctggaggtcaccacacagaatgtatacttctacgatggcagcactgagcgcgtggaaaccgaggagggcatcggctatgatttccggcgcccactggcccagctgcgtgaggtccacctgcggcgtttcaacctgcgccgttcagcacttgagctcttctttatcgatcaggccaactacttcctcaacttcccatgcaaggtgggcacgaccccagtctcatctcctagccagactcccagaccccagcctggccccatcccaccccatacccaggtacggaaccaggtgtactcgtggctcctgcgcctacggcccccctctcaaggctacctaagcagccgctccccccaggagatgctgcgtgcctcaggccttacccagaaatgggtacagcgtgagatatccaacttcgagtacttgatgcaactcaacaccattgcggggcggacctacaatgacctgtctcagtaccctgtgttcccctgggtcctgcaggactacgtgtccccaaccctggacctcagcaacccagccgtcttccgggacctgtctaagcccatcggtgtggtgaaccccaagcatgcccagctcgtgagggagaagtatgaaagctttgaggacccagcagggaccattgacaagttccactatggcacccactactccaatgcagcaggcgtgatgcactacctcatccgcgtggagcccttcacctccctgcacgtccagctgcaaagtggccgctttgactgctccgaccggcagttccactcggtggcggcagcctggcaggcacgcctggagagccctgccgatgtgaaggagctcatcccggaattcttctactttcctgacttcctggagaaccagaacggttttgacctgggctgtctccagctgaccaacgagaaggtaggcgatgtggtgctacccccgtgggccagctctcctgaggacttcatccagcagcaccgccaggctctggagtcggagtatgtgtctgcacacctacacgagtggatcgacctcatctttggctacaagcagcgggggccagccgccgaggaggccctcaatgtcttctattactgcacctatgagggggctgtagacctggaccatgtgacagatgagcgggaacggaaggctctggagggcattatcagcaactttgggcagactccctgtcagctgctgaaggagccacatccaactcggctctcagctgaggaagcagcccatcgccttgcacgcctggacactaactcacctagcatcttccagcacctggacgaactcaaggcattcttcgcagaggttgtcagtgatggtgtacccctggtgctagccctggtcccccaccggcagccccactccttcatcacccagggttccccagacctgttggtgactgtgagtgccagtgggctgctgggcacccacagctggttgccctatgaccgcaacataagcaactacttcagcttcagcaaagaccccaccatgggcagccacaagacgcagcgactgctgagtggcccgtgggtgccaggcagtggtgtgagtggacaagcactggcagtggccccggatggaaagctgctattcagcggtggccactgggatggcagcctgcgggtgactgcactaccccgtggcaagctgttgagccagctcagctgccaccttgatgtagtaacctgccttgcactggacacctgtggcatctacctcatctcaggctcccgggacaccacgtgcatggtgtggcggctcctgcatcagggtggtctgtcagtaggcctggcaccaaagcctgtgcaggtcctgtatgggcatggggctgcagtgagctgtgtggccatcagcactgaacttgacatggctgtgtctggatctgaggatggaactgtgatcatacacactgtacgccgcggacagtttgtagcggcactacggcctctgggtgccacattccctggacctattttccacctggcattggggtccgaaggccagattgtggtacagagctcagcgtgggaacgtcctggggcccaggtcacctactccttgcacctgtattcagtcaatgggaagttgcgggcttcactgcccctggcagagcagcctacagccctgacggtgacagaggactttgtgttgctgggcaccgcccagtgcgccctgcacatcctccaactaaacacactgctcccggccgcgcctcccttgcccatgaaggtggccatccgcagcgtggccgtgaccaaggagcgcagccacgtgctggtgggcctggaggatggcaagctcatcgtggtggtcgcggggcagccctctgaggtgcgcagcagccagttcgcgcggaagctgtggcggtcctcgcggcgcatctcccaggtgtcctcgggagagacggaatacaaccctactgaggcgcgctgaacctggccagtccggctgctcgggccccgcccccggcaggcctggcccgggaggccccgcccagaagtcggcgggaacaccccggggtgggcagcccaggggggtgagcggggcccaccctgcccagctcagggattggcgggcgatgttaccccctcagggattggcgggcggaagtcccgcccctcgccggctgaggggccgccctgagggccagcactggcgtctgcggccgcagcagcactttttgcacagtctggggcggggttccccggcttccaagtcgctgtttcgtcaaagcacgagggccgcctgtggccttaattcctaacggcggccccggttctcccttctcggcaataaaccaggcctagttttg

SEQ ID NO: 1912 - DNA, 8845 bp, Homo sapiens
atgcagtcaggcgagcagcgtcctgggcggattcagaccctggggaagtctggaattcctcaccccgaccctcgtcccggaggctcaggctggcccttccaatggcactggagaggcggggcggcggtgactgcggcgaagtgcaggaagctgggcggcggccggcagtggcgcgcagcagggccggagccgggccgggccatggccgcctcggagcggctgtacgagttgtggctgctctactacgcgcagaaggacctgggttacctgcagcagtggctgaaggcctttgtaggtgccttcaagaagagcatctcactgtcctctctggagccacgaaggccagaggaggcaggtgcagaggtcccgctgctaccactggatgagctgcatgtgctggccgaacagctgcaccaggctgacctggagcaagccctcctgctgctcaagctcttcatcattctctgcaggaacctggagaacatagaggcaggccggggccaagtgctagtgccccgagtgctggcactgttgaccaagttggtggcggagctgaaaggatgcccaccaccccagggccgaggcacgcagttggagaatgtggccctacatgctctgcttctctgcgagggcctctttgacccttaccaaacctggcggcgccagcgcagtggggaagtcatcagctccaaggagaagagcaaatacaagttccctcctgctgctttgccccaggaattcagcgccttcttccaagagagcctacagaatgcagaccacttgcctcccatactgctgttacgtctcatccacctcttctgcgccgtcctcgctggaggaaaggagaacgggcagatggctgtaagtgatggctctgtgaagggcctgctgagtgtggtgcggggctggagccgtgggccagccccggacccgtgcctagtgccactggctctagaggcactggtaggtgcagtccatgtcttgcatgccagccgcgcacctcctcgtggcccagagcttcgtgccctgcttgagagctacttccatgtccttaatgctgactggccagctggtctgagctcaggccccgaagaggcccttgtcaccctccgggtcagcatgctcgacgccatccccatgatgctggcatgtgaagaccggccagtgctgcaagccaccttcctcagcaacaattgctttgaacacctcactcggctcattcagaacagcaagctgtacctgcagtcccgggcgccccccgagggggacagtgacctggctacccggttactgactgagcccgatgtccaaaaggtcctggaccaagacacagacgccattgcagtccatgtagtcagagtgctgacctgcatcatgagtgactccccctcggccaaggaggtgtttaaggagcgcatcggctaccctcacctgcaggaggttctgcagagccatggtccccccacccatcggctgttgcaagagctgctcaacatggctgtggagggtgaccacagcatgtgcccacctccaccaatccgcaacgagcagccggtactggtgctggcgcagtggctgccgtcattgcccaccgctgagctgcggctcttcctagcgcaacgcctcaggtggctctgtgacagctgccctgccagccgtgccacctgtgtgcaggcaggcctggtgggctgcctgttggagacactcagcacagggctagccctggaggcccgctgccaagagcagctgctggcactgctacaagcactgggccgtgtatcaataaggcccatggagctgcgtcacctgctgcgcccccggccaggattggactcggaaccaggcggagctgaggctggaaaggcccgacacgcaggtgctgtcatccgcacattatcaggcatggccaggcaccagggtcctgcacgtgctctgcgctactttgacctcacgcccagcatggcgggcatcatggtaccccctgtacagcgatggccagggcctggcttcacctttcatgcctggctctgtctgcaccctatggatacagcacctacccctgcccccacccgaccactccagcgaaagcagctgtacagcttctttaccagcagcggctcagggtttgaggccttcttcacggcggccgggaccctggtggtggctgtgtgcacacggaaggagtatttgaccatgagtttgcccgaagtgtcctttgccgactctgcctggcactgcgtggctatcgtccatgtgcctgggcgccggcccttcagccagaacctggtccatgtctacaaagacggccatctggtcaagacagcaccccttcgctgcccctccctcagtgagcctttctcctcctgctgtatcggctccgctggataccgcacaacgaccaccaccacagggctgcccacaccaccagtccccgccaccctggcctacactcaccccgccctcacccgctcccagtcagtcccagcctccacagggcttggctgggggtccgggctggtggcccccctgcaggagggcagcatcgactctaccctcgcaggcacccaggacactcggtggggcagccccacatccctggagggtgagctgggggctgtggccatctttcacgaagccctgcaggcgacggctctgaggaccctgtgcaccctggggcccaatgagacggcacccttcaagcctgagggggagctgcatgagctcagcaccaggctgctcctccattactcacctcaggcttgtaagaacaacatctgcctggacctgtcccccagtcatgggcttgatgggcgcctgacgggccacagagtggagacctgggatgtgaaggatgtggtgaactgcgttgggggtatgggtgccctgctgcccctgctggagcgagtagctgcacagcccaaagaggctgaagcaggtccagctgaaacgcatgacctcgtgggtcctgaactgacctctggtcacaacacccagggcctggttctcccattgggtaaatcttcagaggaacggatggagaggaacgcagtggctgcttttctgctgatgctgcggaacttccttcagggtcacatggtgaaccaagagagcctggtgcagtgccaggggcctgccatcatcggggccctcctgcgaaaggtcccaagctgggccatggacatgaacgtgctcatgtccgcccagctgctgatggagcaggtggcagctgagggcagcgggcccctcctgtacctactctaccagcatttgctcttcaactttcacctctggaccctcagtgacttcgccgtgcgcctcggtcacatccagtacatgtccagcatagttcgggagcacagacagaagctgcggaagaagtacggcgtccagtttatcttggatgctctgcgcacccactacagcccgcagcgggagcgccccctggctgctgacgacctacgcaccgtgcagacctccctcctgggcctggcgagggagttcctggtgcggagtctctcagcagatgacgtgcaggtcacgcagaccatgctgagctttttggcggccacaggcgatgacggtcaggcggtgggtgcgctggacctgctgctggccctgctgcacggttccctggtgcaggagtccttggctgtctttctgttggagccagggaacctcgaagtgctactggccctgctagtgcggccagggtcactgcccctgctgcccgatcgagtctgcaagatcctgcgcagactgcagcagaatgagcggctacctgagcggagccgccagcgcctccggctgcgggagtgtggtctccagggtctggttgcctgcttgcctgaggggactgtttccccccagctctgccagggcctctacaagctgttcctgggggcagattgcctgaacctctcagatctgctggctgtggtacagctgtccctccaggctgacctcagcgttcgcctagacatctgtcgccagcttttccacctcatctacggacagccagatgtagtgcggcttctggcccgacaggctggctggcaagatgtgctgacccggctatatgtcctggaggctgccacagccggcagcccccctccgtcttccccagagtcacctacctcccccaagccagccccacccaagccacccactgagtcacctgctgagccttcagatgtcttcctgccctcagaggccccctgccctgaccctgatggcttttaccatgctctctccccattctgcacgccctttgacctgggcctggaacggtctagtgtaggatcaggcaacactgctggtggtggcggcagcagtgggactcttactccagccagccagcccggcactccttcgccactggatgggccgcggccctttcctgctgctcctggccgccacagctccagtctctccaatgtgctggaggacggcagcctcccggagcccaccattagcggggatgatacctcgaacaccagcaacccacagcaaacctctgaggaagagttgtgcaatctgctcaccaacgtgctgttctcggtgacgtggcgtggcgtggaaggcagcgatgaggctgcctggcgggagcgtggccaggttttctcagtgctcacccagctgggggcctcagccacacttgtgcgcccaccagactgcatcaagcgcagcctcctggagatgatgctggagtcagccctgaccgacatcaaagaggcccccgtgggggtcctggccagcctcacccagcaagcgctttggctgctgcgtctgctgcaggacttcctgtgtgctgaaggccatggtaaccaggaactgtggagtgagaagctctttgaaggtgtatgcagcctacttgatcgcctgggagcctggccccacctggccaacggcacagctgatctccgtgagatggcgcagattggcctacggcttgtacttggctacatcctgctggaagacccacagctgcatgcccaggcctacgtgagattgcacatgctgctacagactgcagtgccagcccgccgcgaggaggcctgctatgtgctctccaagctggaggctgcactggggcgggtgctgaacacctcttccttggagtcagccactgatgaggcagggtccccacttgcagctgcagcagctgcagcagctgcagagcgctgctcctggctggtgccactggtgcgcacgctgctagaccgtgcctatgagccgctggggctgcagtggggactgccctccctgccacccaccaatggcagccccaccttctttgaagacttccaggctttttgtgccacacccgaatggcgccacttcatcgacaaacaggtacagccaaccatgtcccagttcgaaatggacacgtatgctaagagccacgaccttatgtcaggtttctggaatgcctgctatgacatgcttatgagcagtgggcagcggcgccagtgggagcgcgcccagagtcgtcgggccttccaggagctggtgctggaacctgcgcagaggcgggcgcgcctggaggggctacgctacacggcagtgctgaagcagcaggcaacgcagcactccatggccctgctgcactggggggcgctgtggcgccagctcgccagcccatgtggggcctgggcgctgagggacactcccatcccccgctggaaactgtccagcgccgagacatattcacgcatgcgtctgaagctggtgcccaaccatcacttcgaccctcacctggaagccagcgctctccgagacaatctgggtgaggttcccctgacacccaccgaggaggcctcactgcctctggcagtgaccaaagaggccaaagtgagcaccccacccgagttgctgcaggaggaccagctcggcgaggacgagctggctgagctggagaccccgatggaggcagcagaactggatgagcagcgtgagaagctggtgctgtcggccgagtgccagctggtgacggtagtggccgtggtcccagggctgctggaggtcaccacacagaatgtatacttctacgatggcagcactgagcgcgtggaaaccgaggagggcatcggctatgatttccggcgcccactggcccagctgcgtgaggtccacctgcggcgtttcaacctgcgccgttcagcacttgagctcttctttatcgatcaggccaactacttcctcaacttcccatgcaaggtgggcacgaccccagtctcatctcctagccagactcccagaccccagcctggccccatcccaccccatacccaggtacggaaccaggtgtactcgtggctcctgcgcctacggcccccctctcaaggctacctaagcagccgctccccccaggagatgctgcgtgcctcaggccttacccagaaatgggtacagcgtgagatatccaacttcgagtacttgatgcaactcaacaccattgcggggcggacctacaatgacctgtctcagtaccctgtgttcccctgggtcctgcaggactacgtgtccccaaccctggacctcagcaacccagccgtcttccgggacctgtctaagcccatcggtgtggtgaaccccaagcatgcccagctcgtgagggagaagtatgaaagctttgaggacccagcagggaccattgacaagttccactatggcacccactactccaatgcagcaggcgtgatgcactacctcatccgcgtggagcccttcacctccctgcacgtccagctgcaaagtggccgctttgactgctccgaccggcagttccactcggtggcggcagcctggcaggcacgcctggagagccctgccgatgtgaaggagctcatcccggaattcttctactttcctgacttcctggagaaccagaacggttttgacctgggctgtctccagctgaccaacgagaaggtaggcgatgtggtgctacccccgtgggccagctctcctgaggacttcatccagcagcaccgccaggctctggagtcggagtatgtgtctgcacacctacacgagtggatcgacctcatctttggctacaagcagcgggggccagccgccgaggaggccctcaatgtcttctattactgcacctatgagggggctgtagacctggaccatgtgacagatgagcgggaacggaaggctctggagggcattatcagcaactttgggcagactccctgtcagctgctgaaggagccacatccaactcggctctcagctgaggaagcagcccatcgccttgcacgcctggacactaactcacctagcatcttccagcacctggacgaactcaaggcattcttcgcagaggttgtcagtgatggtgtacccctggtgctagccctggtcccccaccggcagccccactccttcatcacccagggttccccagacctgttggtgactgtgagtgccagtgggctgctgggcacccacagctggttgccctatgaccgcaacataagcaactacttcagcttcagcaaagaccccaccatgggcagccacaagacgcagcgactgctgagtggcccgtgggtgccaggcagtggtgtgagtggacaagcactggcagtggccccggatggaaagctgctattcagcggtggccactgggatggcagcctgcgggtgactgcactaccccgtggcaagctgttgagccagctcagctgccaccttgatgtagtaacctgccttgcactggacacctgtggcatctacctcatctcaggctcccgggacaccacgtgcatggtgtggcggctcctgcatcagggtggtctgtcagtaggcctggcaccaaagcctgtgcaggtcctgtatgggcatggggctgcagtgagctgtgtggccatcagcactgaacttgacatggctgtgtctggatctgaggatggaactgtgatcatacacactgtacgccgcggacagtttgtagcggcactacggcctctgggtgccacattccctggacctattttccacctggcattggggtccgaaggccagattgtggtacagagctcagcgtgggaacgtcctggggcccaggtcacctactccttgcacctgtattcagtcaatgggaagttgcgggcttcactgcccctggcagagcagcctacagccctgacggtgacagaggactttgtgttgctgggcaccgcccagtgcgccctgcacatcctccaactaaacacactgctcccggccgcgcctcccttgcccatgaaggtggccatccgcagcgtggccgtgaccaaggagcgcagccacgtgctggtgggcctggaggatggcaagctcatcgtggtggtcgcggggcagccctctgaggtgcgcagcagccagttcgcgcggaagctgtggcggtcctcgcggcgcatctcccaggtgtcctcgggagagacggaatacaaccctactgaggcgcgctgaacctggccagtccggctgctcgggccccgcccccggcaggcctggcccgggaggccccgcccagaagtcggcgggaacaccccggggtgggcagcccaggggggtgagcggggcccaccctgcccagctcagggattggcgggcgatgttaccccctcagggattggcgggcggaagtcccgcccctcgccggctgaggggccgccctgagggccagcactggcgtctgcggccgcagcagcactttttgcacagtctggggcggggttccccggcttccaagtcgctgtttcgtcaaagcacgagggccgcctgtggccttaattcctaacggcggccccggttctcccttctcggcaataaaccaggcctagttttg

SEQ ID NO: 1913 - DNA, 3970 bp, Homo sapiens
ggaagttctgccttgtctccgccgcgggtcaggggtgagagctggaatctctgcacgggccttggaaaacgactgtcttcttctgccaaaatgtcaggaattggaaataaaagagcagctggagaacctggcacctccatgcctcctgagaagaaggcagctgttgaagattcagggaccacagtggaaacaattaagctaggaggtgtctcttcaacggaggaactagacattagaacactgcaaaccaaaaatcgcaagctggcagaaatgttggatcagcggcaggccattgaagatgaacttcgtgagcacattgaaaaactggaacgacgacaggccactgatgatgcctcactattgattgtcaaccgatactggagtcagtttgatgaaaacatccgtatcatccttaaacgttatgatctggagcagggcttgggagacctactcacagaacgaaaagcccttgttgtgcctgaaccagaaccagactctgatagcaatcaggagcgtaaagatgaccgagagagaggggaagggcaagagccagctttctctttccttgctactttggccagcagttccagtgaagagatggagtctcagctgcaggaacgtgtggagtcttcccgccgagccgtgtcccagattgtgactgtttatgataaattgcaagaaaaagtggagctcttatcccggaagctaaacagtggagataatctgatagtggaggaagcagtgcaggagctgaactctttcctcgcacaggagaatatgaggctacaggaattgacagatcttcttcaggaaaagcatcgcaccatgtctcaggagttctccaagttgcagagtaaagtggagacagccgaatcacgagtgtctgtcctggagtccatgattgatgacctgcagtgggatattgacaaaattcgaaagagggaacagcgactcaaccgacacttagcagaagtcctagaacgggtgaattccaaaggttataaggtgtatggagcggggagcagtctgtatggcggcacaatcactatcaatgctcggaagtttgaggaaatgaatgcagagcttgaggagaacaaagagttggctcagaaccgtctctgtgagctggagaaacttcggcaagactttgaggaggtcactacacaaaatgaaaagctgaaggtggaattgcggagtgcagtggagcaagtcgttaaggaaactccagaatatcgctgcatgcagtcacagttctccgtcttgtataatgagagcctacagttgaaagcacacttggatgaggctcggaccctgcttcatggcaccagaggaacccaccagcaccaggttgagcttattgagcgagatgaggttagtcttcataagaagctgaggactgaagtaattcagctagaagatacattggcccaggtccgcaaggagtatgaaatgctgaggatagaatttgagcagacccttgctgccaatgaacaagcaggccctataaacagggagatgcgccacctcatcagtagcctccagaatcacaatcaccagctgaaaggggaggtcctgagatataagcggaaattgagagaagcccagtctgacctgaacaagacacgcctgcgtagtggtagtgccctcctgcagtcccagtctagtactgaggacccgaaggatgagcctgcggagctaaaaccagattctgaggacttatcctcccagtcctcagcttcaaaggcatctcaggaggatgccaatgaaatcaagtctaaacgggatgaagaagaacgagaacgagaaaggagggagaaggagagggaacgagaaagagaacgggagaaggagaaggagagagaacgagagaagcagaagctaaaagagtcagaaaaagagagagattctgctaaggataaagagaaaggcaaacatgatgatggacggaaaaaggaagcagaaattatcaaacaattgaagattgaactcaagaaggcacaggagagccaaaaggagatgaaactattgctggatatgtaccgttctgccccaaaggaacagagagacaaagttcagctgatggcagctgagaagaagtctaaggcagagttggaagatctaaggcaaagactcaaggatctggaagataaagagaagaaagagaacaagaaaatggctgatgaggatgccttgaggaagatccgggcagtggaggagcagatagaatacctacagaagaagctagccatggccaagcaggaagaagaagcactcctctctgaaatggatgtcacaggccaggcctttgaagacatgcaggagcaaaatatccgtttgatgcagcaattgcgggagaaggatgatgcaaatttcaagctcatgtcagagcgtatcaagtccaatcagatccataagttgcttaaagaagagaaggaggagctggcagaccaggtgttgactctgaagactcaggttgatgcccagctacaggtagtaaggaaactggaagagaaggagcatctgttacagagcaacattggcacaggggagaaagagctgggtcttaggacccaagccttagagatgaataaacgcaaggcaatggaggcagcccagcttgcagatgacctcaaagcacaactggagttggctcagaagaagctacatgattttcaggatgagatcgtggagaacagtgttaccaaagaaaaggacatgttcaatttcaaacgagcccaggaggacatctctagacttcgcaggaagctggagaccacaaagaaaccagacaatgtacccaagtgtgatgagattctgatggaagagattaaggattacaaggcacgcttgacctgtccgtgctgtaacatgcgtaaaaaggatgctgttcttactaagtgttttcatgtcttctgctttgagtgtgtgaagacacgctatgacacccgccagcgcaaatgtcccaagtgtaatgctgcttttggtgccaatgattttcatcgcatctacattggttgatctaagtcaagagaagaagaggagctggctagtcaggaacttattcattaaccaccaaacctctacctcttctctccttgactgtcacctgtaggacagtttatcagtcaactacctttcctccagactttacttccaggctctcctcttcagtagctggatgactttagcagaaaggactggtaaatacaagccttgggtttcagaatgaattagaaacaaataactcttactgtcttccctcccagctttgtttattttgtgcttttagacttttcagtgttttctttttccagcccactgtataaacttggattgtccattcctcctgaagaaatcaagttggtatttttgatgtggaaaagggaacaaaagtggaaacatggctacttttggggagtgatattttaaaaaataagttgtctatgggcacaaagttttcttcatttgtgtagcaaacttcttgtgaatgtggattacaaaatggtataattgtgctactctcccctgggtggtttgcagccctaatgaaattatgtctaggatgattcagtctatttcccatttactagcagagtaacttgttaagatcagctggctttcttgttaaagttatttaagttttgaatgctctactacttcaagtctttaaatttcttgagactagaataattttaaataatatgaccctttgtcttctaatgaaataaagattgaagaggttgagtcaggactgagctggtgaagaaatcttgtgggtattctggaaatttgatacggagagaacttggtgagctatgaattactctcagtctcctttttacagggttgttgtgatccctcttttccagaaaattctgtggaatgtttctgtaggactttgttctccacaagcttgaattaaagcaggattcagtttgcaaaaaaaaaaaaaaaaaaaaaaaaaaaaaaa

SEQ ID NO: 1914 - DNA, 1362 bp, Homo sapiens
gggggggaggactgggtgcgcctgcagggatcggaagccggttggggtgtgagaggttttctcgctctagggagattcttcaagcaatcactatgtcaacagacacaggtgtttcccttccttcatatgaggaagatcagggatcaaaactcattcgaaaagctaaagaggcaccattcgtacccgttggaatagcgggttttgcagcaattgttgcatatggattatataaactgaagagcaggggaaatactaaaatgtccattcatctgatccacatgcgtgtggcagcccaaggctttgttgtaggagcaatgactgttggtatgggctattccatgtatcgggaattctgggcaaaacctgagccttagaagaagagatgctgtcttggtcttgttggaggagcttgctttagttagatgtcttattattaaagttacctattattgttggaaataaactaatttgtatgggtttagatggtaacatggcattttgaatattggcttcctttcttgcaggcttgatttgcttggtgaccgaattactagtgactagtttactaactaggtcattcaaggaagtcaagttaacttaaacatgtcacctaaatgcacttgatggtgttgaaatgtccaccttcttaaatttttaagatgaacttagttctaaagaagataacaggccaatcctgaaggtactccctgtttgctgcagaatgtcagatattttggatgttgcataagagtcctatttgccccagttaattcaactttcgtctgcctgttttgtggactggctggctctgttagaactctgtccaaaaagtgcatggaatataacttgtaaagcttcccacaattgacaatatatatgcatgtgtttaaaccaaatccagaaagcttaaacaatagagctgcataatagtatttattaaagaatcaccaactgtaaacatgagaataacttaaggttctagtttagttttttgtaattgcaaattatatttttgctgctgatatattagaataattttaaaatgtcatcttgaaatagaaatatgtattttaagcactcacgcaaaggtaaatgaacacgttttaaatgtgtgtgttgctaattttttccataagaattgtaaacattgaactgaacaaattacctataatggatttggttaatgacttatgagcaagctggtttggccagacagtatacccaaacttttatataatatacagaaggctatcacacttgtgaaattctcttgtctaatctgaatttgcattccatggtgttaacatggtatatgtattgttattaaagtaagtgacccatgaaaaaaaaaaaaaaaaaaaa

SEQ ID NO: 1915 - DNA, 1993 bp, Homo sapiens
ctagttaaggcggcacagggccgaggcgtagtgtgggtgactcctccgttccttgggtcccgtcgtctgtgatactgcagttcagccatggcagaaccgcagcccccgtccggcggcctcacggacgaggccgccctcagttgctgctccgacgcggaccccagtaccaaggattttctattgcagcagaccatgctacgagtgaaggatcctaagaagtcactggatttttatactagagttcttggaatgacgctaatccaaaaatgtgattttcccattatgaagttttcactctacttcttggcttatgaggataaaaatgacatccctaaagaaaaagatgaaaaaatagcctgggcgctctccagaaaagctacacttgagctgacacacaattggggcactgaagatgatgcgacccagagttaccacaatggcaattcagaccctcgaggattcggtcatattggaattgctgttcctgatgtatacagtgcttgtaaaaggtttgaagaactgggagtcaaatttgtgaagaaacctgatgatggtaaaatgaaaggcctggcatttattcaagatcctgatggctactggattgaaattttgaatcctaacaaaatggcaaccttaatgtagtgctgtgagaattctcctttgagatttcagaagaaaggaaacaatgtgattcaagatatttacataccagaagcatctaggactgatggatcactgtcccgattcaaattattcttcagtccatttccccttcctatttcagctgttccttttcacctaactgttcagtcattctggttttcaagcagtgctttatctcatgtccttgaatatagttgtgtaactttattttttaggtaataattagaacagttcccttcagaggctgcatttgccttcttctgccacctaaatattacttcccttcaaatctgcctttgaatcatcatttttaaaaaaaaattaacatgtttttgttgtagttatcttctggggtttcaattcctcagaaacaacttttttcacaacggaaaggaaagaacactagtgttctttcagtaaagtacaaagtgtttattttacaaaagagtaggtactcttgagagcaattcaaatcatgctgacaaggatactgatagaaaaagtgatttcttcttattataaagtacatttaaagttcaaggactaaccttatttatttgggaaaggggaggaggaaggaaatgatatggtacccagacactgggctaggctgcaactttatctcatttaatactcccagctgtcatgtgagaaagaaagcaggctaggcatgtgaaatcactttcatggattattaatggatttaagagggcatcaatcagctcaactcaagatttcataatcatttttagtatttagattgtgcctcaaagttgtagtacctcacaatacctccactggtttcctgttgtaaaaaccttcagtgagtttgaccattgtgctcttggctcttgggctggagtaccgtggtgagggagtaaacactagaagtctttagtacaaaactgctctagggacacctggtgattcctacacaagtgatgtttatatttctcataaagagtcttccctatcccaaggtcttcatgatgccagtagccatatatgataaattatgttcagtgataacttagttatcagaaatcagctcagtggtcttccccgccatgattcacatttgatgagtttttaaaaatcaaagtgattttgaaaatctctaatggctcagaaaataaaaacatccagtttgtggatgactatatttagatttctctagactctagtggaagacctttggaaaggccatgccaaccgtgcttgtactgctagaagcactttatgtttcctttttgggtgaaatggatttatgtgagtgctttaaacaaatagcaatacttatagactgaaataaaatgaaacttcaaataag

SEQ ID NO: 1916 - DNA, 4201 bp, Homo sapiens
cagtaccggcctcctccagcagggggcgctgtgggatccgccgctgtccgggacgaaccagcaagccgctctcggtccacacacgctctgtctgcctgccccgagtcccccgggaggccgcggggtttggggaagtgtttctaggagacggcgctcaccggctgcacctgcgccgttgacgccaccggggccggcagacagacccgcggcgctggctggtggagggagttcccgcttgctctctgtcgctgtcaccgccctgtttctgtagccgtatggtacgcctgtgagaccggctgccggctgacgtctccttgcgatggagcatatccggacgaccaaggtcgaacaagtaaaattacttgaccgattcagtaccagcaacaagtcattaacaggaacactgtatcttacggctacacatctattatttatcgactctcatcaaaaagaaacctggatattacaccaccatattgcctcagtagagaaacttgctttgactacttctggatgcccccttgtgatacagtgcaagaacttcagaactgtgcatttcattgttcccagagaaagagattgccatgatatttacaactctttgctacaactgtcaaaacaagcaaaatatgaagatctctatgcattttcttataatcccaaacaaaatgattcagaacgactacaaggctggcagctcattgatctcgctgaggaatataagaggatgggagtgccaaactcacactggcagttgtctgatgccaaccgggactacaagatttgtgaaacttaccccagagaactttatgttccccggatagcaagcaaaccaataattgttggtagttccaagttccggagcaagggaagattcccagttctttcctactatcatcaagataaggaggctgccatttgtcgatgtagtcagccactctctggattcagtgccaggtgcctggaggatgaacatttgcttcaagccattagtaaagccaatccagtcaatcgctatatgtacgtcatggataccaggccaaaactgaatgcaatggccaacagagcagctggaaaaggttatgaaaatgaagacaactattccaatattagatttcagtttgttggaattgaaaatattcatgtcatgaggtccagccttcagaaattattggaagtcaatggcactaaagggctttctgtcaatgatttctactccggtttggagagctcgggatggcttcgccatatcaaagctgttatggatgctgcagtcttcttggccaaagcaataacagttgaaaatgcaagtgtgttggtgcattgttccgatggttgggataggacttcccaggtttgttccctgggttctcttttattggattcctactacaggacaatcaaaggattcatggttttaatagaaaaggattggatctcttttggacataaattttcagagaggtgtggccagttggatggtgacccaaaggaagtctcaccagtgtttactcagttcttggaatgtgtgtggcatttgaccgaacagtttccacaagcctttgaattcagtgaagcatttcttcttcagatccatgagcatattcattcatgccagtttggaaacttccttggaaattgtcagaaggaaagagaagagctcaagttgaaggagaagacttattccctgtggccatttcttttggaagaccaaaagaagtacttaaatcctctctacagttccgaatctcacagatttacagttttggagccaaatacagtatctttcaattttaagttttggaggaacatgtaccatcaatttgatcgaacactgcatcctaggcagtctgtatttaatataattatgaatatgaatgagcaaaataaacaattagagaaagatattaaagacctagaatctaaaattaaacaacgcaaaaataagcaaacagatggcatcctcaccaaggaattgttacattcagttcatcctgaatcacctaacctcaaaacttccctgtgttttaaagagcagactctgctacccgtaaatgatgctcttcgaactatagagggcagcagcccggcagataatcgttatagtgaatatgcagaagagttttctaaatcagaacctgctgtggtcagcttagagtatggtgtggcaagaatgacttgttagactcatagagttttttctgcaatgattgcagtacaagaaaaggattattgtgaggatggtctgtaagcataaccaaaaggaatttgtctaataacaattttagggtttaacagtaggctaatagttgaaggaaggataataactacccttgtgagagaaataagtcattttaattgcatttccagcaaggaatgacattcagttctgtaagaaatgagtggtatttgatgtatttactcaaaacacaatttgcactgtacactagtgaattgacgtttatgatttatgttaattcagccaaacataaataaccttccttaagtacaatttaacttcaagaaaacaaaatttgacaacatagtttcttaataaatgatatggcatgtactttcaattatgtagctttgtaactatgaatatttacatattttgccttttagtgatatttaatgttaaagtgccatgaaaaatatttctaagaaagccttaaattcccagtggattctttacccttaagttttacagcctacaacaagattttttgttttgtttttcttctggtcagccttgttttgtttgtaaagaattgtgctctcattactgctgggggtgcatgctacaatacttctatataaacacttgtagaagtacactgttcacgtttagcctgccccacttttgtattcaaaattaatgaaactgaaggtttattctgatcataatttgtttagtgctacatttgataatttattatttacagcttagaatattgatttcttgaatacgtataagcacatttgactgtcttttatatatggattactgcattccattgattcttattttgtggttggctttatttctttcacaactgtgtaagtttaaagagctaaagctctaaaactgttctgagaaacaatgaatagtacatgtatatgtatatttttaaactgccttattgctcaatgagttgctgttcctggagtatctaactttcagtttactcaaaaacttttgggtaaataaaaaagggaagtacagatagtttaggttgtgcatggttgcatgaattttgaagtcatttctatgtggagcattatttttcttcttgttaaatatagaaaaaaaaagagattctagtacaaagttactgtttaacaaaagcaacataaactctgggaaagatttcattttgccatgttatatttactgtttattctgtgtactagtacatatctttaaattaccaaaaaacaagaaacaaaacataaaaaccccaaaactatcacttggaattagcaatatcacccaactggctttaaaattgaaaatttaaataacatggtggcatgaagtacaattcgagtattaggcaatttgcatagtgttcctcatgctactttctgttacacctctattatattagttttgaatataaacatctttttcagaccaaaaaaaactttattgtatgagagcttatcttatcctgtttatttttccaatgcttttctgtaatacattatgtaatttaaaaaatattcctttttaaacagcaacagaaatgcactataaaatatagtatgtgattaaccaatcctgcttccatatttaagcactgggaatggaaacttaatctctgtgactacaaagggaagtttttgtgccttggtgttccagtcactgattgtggttttagaatcttctgtggctgacttcttgtattcaactctggtttattatcttaatcttcaacttcagacatatatttgtgtgtttatatgctcacaggtggactgagaaatcagttacatcttaagtgacctacagggtatatgttggcaaaagcagactgtgtatatgtcttataaagttgaatttatgttcagtgtgtttggaagtgtatagcatgtaaattatttcatatatgatttaaaggtaattaaatgttcacattttactttgaatgtttttcttctggataaaacaaatggaatcaaaaaaaaaaaaaaaaaa

SEQ ID NO: 1917 - DNA, 1291 bp, Homo sapiens
ctgtgattctcactatactggtcctgaggaaagggcttctgtgaactgcggtttttagtttttattgtggttcttagttctcatgagacccctcttgaggatatgtgcctatctggtgcctctgctctccactagttgagtgaaaggaaggaggtaatttaccaccatgtttggttcctgtttataagatgttttaagaaagatttgaaacagattttctgaagaaagcagaagctctcttcccattatgacttcggaaatcacttatgctgaagtgaggttcaaaaatgaattcaagtcctcaggcatcaacacagcctcttctgcagcttccaaggagaggactgcccctcacaaaagtaataccggattccccaagctgctttgtgcctcactgttgatatttttcctgctattggcaatctcattctttattgcttttgtcattttctttcaaaaatattctcagcttcttgaaaaaaagactacaaaagagctggttcatacaacattggagtgtgtgaaaaaaaatatgcccgtggaagagacagcctggagctgttgcccaaagaattggaagtcatttagttccaactgctactttatttctactgaatcagcatcttggcaagacagtgagaaggactgtgctagaatggaggctcacctgctggtgataaacactcaagaagagcaggatttcatcttccagaatctgcaagaagaatctgcttattttgtggggctctcagatccagaaggtcagcgacattggcaatgggttgatcagacaccatacaatgaaagttccacattctggcatccacgtgagcccagtgatcccaatgagcgctgcgttgtgctaaattttcgtaaatcacccaaaagatggggctggaatgatgttaattgtcttggtcctcaaaggtcagtttgtgagatgatgaagatccacttatgaactgaacattctccatgaacaggtggttggattggtatctgtcattgtagggatagataataagctcttcttattcatgtgtaagggaggtccatagaatttaggtggtctgtcaactattctacttatgagagaattggtctgtacattgactgattcactttttcataaagtgagcatttattgagcattttttcatgtgccagagcctgtactggaggcccccattgtgcacacatggagagaacatgagtctctcttaatttttatctggttgctaaagaattatttaccaataaaattatatgatgtggtgtctcaaaaaaaaaa

SEQ ID NO: 1918 - DNA, 1171 bp, Homo sapiens
ctgtgattctcactatactggtcctgaggaaagggcttctgtgaactgcggtttttagtttttattgtggttcttagttctcatgagacccctcttgaggatatgtgcctatctggtgcctctgctctccactagttgagtgaaaggaaggaggtaatttaccaccatgtttggttcctgtttataagatgttttaagaaagatttgaaacagattttctgaagaaagcagaagctctcttcccattatgacttcggaaatcacttatgctgaagtgaggttcaaaaatgaattcaagtcctcaggcatcaacacagcctcttctgcagtctttcaaaaatattctcagcttcttgaaaaaaagactacaaaagagctggttcatacaacattggagtgtgtgaaaaaaaatatgcccgtggaagagacagcctggagctgttgcccaaagaattggaagtcatttagttccaactgctactttatttctactgaatcagcatcttggcaagacagtgagaaggactgtgctagaatggaggctcacctgctggtgataaacactcaagaagagcaggatttcatcttccagaatctgcaagaagaatctgcttattttgtggggctctcagatccagaaggtcagcgacattggcaatgggttgatcagacaccatacaatgaaagttccacattctggcatccacgtgagcccagtgatcccaatgagcgctgcgttgtgctaaattttcgtaaatcacccaaaagatggggctggaatgatgttaattgtcttggtcctcaaaggtcagtttgtgagatgatgaagatccacttatgaactgaacattctccatgaacaggtggttggattggtatctgtcattgtagggatagataataagctcttcttattcatgtgtaagggaggtccatagaatttaggtggtctgtcaactattctacttatgagagaattggtctgtacattgactgattcactttttcataaagtgagcatttattgagcattttttcatgtgccagagcctgtactggaggcccccattgtgcacacatggagagaacatgagtctctcttaatttttatctggttgctaaagaattatttaccaataaaattatatgatgtggtgtctcaaaaaaaaaa

SEQ ID NO: 1919 - DNA, 1075 bp, Homo sapiens
ctgtgattctcactatactggtcctgaggaaagggcttctgtgaactgcggtttttagtttttattgtggttcttagttctcatgagacccctcttgaggatatgtgcctatctggtgcctctgctctccactagttgagtgaaaggaaggaggtaatttaccaccatgtttggttcctgtttataagatgttttaagaaagatttgaaacagattttctgaagaaagcagaagctctcttcccattatgacttcggaaatcacttatgctgaagtgaggttcaaaaatgaattcaagtcctcaggcatcaacacagcctcttctgcagagacagcctggagctgttgcccaaagaattggaagtcatttagttccaactgctactttatttctactgaatcagcatcttggcaagacagtgagaaggactgtgctagaatggaggctcacctgctggtgataaacactcaagaagagcaggatttcatcttccagaatctgcaagaagaatctgcttattttgtggggctctcagatccagaaggtcagcgacattggcaatgggttgatcagacaccatacaatgaaagttccacattctggcatccacgtgagcccagtgatcccaatgagcgctgcgttgtgctaaattttcgtaaatcacccaaaagatggggctggaatgatgttaattgtcttggtcctcaaaggtcagtttgtgagatgatgaagatccacttatgaactgaacattctccatgaacaggtggttggattggtatctgtcattgtagggatagataataagctcttcttattcatgtgtaagggaggtccatagaatttaggtggtctgtcaactattctacttatgagagaattggtctgtacattgactgattcactttttcataaagtgagcatttattgagcattttttcatgtgccagagcctgtactggaggcccccattgtgcacacatggagagaacatgagtctctcttaatttttatctggttgctaaagaattatttaccaataaaattatatgatgtggtgtctcaaaaaaaaaa

SEQ ID NO: 1920 - DNA, 1192 bp, Homo sapiens
ctgtgattctcactatactggtcctgaggaaagggcttctgtgaactgcggtttttagtttttattgtggttcttagttctcatgagacccctcttgaggatatgtgcctatctggtgcctctgctctccactagttgagtgaaaggaaggaggtaatttaccaccatgtttggttcctgtttataagatgttttaagaaagatttgaaacagattttctgaagaaagcagaagctctcttcccattatgacttcggaaatcacttatgctgaagtgaggttcaaaaatgaattcaagtcctcaggcatcaacacagcctcttctgcagcttccaaggagaggactgcccctcacaaaagtaataccggattccccaagctgctttgtgcctcactgttgatatttttcctgctattggcaatctcattctttattgcttttgtcaagacagcctggagctgttgcccaaagaattggaagtcatttagttccaactgctactttatttctactgaatcagcatcttggcaagacagtgagaaggactgtgctagaatggaggctcacctgctggtgataaacactcaagaagagcaggatttcatcttccagaatctgcaagaagaatctgcttattttgtggggctctcagatccagaaggtcagcgacattggcaatgggttgatcagacaccatacaatgaaagttccacattctggcatccacgtgagcccagtgatcccaatgagcgctgcgttgtgctaaattttcgtaaatcacccaaaagatggggctggaatgatgttaattgtcttggtcctcaaaggtcagtttgtgagatgatgaagatccacttatgaactgaacattctccatgaacaggtggttggattggtatctgtcattgtagggatagataataagctcttcttattcatgtgtaagggaggtccatagaatttaggtggtctgtcaactattctacttatgagagaattggtctgtacattgactgattcactttttcataaagtgagcatttattgagcattttttcatgtgccagagcctgtactggaggcccccattgtgcacacatggagagaacatgagtctctcttaatttttatctggttgctaaagaattatttaccaataaaattatatgatgtggtgtctcaaaaaaaaaa

SEQ ID NO: 1921 - DNA, 1791 bp, Homo sapiens
cgcccgccggaggggcctggagtgcggcggcggcgggacccggagcaggagcggcggcagcagcgactgggggcggcggcggcgcgttggaggcggccatggcaaagcagtacgactcggtggagtgccctttttgtgatgaagtttccaaatacgagaagctcgccaagatcggccaaggcaccttcggggaggtgttcaaggccaggcaccgcaagaccggccagaaggtggctctgaagaaggtgctgatggaaaacgagaaggaggggttccccattacagccttgcgggagatcaagatccttcagcttctaaaacacgagaatgtggtcaacttgattgagatttgtcgaaccaaagcttccccctataaccgctgcaagggtagtatatacctggtgttcgacttctgcgagcatgaccttgctgggctgttgagcaatgttttggtcaagttcacgctgtctgagatcaagagggtgatgcagatgctgcttaacggcctctactacatccacagaaacaagatcctgcatagggacatgaaggctgctaatgtgcttatcactcgtgatggggtcctgaagctggcagactttgggctggcccgggccttcagcctggccaagaacagccagcccaaccgctacaccaaccgtgtggtgacactctggtaccggcccccggagctgttgctcggggagcgggactacggcccccccattgacctgtggggtgctgggtgcatcatggcagagatgtggacccgcagccccatcatgcagggcaacacggagcagcaccaactcgccctcatcagtcagctctgcggctccatcacccctgaggtgtggccaaacgtggacaactatgagctgtacgaaaagctggagctggtcaagggccagaagcggaaggtgaaggacaggctgaaggcctatgtgcgtgacccatacgcactggacctcatcgacaagctgctggtgctggaccctgcccagcgcatcgacagcgatgacgccctcaaccacgacttcttctggtccgaccccatgccctccgacctcaagggcatgctctccacccacctgacgtccatgttcgagtacttggcaccaccgcgccggaagggcagccagatcacccagcagtccaccaaccagagtcgcaatcccgccaccaccaaccagacggagtttgagcgcgtcttctgagggccggcgcttgccactagggctcttgtgttttttttcttctgctatgtgacttgcatcgtggagacagggcatttgagtttatatctctcatgcatattttatttaatccccaccctgggctctgggagcagcccgctgagtggactggagtggagcattggctgagagaccaggagggcactggagctgtcttgtccttgctggttttctggatggttcccagagggtttccatggggtaggaggatgggctcgcccaccagtgactttttctaagagctcccggcgtggtggaagaggggacaggtccctcacccacccacaatcctattctcgggctgagaaccctgcgtgaggacagggctcgcctcaggaatgggctgtttttggcctaaccctcagaaacactggggctggcacaaactcttggtttcttcaacaggagaattttactgtgtttcttttggttccattgtttggagacattcctgggcacagtttggtccgttagaattaaaagttgaatttttttttttttttaaaaaaaaaaaaaaaaaaaaaaaaaaaaaaaa

SEQ ID NO: 1922 - DNA, 3084 bp, Homo sapiens
ctgggctcctggttgcagagctccaagtcctcacacagatacgcctgtttgagaagcagcgggcaagaaagacgcaagcccagaggccctgccatttctgtgggctcaggtccctactggctcaggcccctgcctccctcggcaaggccacaatgaaccggggagtcccttttaggcacttgcttctggtgctgcaactggcgctcctcccagcagccactcagggaaagaaagtggtgctgggcaaaaaaggggatacagtggaactgacctgtacagcttcccagaagaagagcatacaattccactggaaaaactccaaccagataaagattctgggaaatcagggctccttcttaactaaaggtccatccaagctgaatgatcgcgctgactcaagaagaagcctttgggaccaaggaaactttcccctgatcatcaagaatcttaagatagaagactcagatacttacatctgtgaagtggaggaccagaaggaggaggtgcaattgctagtgttcggattgactgccaactctgacacccacctgcttcaggggcagagcctgaccctgaccttggagagcccccctggtagtagcccctcagtgcaatgtaggagtccaaggggtaaaaacatacagggggggaagaccctctccgtgtctcagctggagctccaggatagtggcacctggacatgcactgtcttgcagaaccagaagaaggtggagttcaaaatagacatcgtggtgctagctttccagaaggcctccagcatagtctataagaaagagggggaacaggtggagttctccttcccactcgcctttacagttgaaaagctgacgggcagtggcgagctgtggtggcaggcggagagggcttcctcctccaagtcttggatcacctttgacctgaagaacaaggaagtgtctgtaaaacgggttacccaggaccctaagctccagatgggcaagaagctcccgctccacctcaccctgccccaggccttgcctcagtatgctggctctggaaacctcaccctggcccttgaagcgaaaacaggaaagttgcatcaggaagtgaacctggtggtgatgagagccactcagctccagaaaaatttgacctgtgaggtgtggggacccacctcccctaagctgatgctgagcttgaaactggagaacaaggaggcaaaggtctcgaagcgggagaaggcggtgtgggtgctgaaccctgaggcggggatgtggcagtgtctgctgagtgactcgggacaggtcctgctggaatccaacatcaaggttctgcccacatggtccaccccggtgcagccaatggccctgattgtgctggggggcgtcgccggcctcctgcttttcattgggctaggcatcttcttctgtgtcaggtgccggcaccgaaggcgccaagcagagcggatgtctcagatcaagagactcctcagtgagaagaagacctgccagtgccctcaccggtttcagaagacatgtagccccatttgaggcacgaggccaggcagatcccacttgcagcctccccaggtgtctgccccgcgtttcctgcctgcggaccagatgaatgtagcagatcccaggcctctggcctcctgttcgcctcctctacaatttgccattgtttctcctgggttaggccccggcttcactggttgagtgttgctctctagtttccagaggcttaatcacaccgtcctccacgccatttccttttccttcaagcctagcccttctctcattatttctctctgaccctctccccactgctcatttggatcccaggggagtgttcagggccagccctggctggcatggagggtgaggctgggtgtctggaagcatggagcatgggactgttcttttacaagacaggaccctgggaccacagagggcaggagcttgcacgaaatcacacagccaagccagtcaaggatggatgcagatccagaggtttctggcagccagtacctcctgccccatgctgcccgcttctcaccctatgtgggtggggccacagactcacatcctgaccttgcacaaacagcccctctggacacagccccatgtacacggcctcaagggatgtctcacatcctctgtctatttgagacttagaaaaatcctacaaggctggcagtgacagaactaagatgatcatctccagtttatagaccagaaccagagctcagagaggctagatgattgattaccaagtgccggactagcaagtgctggagtcgggactaacccaggtcccttgtcccaagttccactgctgcctcttgaatgcagggacaaatgccacacggctctcaccagtggctagtggtgggtactcaatgtgtacttttgggttcacagaagcacagcacccatgggaagggtccatctcagagaatttacgagcagggatgaaggcctccctgtctaaaatccctccttcatcccccgctggtggcagaatctgttaccagaggacaaagcctttggctcttctaatcagagtgcaagctgggagcacaggcactgcaggagagaatgcccagtgaccagtcactgaccctgtgcagaacctcctggaagcgagctttgctgggagagggggtagctagcctgagagggaaccctccaagggacctcaaaggtgattgtgccaggctctgcgcctgccccacaccctcccttaccctcctccagaccattcaggacacagggaaatcagggttacaaatcttcttgatccacttctctcaggatcccctctcttcctacccttcctcaccacttccctcagtcccaactccttttccctatttccttctcctcctgtctttaaagcctgcctcttccaggaagacccccctattgctgctggggctccccatttgcttactttgcatttgtgcccactctccacccctgctcccctgagctgaaataaaaatacaataaacttactataaagataaaaaaaaaaaaaaaaaaaaaaaaaaaaaaaaaaaaaaaaaaaaaaaaaaaaaaaaaaaaaaaaaaaaaaaaaaaa

SEQ ID NO: 1923 - DNA, 1969 bp, Homo sapiens
gctgcgagacgctaagcggcgccgggcgggagaagagcggagcagtggtcggagatgtggcgaccggtgcagctctgtcatttccactctgctctgctgcacagaaggcagaagccctggccgtcccctgctgtgttcttcaggagaaacgtcaggggccttcctccaaggttctccagccccacacccctgtggaggaaggtgctctccaccgcggtagtgggggcgcccctgctcctcggagcccgctatgtcatggcagaggcacgggagaagaggaggatgcggctcgtggtggatggcatggggcgctttggcaggtctctgaaggtcggcctgcagatctccctggactactggtggtgcaccaatgttgtccttcgaggggtggaagagaacagcccaggctacttggaggtgatgtctgcgtgtcaccagcgggcggctgatgccctggtggcaggggccatcagcaacgggggcctctacgtgaagctgggccaggggctgtgctccttcaaccacctgcttccccccgagtatacccggaccctgcgcgtgctagaggacagggccctcaagcggggcttccaggaggtggatgagttgttccttgaggacttccaggccctcccccacgagctcttccaggagtttgactaccagccaattgctgccgccagcctggcacaggtgcacagagccaagctgcacgatggcaccagcgtggctgtgaaggtgcagtacatcgacctgcgggaccgctttgatggggacatccacaccctggagctcctgctgcggctcgttgaggtcatgcaccccagctttggcttcagctgggtcctccaggacctgaaggggaccctggcccaggagctggacttcgagaatgagggccgcaacgcagagcgctgtgcgcgggagctggcgcacttcccctacgtcgtggtgccccgcgtgcactgggacaagtccagcaagcgcgtgctcactgccgacttctgcgccggctgcaaggtcaacgatgtggaggccatcaggagccaggggctggcagtgcatgacatagcagaaaagctcatcaaggcctttgctgagcagatattttacaccggcttcatccactcggacccacatcctggcaacgttctggtgcggaaaggcccggacgggaaagcggagctggtgctgctggaccacgggctctaccagttcctggaggagaaggaccgcgcagccctctgccagctgtggcgggccatcatcctgcgggacgacgccgccatgagggcgcacgcagccgcactgggggtgcaagactacctcctgttcgccgagatgctcatgcagcgccccgtgcgcctggggcagctgtggggctcgcacctactgagccgcgaagaggcggcctacatggtggacatggcccgcgagcgcttcgaggccgtcatggcggtgctcagggagctgccgcggcccatgctgctggtgctgcgcaacatcaacaccgtgcgcgctatcaacgtggccctcggcgcccccgtggaccgctacttccttatggctaaaagggctgtccggggctggagccgcctggcgggcgccacgtatcggggtgtctacggcaccagcctcctgcgccacgccaaggtcgtctgggagatgctcaagtttgaagtggcgctcaggctggagaccttggccatgcggctgaccgccctcctggctcgtgctctggtccacctgagcctcgtgcccccagcggaggagctctaccagtacctggagacctagggtgcagccgcccagggccggcggggcccttttcaccttgggctgacggaggtggcggggctagaggtgtagacaccccgagccccgtgggcactcgcactggggggctgtgacagcagctgggccaggaggccgtgtaatgaccacacactcctctcaagcaaaaaaaaaa

SEQ ID NO: 1924 - DNA, 7889 bp, Homo sapiens
gccgcaaagacagagcgggcagaggcgatggagggcgacggggtgccatggggcagcgagcccgtctcgggtcccggccccggcggcggcggaatgatccgcgagctgtgccggggcttcggccgctaccgccgctacctgggacggctgcgacagaacctgcgcgagacccagaagttcttccgcgacatcaagtgctcccacaaccacacttgtctctcctccctcacgggcggcggcggggccgagcgcggccctgcaggcgatgtcgccgaaaccgggctgcaggcgggccaactgagctgcatttccttcccacctaaggaagagaagtacctccagcagattgtggactgcctcccttgcatactgatcctcggccaggattgtaacgtcaagtgccagctgttgaatctgctgttgggggtgcaggtgcttcccaccaccaagctgggcagtgaggagagctgtaagcttcggcgcctccgcttcacctatgggactcagactcgggtcagcctggcgctccctggacagtatgaactagtgcacacgctggttgctcatcagggcaactgggagaccatccctgaggaggatctggaggtccaagagaacaatgaggatgctgctcatgttttagcggaactggaggtaacgatgcaccatgctctcttacaggaagtggacgttgtggtagcaccatgccaaggcctccggcccacagtggatgttctgggtgacttggtgaatgatttcttgcctgtgataacctatgcactccacaaagatgaactctctgagagggatgagcaagagcttcaggaaatccgaaagtatttctcctttcctgtattctttttcaaagtgccgaaactgggctcggagataatagactcctcaaccaggagaatggagagcgaaagatcaccgctttatcgccagctaattgacctgggctatctgagcagcagtcactggaactgtggggctcctggccaggatactaaagctcagagcatgttggtggaacagagtgaaaagctgagacacttgagcacattttctcaccaggtgttacagactcgcctggtggatgcagccaaggccctgaacctggtgcactgccactgccttgacatctttattaaccaggcatttgacatgcagcgggacctgcagatcactcccaaacgtctggaatatactcgaaaaaaggagaatgagttgtatgaatcattgatgaatattgccaaccgaaagcaggaggaaatgaaggatatgattgttgagacacttaataccatgaaggaggaacttctggatgatgctactaacatggagtttaaagacgtcattgtccctgagaatggagaaccagtaggcaccagagagatcaaatgctgcatccgacagatccaggaactcatcatctcccgacttaatcaggcagtggctaataagctgatcagctcagtggattacctgagggaaagcttcgtcggaaccctggaacgatgtctgcagagcctggagaagtctcaggatgtctcagttcacatcaccagtaattatctcaaacagatcttaaatgctgcctatcatgttgaagtcacgtttcactcagggtcgtcagttacaaggatgctatgggagcaaatcaaacagatcatccagcgcatcacatgggtgagcccacctgccatcactctggaatggaagaggaaggtggcccaggaagccattgagagcctcagcgcctccaaattggctaagagcatttgcagccaattccggactcggctcaatagttcccacgaggcttttgcagcctccttgcggcagctggaagctggccactcaggccggttagagaaaacggaagatctatggctgagggttcggaaagatcatgctccccgcctggcccgcctttctctggaaagctgttctttacaggatgtcttgcttcatcgtaaacctaaactgggacaggaactgggccggggccagtatggtgtggtatacctgtgtgacaactggggaggacacttcccttgtgccctcaaatcagttgtccctccagatgagaagcactggaatgatctggctttggaatttcactatatgaggtctctgccgaagcatgagcgattggtggatctccatggttcagtcattgactacaactatggtggtggctccagcattgctgtgctcctcattatggagcggctacaccgggatctctacacagggctgaaggctgggctgaccctggagacacgtttgcagatagcactagatgtggtggagggaatccgcttcctgcacagccagggacttgtccatcgtgatatcaaactgaaaaatgtgctgctggataagcagaaccgtgccaagatcactgacttaggattctgcaagccagaggccatgatgtcaggcagcattgtggggacaccaatccatatggcccctgaacttttcacagggaagtacgataattccgtggatgtctacgcttttggaattcttttctggtatatctgctcaggctctgtcaagctccctgaggcatttgagaggtgtgctagcaaagaccatctctggaacaatgtgcggaggggggctcgcccagaacgtcttcctgtgtttgatgaggagtgctggcagttgatggaagcctgttgggatggcgaccccttgaagaggcctctcttgggcattgtccagcccatgctccagggcatcatgaatcggctctgcaagtccaattctgagcagccaaacagaggactagatgattctacttgaaagcaaagacctttctctttcactctctagttatttccttccccctcaccttttggccatggggagaatttgacatttattcactataggacacactcccaagggaactggtgcttgctgggaaacttggaaccttcccaggcagggatgactcctggacagtgaagagttgaatgactgagcatattcagcagctcactgaagcgccaagctatccctttagcaaaaaagtgtctcagatgtgtaaaagctgaggaatgtggtgttctggcttcacaaatgaaaaggaggcagatgttaccattgtcttttcactgtatatacttctaagacagcaagcgggacactgcagtggcaatagtgttaaaaaatctcattctcatgatttttggctctagctaggaatagtttagtcaggactcagaaaatttgagcttagttctgggattatgaaaacatggggacaaaaacaataacttgtggatgtctggttcctgctgtctgcagccaggtatctcaggttgcaatggtcagaagtcccagtgagggagctagaaacagagctatctgttcctcatagtgccagtgtgtttacatttataggaccacatatccctggtttctgggggagggtttcactgttacatcaccaagaggccctgaaaagaggaaaaaaaaaaaaaaagaggccaggcatggtggctcacgcctgtaatctcagcactttgggaggctgaggcgggcggatcacaaggtccagagttcaagagcagcctggccaacatggtgaaaccccgtctctactaaagatacaaaaaattagccgggcgtggtggtgcatgcctgtaatccaagatactcaggaggctgaggcaggagaatcgcttgaacctgggaggcggaggttgcagtgagccgagatcatgccattgcactccagcctgggcgacagagtgagactctgtctcaaaaaaaaaaaaaaaatagaatgtgtatgcatatatttgtgtgtatatgtatatatgtgtgtgtgtctatatctctatctatatagacatacacacaggagttattggatttagagttactgctaaccccagaacagaatctgttcttttacctttgagtcttttcttttgtttacctcttttcatctcaaagtgggaaagctccagataacatggtacttaggagtgagtgtctaagcaaaaccaacccaatgcgaagtatttgggtgagaactgagaggtgggagatgattggaggccatggcctatgtacaaacatactggaagaaaaccagcttgtttttaaaacttaacacaatcagaaatttttctttttgtgtttgaatctaacacactgacgtttggaaaacttgatcaatgagcttttaaccacgatttctcccgcaatttgttccttctttttacctttttaaaaatctgttagaagaaaaaaagcagcagacgaaagagaaaaaccctcctctggtagttctgtgtgtgcccctcacccctgtgtgctagtgtctgggaagtttccctgaaaggtgggaggcgggtgggtggtcttttggagggttcctcatgaagtgtgcttgaggaaagaaattctgattctaggcagaggaaggggaacaatttaaatattggtgcatctcagatgcacttgacttcaagccttcctcaaccaaactggtccattagattccgaaaaacaggtagacgaggaagtagacagtggaagtgagtagtctccctccatctgcctaatccccaataactgtggtctggcccctgtgttcagcccgagagtttgtaaaacaggtccccaggtaggtgtataagatgagttgcaaattagccgggcatgctggcacgcaccagtaatcccagctacttgggaggctgaggcaggagaatcacttgaacccgggaggcagaggtcatggtgagccgagatcacgccactgcactccagcctgggcaacagagcgagactctatctcaaaaaaaaacaaaaaaaaaaacaaaaaacaaagatgagtcgcacatctgctgctgggattttctagggttgtctatgacagaatgaccatcttttaaatattaatggagtataaatggagtctataatgggtctttcatataacttttaactctttggctatcctgggctctgatcatgatatgtttgagcatagtagctccctaaactcttggagcctttcagaaattccatgtagtgctaataacctttttacttgcaaatgataaagtaactgactcagtgtctttgggctctgcaggctttagccttgttttggtaggatgttcagtatattctcagaatttttaccacctatttagctatacttcaagtactctattctctgcactaacttactgtccttctgggaactatgatggggcttcaagggagtcaggtgtcaagaaaggaggggtaagtactctctacttgctggaaaatcattgtaagtctgttgtgtatgaaattttaggaaaagtcttatatagttccctttccagactgttttcttttgactctaactataatcataagtctgtgcttccattatgaaggtcacattcctagcattcttgggaagtattagctcatactctcattcacatatgggaggttagatttttttcctctacccagagtccctttttagtttaccccacggcttagtttgctgtcagataccagttctctagcagattccccaacagttttttccccagtggggagggtggaagggagggactgatataagtaaggagatgagtagttgtgttacagttcattttctttaaaaaaaagtattttgagaaaaggtgcaaaatattcttgaaagtctctaggccagccaaagtccacatatggatatttggggatgttatttaaatactcagcaggctgagtgcaggtatacgtgtgtatagagtgtgtatactttgcttttgttttataacattgtcagctaattttggctttgttctttggcatccattcttattataagtgatggaatgccatgaaatgtactgtattgtatattacttgggaggacactaggttttcaaagaagtctggcagcacttgggttatagagggctcagcatgaccaaagtcctaaagattttacctcccagctttggttgtatgtgttcccaagtggtgaggtgagattgtggctggaggaagaaaaaggatggcatgaaagaatgacccttattgtggtctgtccttctaatcaacataattagggcagcttaccccaacatgaaaatgatgacctggccatttttaatggccagagcttgaagtctggtctctcattttgtttcagaaatgagtgagaggccttcctgcagagcagtcaggagaaatggtggagcctggggccctggaatggctgaccctgtgcctagagagctgatggcaagggctgtctggcatggctcatttgggtggggtttccccaggcataccttagttccctgatcctctgcaaagagtagctcattgactgagcaagcgcttcaggaggactgtgctggttgttcccagaccaaagagagtcacttttgactccatcaacttcaaggggacagagcctaggcagcagattctcctaatttttaacactaaaattcaaggaagcagtggaggaaagaatgcattactaccacagatagaaataggggactcatagaactctcgactagtacctgtcagctctcaaatgcattcttgtgtctttgcttgagctgccaaagaagggtcacaaagtgttcttcctcatggaagaagtgcctcggggttgcagggctgcaaagtgacaactgcactgaatgacactttattttttggctttggcttattatttagcactgggaggcccaggggaattggtgattacagtagcactttgggaagttaaagccccctttgggcttgctttggagagatgatggcatgcttggtattccatttggataatcaggaagcctccctagtccatccatattgtgtcagagtgggattaacaaccctggaagagtccactgccaaaagagtagttgctttcctggaatttccaaagcttttggattttctggatcaagtaacccactttttaaaacctgaggtcaggagttcgagaccagcctggtaacatggtgaaaccccgtctctattaaaaatagaaaaaattagccaggcatggtggcgggcacctatagtcccagctactcaggaggctgaggtaggagaattgcttgaacccaggagacagaggctgcattgagccaagatcacaccactgcactccagcctgggcagcagagcaagactccatctcaaaaaaaaaaaaaagaaaaagaaaaagaaggttaatccttcagttatggaggtgggatgaatagagcttgtttgatgttaaagtgggtaaggagggagtggccttgagacacttgtattccaaactctcctggaggtttccagtagcactactgttcctaaaagggtttcatttttaacttcatctgttttgttaacatccagtccaattgaggtgatctcagaggtgcatcaggacatctagcactggggaggccaccttgcccagatagttgaaaagaaaattggtctgggcagcctgttgtcttttgtcttcatgtaatgttttttctttgttttaaaggactaatgtttattacagtgttaaataaaagtgtaagatactaagtgtgtagaataaaagtgcaataacaaaagacaatgactttggcacacacttcagtctttatcctctctcctttcttgtgctacctggctctttccataatattgttacagcaggaccgtcttaattgtgtgcattttgaagagatgcgactctgggttaatcttcattagtgtaatattgaagggttgggtttggttttatagagtattctgtatacttgttgggatacacaaataccagatgtgctgtataataaagatcacattaacgtttaaaaaaaaaaaaaaaaaaa

SEQ ID NO: 1925 - DNA, 7754 bp, Homo sapiens
gccgcaaagacagagcgggcagaggcgatggagggcgacggggtgccatggggcagcgagcccgtctcgggtcccggccccggcggcggcggaatgatccgcgagctgtgccggggcttcggccgctaccgccgctacctgggacggctgcgacagaacctgcgcgagacccagaagttcttccgcgacatcaagtgctcccacaaccacacttgtctctcctccctcacgggcggcggcggggccgagcgcggccctgcaggcgatgtcgccgaaaccgggctgcaggcgggccaactgagctgcatttccttcccacctaaggaagagaagtacctccagcagattgtggactgcctcccttgcatactgatcctcggccaggattgtaacgtcaagtgccagctgttgaatctgctgttgggggtgcaggtgcttcccaccaccaagctgggcagtgaggagagctgtaagcttcggcgcctccgcttcacctatgggactcagactcgggtcagcctggcgctccctggacagtatgaactagtgcacacgctggttgctcatcagggcaactgggagaccatccctgaggaggatctggaggtccaagagaacaatgaggatgctgctcatgttttagcggaactggaggtaacgatgcaccatgctctcttacaggaagtggacgttgtggtagcaccatgccaaggcctccggcccacagtggatgttctgggtgacttggtgaatgatttcttgcctgtgataacctatgcactccacaaagatgaactctctgagagggatgagcaagagcttcaggaaatccgaaagtatttctcctttcctgtattctttttcaaagtgccgaaactgggctcggagataatagactcctcaaccaggagaatggagagcgaaagatcaccgctttatcgccagctaattgacctgggctatctgagcagcagtcactggaactgtggggctcctggccaggatactaaagctcagagcatgttggtggaacagagtgaaaagctgagacacttgagcacattttctcaccaggtgttacagactcgcctggtggatgcagccaaggccctgaacctggtgcactgccactgccttgacatctttattaaccaggcatttgacatgcagcgggacctgcagatcactcccaaacgtctggaatatactcgaaaaaaggagaatgagttgtatgaatcattgatgaatattgccaaccgaaagcaggaggaaatgaaggatatgattgttgagacacttaataccatgaaggaggaacttctggatgatgctactaacatggagtttaaagacgtcattgtccctgagaatggagaaccagtaggcaccagagagatcaaatgctgcatccgacagatccaggaactcatcatctcccgacttaatcaggcagtggctaataagctgatcagctcagtggattacctgagggaaagcttcgtcggaaccctggaacgatgtctgcagagcctggagaagtctcaggatgtctcagttcacatcaccagtaattatctcaaacagatcttaaatgctgcctatcatgttgaagtcacgtttcactcagggtcgtcagttacaaggatgctatgggagcaaatcaaacagatcatccagcgcatcacatgggtgagcccacctgccatcactctggaatggaagaggaaggtggcccaggaagccattgagagcctcagcgcctccaaattggctaagagcatttgcagccaattccggactcggctcaatagttcccacgaggcttttgcagcctccttgcggcagctggaagctggccactcaggccggttagagaaaacggaagatctatggctgagggttcggaaagatcatgctccccgcctggcccgcctttctctggaaagctgttctttacaggatgtcttgcttcatcgtaaacctaaactgggacaggaactgggccggggccagtatggtgtggtatacctgtgtgacaactggggaggacacttcccttgtgccctcaaatcagttgtccctccagatgagaagcactggaatgatctggctttggaatttcactatatgaggtctctgccgaagcatgagcgattggtggatctccatggttcagtcattgactacaactatggtggtggctccagcattgctgtgctcctcattatggagcggctacaccgggatctctacacagggctgaaggctgggctgaccctggagacacgtttgcagatagcactagatgtggtggagggaatccgcttcctgcacagccagggacttgtccatcgtgatatcaaactgaaaaatgtgctgctggataagcagaaccgtgccaagatcactgacttaggattctgcaagccagaggccatgatgtcaggcagcattgtggggacaccaatccatatggcccctgaacttttcacaggggctcgcccagaacgtcttcctgtgtttgatgaggagtgctggcagttgatggaagcctgttgggatggcgaccccttgaagaggcctctcttgggcattgtccagcccatgctccagggcatcatgaatcggctctgcaagtccaattctgagcagccaaacagaggactagatgattctacttgaaagcaaagacctttctctttcactctctagttatttccttccccctcaccttttggccatggggagaatttgacatttattcactataggacacactcccaagggaactggtgcttgctgggaaacttggaaccttcccaggcagggatgactcctggacagtgaagagttgaatgactgagcatattcagcagctcactgaagcgccaagctatccctttagcaaaaaagtgtctcagatgtgtaaaagctgaggaatgtggtgttctggcttcacaaatgaaaaggaggcagatgttaccattgtcttttcactgtatatacttctaagacagcaagcgggacactgcagtggcaatagtgttaaaaaatctcattctcatgatttttggctctagctaggaatagtttagtcaggactcagaaaatttgagcttagttctgggattatgaaaacatggggacaaaaacaataacttgtggatgtctggttcctgctgtctgcagccaggtatctcaggttgcaatggtcagaagtcccagtgagggagctagaaacagagctatctgttcctcatagtgccagtgtgtttacatttataggaccacatatccctggtttctgggggagggtttcactgttacatcaccaagaggccctgaaaagaggaaaaaaaaaaaaaaagaggccaggcatggtggctcacgcctgtaatctcagcactttgggaggctgaggcgggcggatcacaaggtccagagttcaagagcagcctggccaacatggtgaaaccccgtctctactaaagatacaaaaaattagccgggcgtggtggtgcatgcctgtaatccaagatactcaggaggctgaggcaggagaatcgcttgaacctgggaggcggaggttgcagtgagccgagatcatgccattgcactccagcctgggcgacagagtgagactctgtctcaaaaaaaaaaaaaaaatagaatgtgtatgcatatatttgtgtgtatatgtatatatgtgtgtgtgtctatatctctatctatatagacatacacacaggagttattggatttagagttactgctaaccccagaacagaatctgttcttttacctttgagtcttttcttttgtttacctcttttcatctcaaagtgggaaagctccagataacatggtacttaggagtgagtgtctaagcaaaaccaacccaatgcgaagtatttgggtgagaactgagaggtgggagatgattggaggccatggcctatgtacaaacatactggaagaaaaccagcttgtttttaaaacttaacacaatcagaaatttttctttttgtgtttgaatctaacacactgacgtttggaaaacttgatcaatgagcttttaaccacgatttctcccgcaatttgttccttctttttacctttttaaaaatctgttagaagaaaaaaagcagcagacgaaagagaaaaaccctcctctggtagttctgtgtgtgcccctcacccctgtgtgctagtgtctgggaagtttccctgaaaggtgggaggcgggtgggtggtcttttggagggttcctcatgaagtgtgcttgaggaaagaaattctgattctaggcagaggaaggggaacaatttaaatattggtgcatctcagatgcacttgacttcaagccttcctcaaccaaactggtccattagattccgaaaaacaggtagacgaggaagtagacagtggaagtgagtagtctccctccatctgcctaatccccaataactgtggtctggcccctgtgttcagcccgagagtttgtaaaacaggtccccaggtaggtgtataagatgagttgcaaattagccgggcatgctggcacgcaccagtaatcccagctacttgggaggctgaggcaggagaatcacttgaacccgggaggcagaggtcatggtgagccgagatcacgccactgcactccagcctgggcaacagagcgagactctatctcaaaaaaaaacaaaaaaaaaaacaaaaaacaaagatgagtcgcacatctgctgctgggattttctagggttgtctatgacagaatgaccatcttttaaatattaatggagtataaatggagtctataatgggtctttcatataacttttaactctttggctatcctgggctctgatcatgatatgtttgagcatagtagctccctaaactcttggagcctttcagaaattccatgtagtgctaataacctttttacttgcaaatgataaagtaactgactcagtgtctttgggctctgcaggctttagccttgttttggtaggatgttcagtatattctcagaatttttaccacctatttagctatacttcaagtactctattctctgcactaacttactgtccttctgggaactatgatggggcttcaagggagtcaggtgtcaagaaaggaggggtaagtactctctacttgctggaaaatcattgtaagtctgttgtgtatgaaattttaggaaaagtcttatatagttccctttccagactgttttcttttgactctaactataatcataagtctgtgcttccattatgaaggtcacattcctagcattcttgggaagtattagctcatactctcattcacatatgggaggttagatttttttcctctacccagagtccctttttagtttaccccacggcttagtttgctgtcagataccagttctctagcagattccccaacagttttttccccagtggggagggtggaagggagggactgatataagtaaggagatgagtagttgtgttacagttcattttctttaaaaaaaagtattttgagaaaaggtgcaaaatattcttgaaagtctctaggccagccaaagtccacatatggatatttggggatgttatttaaatactcagcaggctgagtgcaggtatacgtgtgtatagagtgtgtatactttgcttttgttttataacattgtcagctaattttggctttgttctttggcatccattcttattataagtgatggaatgccatgaaatgtactgtattgtatattacttgggaggacactaggttttcaaagaagtctggcagcacttgggttatagagggctcagcatgaccaaagtcctaaagattttacctcccagctttggttgtatgtgttcccaagtggtgaggtgagattgtggctggaggaagaaaaaggatggcatgaaagaatgacccttattgtggtctgtccttctaatcaacataattagggcagcttaccccaacatgaaaatgatgacctggccatttttaatggccagagcttgaagtctggtctctcattttgtttcagaaatgagtgagaggccttcctgcagagcagtcaggagaaatggtggagcctggggccctggaatggctgaccctgtgcctagagagctgatggcaagggctgtctggcatggctcatttgggtggggtttccccaggcataccttagttccctgatcctctgcaaagagtagctcattgactgagcaagcgcttcaggaggactgtgctggttgttcccagaccaaagagagtcacttttgactccatcaacttcaaggggacagagcctaggcagcagattctcctaatttttaacactaaaattcaaggaagcagtggaggaaagaatgcattactaccacagatagaaataggggactcatagaactctcgactagtacctgtcagctctcaaatgcattcttgtgtctttgcttgagctgccaaagaagggtcacaaagtgttcttcctcatggaagaagtgcctcggggttgcagggctgcaaagtgacaactgcactgaatgacactttattttttggctttggcttattatttagcactgggaggcccaggggaattggtgattacagtagcactttgggaagttaaagccccctttgggcttgctttggagagatgatggcatgcttggtattccatttggataatcaggaagcctccctagtccatccatattgtgtcagagtgggattaacaaccctggaagagtccactgccaaaagagtagttgctttcctggaatttccaaagcttttggattttctggatcaagtaacccactttttaaaacctgaggtcaggagttcgagaccagcctggtaacatggtgaaaccccgtctctattaaaaatagaaaaaattagccaggcatggtggcgggcacctatagtcccagctactcaggaggctgaggtaggagaattgcttgaacccaggagacagaggctgcattgagccaagatcacaccactgcactccagcctgggcagcagagcaagactccatctcaaaaaaaaaaaaaagaaaaagaaaaagaaggttaatccttcagttatggaggtgggatgaatagagcttgtttgatgttaaagtgggtaaggagggagtggccttgagacacttgtattccaaactctcctggaggtttccagtagcactactgttcctaaaagggtttcatttttaacttcatctgttttgttaacatccagtccaattgaggtgatctcagaggtgcatcaggacatctagcactggggaggccaccttgcccagatagttgaaaagaaaattggtctgggcagcctgttgtcttttgtcttcatgtaatgttttttctttgttttaaaggactaatgtttattacagtgttaaataaaagtgtaagatactaagtgtgtagaataaaagtgcaataacaaaagacaatgactttggcacacacttcagtctttatcctctctcctttcttgtgctacctggctctttccataatattgttacagcaggaccgtcttaattgtgtgcattttgaagagatgcgactctgggttaatcttcattagtgtaatattgaagggttgggtttggttttatagagtattctgtatacttgttgggatacacaaataccagatgtgctgtataataaagatcacattaacgtttaaaaaaaaaaaaaaaaaaa

SEQ ID NO: 1926 - DNA, 1882 bp, Homo sapiens
tttttgtttatttttgttttgttttgttttgtttggtatagaagtgttggaacgtacacctctttcttaaaccatcctgacaaagggaaagggaaaaatacatttcccgtgaggcgttgtgactagaacagctggaggtggacggcagagtgccgcgacgactgccaggagttgtagttctccccggccgcgtcactgcggtgtcgcccacccttcttccccgggcaggccgcggtttcctttgtggacgtggcgaggagtgcccgcggcaccccgtgcactcattggccccgccccgtgagacgctcgtgcgagctcattgggcggggggcggggctctgcgctgccagaggcggggcctgactggagagcggccgaattgggcacatttgcgggaacgcagagcggagcgtggagagcggagcgaagctggataacaggggaccgatgatgtggcgaccatcagttctgctgcttctgttgctactgaggcacggggcccaggggaagccatccccagacgcaggccctcatggccaggggagggtgcaccaggcggcccccctgagcgacgctccccatgatgacgcccacgggaacttccagtacgaccatgaggctttcctgggacgggaagtggccaaggaattcgaccaactcaccccagaggaaagccaggcccgtctggggcggatcgtggaccgcatggaccgcgcgggggacggcgacggctgggtgtcgctggccgagcttcgcgcgtggatcgcgcacacgcagcagcggcacatacgggactcggtgagcgcggcctgggacacgtacgacacggaccgcgacgggcgtgtgggttgggaggagctgcgcaacgccacctatggccactacgcgcccggtgaagaatttcatgacgtggaggatgcagagacctacaaaaagatgctggctcgggacgagcggcgtttccgggtggccgaccaggatggggactcgatggccactcgagaggagctgacagccttcctgcaccccgaggagttccctcacatgcgggacatcgtgattgctgaaaccctggaggacctggacagaaacaaagatggctatgtccaggtggaggagtacatcgcggatctgtactcagccgagcctggggaggaggagccggcgtgggtgcagacggagaggcagcagttccgggacttccgggatctgaacaaggatgggcacctggatgggagtgaggtgggccactgggtgctgccccctgcccaggaccagcccctggtggaagccaaccacctgctgcacgagagcgacacggacaaggatgggcggctgagcaaagcggaaatcctgggtaattggaacatgtttgtgggcagtcaggccaccaactatggcgaggacctgacccggcaccacgatgagctgtgagcaccgcgcacctgccacagcctcagaggcccgcacaatgaccggaggaggggccgctgtggtctggccccctccctgtccaggccccgcaggaggcagatgcagtcccaggcatcctcctgcccctgggctctcagggaccccctgggtcggcttctgtccctgtcacacccccaaccccagggaggggctgtcatagtcccagaggataagcaatacctatttctgactgagtctcccagcccagacccagggacccttggccccaagctcagctctaagaaccgccccaacccctccagctccaaatctgagcctccaccacatagactgaaactcccctggccccagccctctcctgcctggcctggcctgggacacctcctctctgccaggaggcaataaaagccagcgccgggaaaaaaaaaaaaaaaaaaaaaaaaaaaaa

SEQ ID NO: 1927 - DNA, 2082 bp, Homo sapiens
gaccccaagatggcggcgcccagcgaagtggccgcgatagcccctggcgaaggcgatggcggaggcggcggctttggctcctggctggacggacggttggaggcactgggagtggaccgagccgtttatggagcctacatcttgggtatcctgcaggaggaggaggaagaagagaagctggacgctctgcaggggatcctctctgctttcctggaagaagattccctccttaatatctgcaaggagattgtggaacgatggtcagaaactcagaatgttgtcaccaaagtgaaaaaagaagatgaagtacaggccattgccaccctaattgagaagcaggcacaaatcgtagtaaagccaaggatggtgtcagaagaggagaagcagagaaaagctgccctcctggcccagtatgctgatgtgacagatgaagaggatgaagcagatgagaaggatgattcaggtgctaccacaatgaacattggttctgacaaacttctgttccgaaacaccaatgtggaagatgtctttaatgcccgaaaactggagcgagactcacttcgggatgaatcccaaaggaagaaggaacaggacaagctgcagagggagagagacaaactagccaagcaggagcgcaaggaaaaggaaaaaaaaaggacacagagaggggagcgaaagcgataaccttggcctactctattctttccccccatgaacttatcaaagggagaactggttgtgtatttaagagaaatgagagtgcattgcaaagtagtttcccaaggcatttcccctattgtttacatggtcaaaaggaaaatcaaaatcacttctaattacaaaatgtgctgttttggtggggtgggcaatcagattattatagttgatgactgtaccaaagatctggaatgggggccacctttatattttaatactcaagtcctgtgctccttttggccactttaaaaagtcttccctcaccttggataaataggattcagaaagctaacagttttcattctgaaggagcagaaacataatcaatccctccctgagataaaatgtgggcatgcacattgctttggagtcagtattcagctgtaagtgtagtattgttttatggctgaaatagaaagctaatgaagaggcctacctggatccagattttatgttaacatggcagcaaaactaggaaaatgggaagaaattacttgcggggtgttctagatctgattttttttttttttttgaaagtttcagcctgtgggaggaaaagaggtatcttttaaaatagagatagttacatattttcctcatctaggctgtgtcactattgggtgcaaggatatcattgttggctagattcattttgtataatcatgtatcctcttgtgtgctggtagagattttaatcctgatttttccataaaacatgagtattaagaaataattcctggtttggagaaactggagaaatcacccttttaaggaagaaacactggaaatttctgctaacaccaagatatttaagagtgtacatagtaggtgctcaacaaatttattgaatgaatgagtgaatggaaaaactgggagagtcaaaagtgagcagaagctctccatttctacttctgtcacaaaccacattaaattgtaaataaggcccttctccacttgacttcaggcagcagattgtctagaagcctaaggacagcaatttctctgacaagacaaagtagatattttataccaggggttggcaaactactgcccacgggccgaatttggcccagtctgtttttgtatggtgcaaactaaaaatgatttttacatttttaaagagttataaaagaaaaaaatatgtggtctgtgaaatctaaaatatttactacctggcctgttggaggaaaggtttgccaatctctgttttataccattaactatgagattaacaaaaacttttacctttgtgcagaaggttaaaaaaaaaaaaacatggttaaggaaaaggagacatgttacctcttcatacactcctataactgtggcattgcaaaaaataaaaataaccacctttaaaaaaat

SEQ ID NO: 1928 - DNA, 1426 bp, Homo sapiens
ggatccgcgtgctaaagaaaaatcgccgttaaagcagttttctttttcactgtctttttcttttcgcggggaacccagctgttcctgcgagggccacctcctcaggaagaccccgcagctctcccgcggcgcttctgcaggaggcagcgacagtttcgagaacccgggccttcccctcccagtgcctccgggggttcgcgtttcaggcgctcgtgttttccgggaagggcaggcgcgctgggccttggggagctgcgctcggcgggcggaccgggggatcatggaagctgataaagatgacacacaacaaattcttaaggagcattcgccagatgaatttataaaagatgaacaaaataagggactaattgatgaaattacaaagaaaaatattcagctaaagaaggagatccaaaagcttgaaacggagttacaagaggctaccaaagaattccagattaaagaggatattcctgaaacaaagatgaaattcttatcagttgaaactcctgagaatgacagccagttgtcaaatatctcctgttcgtttcaagtgagctcgaaagttccttatgagatacaaaaaggacaagcacttatcacctttgaaaaagaagaagttgctcaaaatgtggtaagcatgagtaaacatcatgtacagataaaagatgtaaatctggaggttacggccaagccagttccattaaattcaggagtcagattccaggtttatgtagaagtttctaaaatgaaaatcaatgttactgaaattcctgacacactgcgtgaagatcaaatgagagacaaactagagctgagcttttcaaagttccgaaatggaggcggagaggtggaccgcgtggactatgacagacagtccgggagtgcagtcatcacgtttgtggagattggagtggctgacaagattttgaaaaagaaagaataccctctttatataaatcaaacctgccatagagttactgtttctccatacacagaaatacacttgaaaaagtatcagatattttcaggaacatctaagaggacagtgcttctgacaggaatggaaggcattcaaatggatgaagaaattgtggaggatttaattaacattcactttcaacgggcaaagaatggaggtggagaagtagatgtggtcaagtgttctctaggtcaacctcacatagcatactttgaagaatagacttaacagaatcatgaaaactatagctttttaacccggattactgtaaatgtttgacaagaatgaatatgcttttccttaaaaaatgaaaactttaatttttaccatccatttatgtttagatacaaaacttatttccatgtttctgaatcttctttgtttcaaatggtgctgcatgttttcaactacaataagtgcactgtaataaaaagttttgtttat

SEQ ID NO: 1929 - DNA, 2858 bp, Homo sapiens
cggcaaaaggggattattcaaagtaccgaaaaccttctcccgggatcaggcgcggcggcacccccaggccaggggcacctctggtggggcagaaggtgattgaattactcagatatgaagatcatcatctaggttttgtgtaaaaggccctggatattttaagtggccattttggatttacagtgtttttggataattttgccccagaagtttattaaaattggcaagaatcgtctgtgaagtgaattgatagtagtgaacaattcagcaagctacttaaaaagagacccaggcagcatttcttcagtattttggttcaaacggattatataactggttacagtatttcagctggtggtaatttttgcctccccttcccccaccccgttgttggggttcttcagccgaaactgagagacgttgatttgtgtactgagtagtttcagcagtttcaaatgactgagtattgctgaagtttcatggcagtttatttttacctttattgaaagttttaggaatttttgacttcagctctttcatgtcacaatgggacactttttctgaatgaagagattgaaagaatacagagtttttttccttttatcttttatttacgtggaaatttaagatgttgcagttttccggcagcatggtagtattgagatagctatgtgtgtctctgtatatgctgatgtttaggaatgctcttcagatgtgaaattttctttttgtttttgctttttggctcgtaaattggatatttcatctggagtggacaagtacaacagtggcaagtacatggaataataaagaagactttgatcttaaatctaaagaacttggctaattcgggagatagccatatgaaaactttaaaacagaagtatgggtagctgacttgaagtaactctatgtcaaatagtcgtaggttaagtatcttcaaagaacttcgatattatttcagaggatacaaaataaaaatacaaactggaaaataaagattacagagaaaaaaccaacaccttcctgtgcagtcctgttggaatttggacttgccatgaggtgttgaagccttgtttcactgagttggagagactggacctaaatggcgcagcatgactttgctccagcctggcttaatttccctactccaccatcatcaacaaagtcgtcattgaattttgagaagcattctgaaaactttgcatggacagagaatcgttatgatgtgaaccgtcgacgacacaactcttcagatggctttgattctgctattggacgtcctaatggaggtaactttggaaggaaagaaaaaaatggatggcgtacacatggaagaaatggtacagaaaacataaatcatcgaggtggataccatggtggaagttcccgttctcgtagcagtattttccatgcaggaaaaagccaaggactacatgaaaacaacatacctgacaatgaaaccgggaggaaagaagacaagagagaacgcaaacagtttgaagctgaggattttccgtctttaaatcctgagtatgagagagaaccaaatcacaataagtctttagctgcaggtgtgtgggaatatcctccgaatcctaaatctagagctccaaggatgctggtcattaagaaaggtaatacaaaagacttacagctatctggattcccagtagtaggaaatcttccgtcacagccagttaagaatggaactggtccaagtgtttataaaggtttagtccctaaacctgctgctccacctacaaaacctacacaatggaaaagccaaacaaaagaaaataaagttggaacttctttccctcatgagtccacatttggcgttggcaactttaatgcttttaaatcaactgccaagaactttagtccatctacaaattcagtgaaagagtgtaatcgctcaaattcctcttctcctgttgacaaacttaatcagcagcctcgtctaaccaaactgacacgaatgcgcactgataagaagagtgaatttttgaaagcattgaaaagagacagagtagaagaggaacatgaagatgaaagccgtgctggctcagagaaggatgacgactcatttaatttacataacagcaatagtactcaccaagaaagggatataaaccgaaacttcgatgaaaatgaaattcctcaagagaatggcaatgcctcagtgatttcccagcagatcattcggtcttcaaccttcccacaaactgatgttctttcaagttcacttgaggcagaacacagattgttaaaggaaatgggctggcaggaagacagtgaaaatgatgaaacatgtgctcccttaactgaggatgaaatgagagaattccaagttattagtgaacagttacagaagaatggtctgagaaaaaatggtattttgaaaaatggcttgatctgtgacttcaagtttggaccgtggaagaacagcactttcaaacccacaactgagaatgatgacacagagacaagtagcagtgatacatcagatgacgacgatgtgtgaaggatttcctaacagctttagaaatcttagtgtgatacatctctcatacagtttggggtgaattgtaaaaatgaagaactataatttatgtagtgaaataccccattagaagaggattttttgggggacttcaatatgaagaaaaccaagaatgttttgttgggctgtgttgaacattatttctttgtaaatgaatgttgtaggaatgaggacttgggttggtccaacattgactttcttcatcactgcaacatttctctgactagcaatgtgacgatgtaacaaatgagattttctcatttaataataaaaaagttgtgtaatgttttgc

SEQ ID NO: 1930 - DNA, 1185 bp, Homo sapiens
accgtcttccgccgcacgtggattcagcgcgatgcccaaatccaagcgcgacaagaaagtctccttaaccaaaactgccaagaaaggcttggaattgaaacaaaacctgatagaagagcttcggaaatgtgtggacacctacaagtaccttttcatcttctctgtggccaacatgaggaacagcaagctgaaggacatccggaacgcctggaagcacagccggatgttctttggcaaaaacaaggtgatgatggtggccttgggtcggagcccatctgatgaatacaaagacaacctgcaccaggtcagcaaaaggttgaggggtgaggtgggtctcctgttcaccaaccgcacaaaggaagaggtgaatgagtggttcacgaaatacacagaaatggactacgcccgagctggtaacaaagcagctttcactgtgagcctggatccagggcccctggagcagttcccccactccatggagccacagctcaggcagctgggcctgcccaccgccctcaagagaggtgtggtgactctgctgtctgactacgaggtgtgcaaggagggcgatgtgctgaccccagagcaggctcgcgtcctgaagctttttgggtatgagatggctgaattcaaggtgaccatcaaatacatgtgggattcacagtcgggaaggttccagcagatgggagacgacttgccagagagcgcatctgagtccacagaagagtcagactcagaagatgatgactgaaagggactcgggactgaaggtctcctggaagcttctgggtctcactggaccatcaggactgctgccgcccctctggagagagcagctttttatttgtctgtagacagggaacatgatgggcactgacctcctgtaaagaataaaactgtgggccgggcgcggtggctcacgcctggaatcccagcactttgggaagccgaggtgggcagatcataaggtcaggagattaagaccatcctggctaacacggtgaaaccccgtctctactaaaaatagaaaaaaaaactagttgggcatagtggcatgtgcctgtagtcccagctactcaggaggctgaggcaggagaatcacttgaacccgggaggtggaggttgccgtgagttgagattggaccactgctctccagcctgggcaacagagtaaaactctgtccc

SEQ ID NO: 1931 - DNA, 1809 bp, Homo sapiens
caagctcccggccgggctgactcaagcggaggcgcgcggaacagtcgccgaggcgattcccgcccaggctcctgtaaccgccaggcagcggccccgccatgtcccagccccggaccccagagcaggcactggatacaccgggggactgccccccaggcaggagagacgaggacgctggggaggggatccagtgctcccaacgcatgctcagcttcagtgacgccctgctgtccatcatcgccaccgtcatgatcctgcctgtgacccacacggagatctccccagaacagcagttcgacagaagtgtacagaggcttctggcaacacggattgccgtctacctgatgacctttctcatcgtgacagtggcctgggcagcacacacaaggttgttccaagttgttgggaaaacagacgacacacttgccctgctcaacctggcctgcatgatgaccatcaccttcctgccttacacgttttcgttaatggtgaccttccctgatgtgcctctgggcatcttcttgttctgtgtgtgtgtgatcgccatcggggtcgtgcaggcactgattgtggggtacgcattccacttcccgcacctgctgagcccgcagatccagcgctctgcccacagggctctgtaccgacgacacgtcctgggcatcgtcctccaaggcccggccctgtgctttgcagcggccatcttctctctcttctttgtccccttgtcttacctgctgatggtgactgtcatcctcctcccctatgtcagcaaggtcaccggctggtgcagagacaggctcctgggccacagggagccctcggctcacccagtggaagtcttctcgtttgacctccacgagccactcagcaaggagcgcgtggaagccttcagcgacggagtctacgccatcgtggccacgcttctcatcctggacatctgcgaagacaacgtcccggaccccaaggatgtgaaggagaggttcagcggcagcctcgtggccgccctgagtgcgaccgggccgcgcttcctggcgtacttcggctccttcgccacagtgggactgctgtggttcgcccaccactcactcttcctgcatgtgcgcaaggccacgcgggccatggggctgctgaacacgctctcgctggccttcgtgggtggcctcccactagcctaccagcagacctcggccttcgcccggcagccccgcgatgagctggagcgcgtgcgtgtcagctgcaccatcatcttcctggccagcatcttccagctggccatgtggaccacggcgctgctgcaccaggcggagacgctgcagccctcggtgtggtttggcggccgggagcatgtgctcatgttcgccaagctggcgctgtacccctgtgccagcctgctggccttcgcctccacctgcctgctgagcaggttcagtgtgggcatcttccacctcatgcagatcgccgtgccctgcgccttcctgttgctgcgcctgctcgtgggcctggccctggccaccctgcgggtcctgcggggcctcgcccggcccgaacaccccccgccagcccccacgggccaggacgacccacagtcccagctcctccctgccccctgctagcagccacagagcccactcccagccgtcctcaccagagatggaccagggaggacaggatgctgggcaggggaagccaagtcacgggcaggccgcagtggttcttgcgtggcctggttttattttcattgtgaaatatcatgctcttatttcagtcctcaaaaaaaaaaaaaaaaaaaaaaaaaaaaaaaaaaaaaaa

SEQ ID NO: 1932 - DNA, 1290 bp, Homo sapiens
gagtctagtctttgttcggggctgtccaaaggacgctagctgttgcacctgttcctccctgcgcgtaagatagaggataaatctcctggcaaagcccagaatgaccacagccctggaacctgaggaccaaaaaggacttctgataattaaggcagaggaccattactggggacaggattccagctcacaaaagtgcagtcctcacaggagggaactctatagacaacacttcaggaagctctgctatcaggatgcacctggaccccgtgaagctcttacccagctgtgggagctctgccgtcagtggctgaggccagaatgccacaccaaggagcagattttagacctgctggtgctagaacagttcctgagcattcttcctaaagacctgcaagcatgggtgcgtgcacaccatccagagactggagaggaggcagtgacggtactggaggatctggagagagagcttgatgaacctggaaagcaggtcccaggcaattcagaaagacgggacatactcatggacaagttggcccccttgggaaggccatatgaatcactgactgtccagctccatcccaaaaagacccagctggagcaggaagctgggaaaccacaaaggaatggtgataaaactaggactaagaatgaagagttgttccagaaggaagatatgcccaaagacaaggaattccttggggagataaatgacagactgaacaaagatactcctcagcatcctaagtccaaagatattattgaaaatgagggcagatcagaatggcaacagagggaaagaagacgatataaatgtgatgaatgtgggaaaagtttcagtcatagctcagaccttagtaaacacaggagaactcacacgggagagaagccctataaatgtgatgagtgtggaaaagccttcattcagcgctcacatctcattggacatcatagagtacacacgggagtaaaaccctataaatgtaaagaatgtgggaaagacttcagtgggcgcacaggtcttattcagcatcagagaatccacacaggtgaaaaaccctatgaatgtgatgagtgtggaaggcctttccgagtaagttcagctcttattagacatcaaagaattcataccgcaaataaactctactaatatagcagtaatatcaaaagttctttggacactcaggcctaactagttatcaaagaatctattttagaaaccttgagtttcctcaatgtggtcaaagcttcagtcatcattaaacttctctggaccaaaaaaaaaaaaaaaaa

SEQ ID NO: 1933 - DNA, 1985 bp, Homo sapiens
actgtggctaagtgtggggaccagacaggactcgtggagacatccaggtgctgaagccttcagctactgtctcagttttttgaagtttagcaatggcgtctttctctgctgagaccaattcaactgacctactctcacagccatggaatgagcccccagtaattctctccatggtcattctcagccttacttttttactgggattgccaggcaatgggctggtgctgtgggtggctggcctgaagatgcagcggacagtgaacacaatttggttcctccacctcaccttggcggacctcctctgctgcctctccttgcccttctcgctggctcacttggctctccagggacagtggccctacggcaggttcctatgcaagctcatcccctccatcattgtcctcaacatgtttgccagtgtcttcctgcttactgccattagcctggatcgctgtcttgtggtattcaagccaatctggtgtcagaatcatcgcaatgtagggatggcctgctctatctgtggatgtatctgggtggtggcttttgtgatgtgcattcctgtgttcgtgtaccgggaaatcttcactacagacaaccataatagatgtggctacaaatttggtctctccagctcattagattatccagacttttatggagatccactagaaaacaggtctcttgaaaacattgttcagccgcctggagaaatgaatgataggttagatccttcctctttccaaacaaatgatcatccttggacagtccccactgtcttccaacctcaaacatttcaaagaccttctgcagattcactccctaggggttctgctaggttaacaagtcaaaatctgtattctaatgtatttaaacctgctgatgtggtctcacctaaaatccccagtgggtttcctattgaagatcacgaaaccagcccactggataactctgatgcttttctctctactcatttaaagctgttccctagcgcttctagcaattccttctacgagtctgagctaccacaaggtttccaggattattacaatttaggccaattcacagatgacgatcaagtgccaacacccctcgtggcaataacgatcactaggctagtggtgggtttcctgctgccctctgttatcatgatagcctgttacagcttcattgtcttccgaatgcaaaggggccgcttcgccaagtctcagagcaaaacctttcgagtggccgtggtggtggtggctgtctttcttgtctgctggactccataccacatttttggagtcctgtcattgcttactgacccagaaactcccttggggaaaactctgatgtcctgggatcatgtatgcattgctctagcatctgccaatagttgctttaatcccttcctttatgccctcttggggaaagattttaggaagaaagcaaggcagtccattcagggaattctggaggcagccttcagtgaggagctcacacgttccacccactgtccctcaaacaatgtcatttcagaaagaaatagtacaactgtgtgaaaatgtggagcagccaacaagcaggggctcttaggcaatcacatagtgaaagtttataagaggatgaagtgatatggtgagcagcggacttcaaaaactgtcaaagaatcaatccagcggttctcaaacggtacacagactattgacatcagcatcacctagaaacttgttagaaatgcaaattctcaagccgcatcccagacttgctgaatcggaatctctgggggttgggacccagcaagggcacttaacaaaccctcgtttctgattaatgctaaatgtaagaatcattgtaaacattagttctatttctatcccaaactaagctatgtgaaataagagaagctactttgtttttaaatgatgttgaatatttgtcgatatttccatcattaaatttttccttagcattgtaaaaaaaaaaaaaaaaaaaaaaaaaaaaaa

SEQ ID NO: 1934 - DNA, 2153 bp, Homo sapiens
gcacgaggcgaatccctgcttaaaggccttgctttcttgtctaacgccgcaaccagtcctctgagttgccaacgtctttcttcttgtctcgacgccccgtcgtccggccacagcgattctctgcttagcaggatcggtccacagcgggacgtgagtccctttcctcctcgcggcttaccgcctctctccgcctagtgccaggtgctaataaagttgttgtttcaaatgcggccaggaacatcgcgagcggggaccaatcagagagtagctttgcctctataacggcgcgagagtgagacgtcatcggtgagcgactaacgctagaaacagtggtgcgcggagaggagaggcctcgggatgtctctggcagatgagctcttagctgatctcgaagaggcagcagaagaggaggaaggaggaagctatggggaggaagaagaggagccagcgatcgaggatgtgcaggaggagacacagctggatctttccggggattcagtcaagaccatcgccaagctatgggatagtaagatgtttgctgagattatgatgaagattgaggagtatatcagcaagcaagccaaagcttcagaagtgatgggaccagtggaggccgcgcctgaataccgcgtcatcgtggatgccaacaacctgaccgtggagatcgaaaacgagctgaacatcatccataagttcatccgggataagtactcaaagagattccctgaactggagtccttggtccccaatgcactggattacatccgcacggtcaaggagctgggcaacagcctggacaagtgcaagaacaatgagaacctgcagcagatcctcaccaatgccaccatcatggtcgtcagcgtcaccgcctccaccacccaggggcagcagctgtcggaggaggagctggagcggctggatgaggcctgcgacatggcgctggagctgaacgcctccaagcaccgcatctacgagtatgtggagtcccggatgtccttcatcgcacccaacctgtccatcattatcggggcatccacggccgccaagatcatgggtgtggccggcggcctgaccaacctctccaagatgcccgcctgcaacatcatgctgctcggggcccagcgcaagacgctgtcgggcttctcgtctacctcagtgctgccccacaccggctacatctaccacagtgacatcgtgcagtccctgccaccggatctgcggcggaaagcggcccggctggtggccgccaagtgcacactggcagcccgtgtggacagtttccacgagagcacagaagggaaggtgggctacgaactgaaggatgagatcgagcgcaaattcgacaagtggcaggagccgccgcctgtgaagcaggtgaagccgctgcctgcgcccctggatggacagcggaagaagcgaggcggccgcaggtaccgcaagatgaaggagcggctggggctgacggagatccggaagcaggccaaccgtatgagcttcggagagatcgaggaggacgcctaccaggaggacctgggattcagcctgggccacctgggcaagtcgggcagtgggcgtgtgcggcagacacaggtaaacgaggccaccaaggccaggatctccaagacgctgcagcggaccctgcagaagcagagcgtcgtatatggcgggaagtccaccatccgcgaccgctcctcgggcacggcctccagcgtggccttcaccccactccagggcctggagattgtgaacccacaggcggcagagaagaaggtggctgaggccaaccagaagtatttctccagcatggctgagttcctcaaggtcaagggcgagaagagtggccttatgtccacctgaatgactgcgtgtgtccaaggtggcttcccactgaagggacacagaggtccagtccttctgaagggctaggatcgggttctggcagggagaacctgccctgccactggccccattgctgggactgcccagggaggaggccttggaagagtccggcctggcctcccccaggaccgagatcaccgcccagtatgggctagagcaggttttcatcatgccttgtcttttttaactgagaaaggagattttttgaaaagagtacaattaaaaggacattgtcaaaaaaaaaaaaaaaaaaa

SEQ ID NO: 1935 - DNA, 2019 bp, Homo sapiens
ggtcgggggcctagagcggcggttgcacttagttgcggctgctgtcaccatgtcccgcgttttggtgccttgccatgtgaaaggctccgtagccctccaggtgggcgacgtgcggacctcccaaggccggcctggcgtgctggtcatcgatgtcaccttccccagcgtcgctcccttcgagttgcaggaaatcacgtttaagaattactacacagcttttttgagcatccgtgtccgtcagtacacctcagcacacacacctgccaagtgggtgacctgcctgcgggactactgcctaatgcctgacccacacagtgaggagggagcccaggagtatgtatcgctgttcaagcatcagatgctgtgtgacatggctagaatatcggagctacgcctgattctgcggcagccatcaccactgtggctgtctttcacagtggaggagctgcagatctatcagcagggaccaaagagcccctccgtgacctttcccaagtggctctcccacccagtgccctgtgagcaacctgcactcctccgtgagggtctcccagaccccagcagggtatcctccgaggtgcagcagatgtgggcactgacagagatgatccgggccagtcacacctccgcaaggatcggccgctttgatgtggatggctgttatgacctgaacttgctctcctacacttgaatggttgctcctagccaagatgttggcctttctgtgcccacccagacttggtttgggccaccagaggctgaagtgtatttcctgtgcattccaagtgttgcctgcatgcctgttctgtctgggccacattcacagattcaggattctcaggggcttaccgtgttacttcagcatgagctcctggcatgggggtgctctgtcttcgcctggctgcaactcaattcttccttctacccaaaaacactccagtcagttgtacttactgagaatccctgagtgccctctgccccttctggcaacatgcacattcctgtcttctgcctgctccctcatgtcagtgcagttgggctgggctgacctactaaaacctgctccatgtatggacctggaaggccattgctgccatggcacttgggacacttgaggaagaaacagaaaccttatttcttcctgtgtgtcccctagtggttttctttccatttgtgttatgccacagagagaaatttcctgtctgaactcttctgctgcctgcctaggaaggaaacctgaagatttgggcagcctgagtctcttggtttctgagctggctcctgaatatatgttcaagtgggtgtgcccatagggcctgggcacgtgtctctagcaaaaccagggcctgagcataagaactgggattgcaggcgtgagccaccgcgcccggcctgcccctttccaagagatatgctcagcataatgagagatcaaccgtggtggggagtgggtccaagtaagggttctcattgttgccttttaagaggcctaagtcctgcattaactcagtccaaccattaagtgatgcaggctgctcttccctcatgtgagaaaaacctgtttccctctggttcttcctggctttgcacctggtggctattacaaagcagtactgcagtatgtcttggacctggaaagttggacatgtgtgtggctcaacagttttctcgggggagttcagtgaccttttggtggccaccctctgttctcacctgtgagttcttgcaggtggcgacttcatctgcaaggtcacttacatagccccactcagctgcttcggaaagcgtgacgaagcagtagtcctcagtgtgtgtgtaagtgaagaggaccttgtggtagcagggaccatgcttcattcgtggctgtgtccccatctgagggcctggtatgcaataagatcaataaatacttgtggaatgcaaaaaaaaaaaaaaaaaaaaaaaaaaaaaaaaaaaaaaaaaaaaaaaaaaaaaaaaaaaaaaaaaaaaaaaaaaaaaaaaaaaaaaaaaaaaaaaaaa

SEQ ID NO: 1936 - DNA, 2263 bp, Homo sapiens
aggaagtagggagcggggtggcaggggggggacccgccgcggctgctgccaccgccgccaccaccgcctctgctcgtggcgtgggaaaggaggtgtgagtcccgggcgcgagccgcggcggcgccgctgcgggagggtcggcggtgggaaggcgatggcggatttagataaactcaacatcgacagcattatccaacggctgctggaagtgagagggtccaagcctggtaagaatgtccagcttcaggagaatgaaatcagaggactgtgcttaaagtctcgtgaaatctttctcagtcagcctatcctactagaacttgaagcaccactcaaaatatgtggtgacatccatggacaatactatgatttgctgcgactttttgagtacggtggtttcccaccagaaagcaactacctgtttcttggggactatgtggacaggggaaagcagtcattggagacgatctgcctcttactggcctacaaaataaaatatcctgagaatttttttcttctcagagggaaccatgaatgtgccagcatcaacagaatttatggattttatgatgaatgtaaaagaagatacaacattaaactatggaaaactttcacagactgttttaactgtttaccgatagcagccatcgtggatgagaagatattctgctgtcatggaggtttatcaccagatcttcaatctatggagcagattcggcgaattatgcgaccaactgatgtaccagatcaaggtcttctttgtgatcttttgtggtctgaccccgataaagatgtcttaggctggggtgaaaatgacagaggagtgtccttcacatttggtgcagaagtggttgcaaaatttctccataagcatgatttggatcttatatgtagagcccatcaggtggttgaagatggatatgaattttttgcaaagaggcagttggtcactctgttttctgcgcccaattattgcggagagtttgacaatgcaggtgccatgatgagtgtggatgaaacactaatgtgttcttttcagattttaaagcctgcagagaaaaagaagccaaatgccacgagacctgtaacgcctccaaggggtatgatcacaaagcaagcaaagaaatagatgtcgttttgacactgcctagtcgggacttgtaacatagagtatataaccttcatttttaagactgtaatgtgtactggtcagcttgctcagatagatctgtgtttgtgggggcccttccttccatttttgatttagtgaatggcatttgctggttataacagcaaatgaaagactcttcactccaaaaagaaaagtgttttgttttttaattctctgttccttttgcaaacaattttaatgatggtgttaaagctgtacaccccaggacagtttatcctgtctgaggagtaagtgtacaattgatcttttttaattcagtacaacccataatcatgtaaatgctcattttctttaggacataaagagagccctagggtgctctgaatctgtacatgttcttgtcataaaatgcatactgttgatacaaaccactgtgaacattttttatttgagaattttgtttcaaagggattgctttttcctctcattgtcttgttatgtacaaactagtttttatagctatcaacattaggagtaactttcaaccttgccagcatcactggtatgatgtatatttaattaaagcacacttttccccgaccgtatacttaaaatgacaaagccattcttttaaatatttgtgactctttcctaaagccaaagtttctgttgaattatgttttgacacacccctaagtacaaggtggtatggttgtatacacatgctgccttcttggggattcaaaaacaggtttttgattttgaatagcaattagtgatatagtgctgtttaagctactaacgataaaaggtaataacattttatacaatttccatatagtctattcattaagtaatctttttacagttgcatcaggcctgaacccgtccattcagaaagcttcaaattatagaaacaatactgttctatacgagtgaccgattatgctttctttggcctacattctttattctgcggtgaagttgaggcttataagttaaaacaaaggaactaacttactgtccaccagtttatacagaactcacagtacctatgacttttttaaactaagatctgttaaaaaagaaatctgtttcaacagatgaccgtgtacaataccgtgtggtgaaaat
